United States Patent Application Publication US 2019/0348154 A1 - sequence listing, part 131

SEQ ID NO: 499172 - DNA, 906 bp, Stenotrophomonas maltophilia
gtggtttctccttctgagatcatcggcaagcgcgtgctgatcacgggagcgtccggtttcaccgggcgctacgtggccgagcagctatctgcggccgggtgccaggtgcttaccctgggtacccgcgctggcgtgggagaaggcgcgtcggtcgatctgcttgatcgcgacgcgctacgcgaatccctgcagcgcctccagcccgagctggtggtgcacttggccgcgatttcgttcgtcgcccatggcgacgccgacgaaatctaccgggtcaacatcagtggcactcgcaatctgctggaagcgctggcgtcattgccggttccgccccagcacgtgctgatcgccagcagtgcgaatgtctacggcaatgtcggcggcgtgctggttgaatcttcgcctttctccccgcagaacgactacgcggtgagcaagatggccatggaggccatggcatcgctgtggagagaccgcctgccctttaccctggtgcggccattcaactacaccggggttggccagtccgatcgtttcctgattcccaagattgtttcacatttccaacgccgtgctccggtgatcgaactgggcaacactgatgtgtcccgtgatttctatgatgtgcggcttgtcgcgcagatctatgcgcggctgctgtcattgccagcctccggcgcggtgtacaacgtgtgttcgggcgtcgaatggtcgttggcacaggtgatcgacgcattgcgtgacctgtcgggccacgacatcgaagtcagggtgaaccctgcgttcgtgcgtgacaacgaagtgaagtcgttgcggggctcgaacgcgaagctggatcactcgctcggcggcctgccggccttcgatttttcctcaaccctgtcctggatgtacggaagtaccttgtga

SEQ ID NO: 499173 - DNA, 2880 bp, Stenotrophomonas maltophilia
gtgcgcatcgtcatcgatctccagggcgcgcagaccgccagccggtatcgcggtatcggtcgctactcgctttcactggctgtggcgatggctcgcaacgcaggcgagcatgagattcatgttctgctcaatggccggtttgccgacaccgtcgagccgatccggcaggcattcggatccgccttgcctgagggcaggatccacgtctggatgccagcccggtcgaccggtcagatgggcgaagacggaattgatgagcggatccgcgaatcggtgctcaatgcactggagccggatttcgttcacatcgccagcctgttcgagggctttgatgaagccgcaatcaccggggtccattccgggttctgccgcttccgcacggcggtgactctgttcgacctgattccattgattcaccagaagcgctacctggagaacccggtgatggcgcagtggtatcaccgcaaggttgcgcacatgcgacgggccgatctgctgctgggcatttccggctcggcatcgcaggaggcgatcgactacctcggcttcgaagccgacaaggtggtcaacatttcctcggccattgatgatggcttcaagcgccttgcaccggatgcgctggacgaagcggggctgcgacggaagtacgggctgtcccgcgcgttcgtgatgtacaccggcggcatcgaccaccgcaagaacatcgagggtctgatccggtcgtacgcgatgttgccgcaggaagtgcgttcggcgcatcagcttgccgtcgtctgttcggtcagggacgattcgcgcgaccaattgaaccggcttgcgcgcgattgcggccttcgtgatggcgaactggtactgaccggtttcgtttccgacgaggacctggtcgcgctctacaacctcgcgcgtctgttcgtcttcccatcgtggcacgagggcttcggcctgcccgcgctggaggcgatgcaatgcggcgcaccggtgatcgggtcggcgacctcgagcctgccggaagtcatcggcctggaagaggctctgttcgacccgcacgatgatcaggcgataaaggcaaagctgctgcaggggctggtcgatgacgccttccgcgaacgcctgctggcccatgcgccggtgcaggccaagcgtttctcctgggacgccagtgccgtccgtgcactggcggcgatggcttcggccgcaacgcagcccccggaccgtgcacgcccacgcctggcttacgtctcgccgttgccgcctgagcgaagcggcattgcagactacagcgccgaattgattccagagctggcccgtcattacgagatcgacgtgatcgtcgatcagtcacagatcgatgaccatgccgtctgcggcagcgcacgggttcgcgatctcgcttggtttcaggtgcatggtgcgggctacgaccgcgtgctctatcacttcggtaattcggcgttccacgtgcacatggtggacatgcttgagcgcgtgccgggcgtggtggtgctgcacgactttttcctgagcggcatgctggcctaccgcgagcacgccatgggccgcgcgggtacctgggccgaggccttgtatcgctcgcacggatacgccccgatgcccgcgctggcggcgcacaagcacgagcagctggtaatgggttacccgtgcaactacggggtgctggcgtcggctgtgggcatgctggtgcattcggcggtgtccacgcggatggcccagcagtactacccgggcggtgatgcggtgcgctggcgtgaagttccgttgatgcgcgtggcggcgcaggcgggcgatcgcgcccgcctgcgccaggcgctggggctgccgaaggatgccttcgtggtgtgcagcttcggcttcatggcacccaccaagctcaactcgcggctggtcgatgcctggctcgcttcctcgatggccgaagacgaaaactgctacctggtgttcgtcggcgagccggattccaacgactatggcagtgcgctgcagaagaagatcctggccagctcggccgcgcagcgcatcaggatcaccggctttgcctcgcgtgatgacttccgtgcctacctgcagtgcgcagatgcagcggtacagctgcgcacgatgtcccgtggagagacctccgcggcggtgcttgatgccctcaaccatggtctggcgacggtggtgaacgccaatggctcgatggcggacctgcccgaccacaccgtgctgaagctggaggacgcgttcgaggatgcagcgctgcaacacgcgctggagtcgctttaccacgatgtggaacggcgccaggagttggcgttggccggacagcgccacgtccaccagatccaccagccccgccgttgtgccgatgcctatgcggacgcgatcgaggatttctacgcggccagcgggcaagggcagcaggcattgttgaccgaactgggcgggtacctggcccatggtggtgccgccgttgacgaagcgggcctcggccaagcactggcctggaatcacccctcccgccagtcaggccggcaggcgctgatcgacatcgatccgggcgcgggcctgctggaatcacccggtggccgtgcggcactgcagtcgctgcttctcaacccgcccgcgggctggcgcattgaaccggtcagtcgcaaggggggggacagctaccgctacgcacgcggcgccgccctcgagctcctgggctgccctgccagcctgctgagggacgagccggtggatgtacgcgcgggcgacgtcctgctgggcgagggcatcgaaggctcgatggccttccagcagctgctctggcgcggagcgcgttttgtgccgtggtccgagcatgcaggcctgtttgcgccgcagggcccgggaggatag

SEQ ID NO: 499174 - DNA, 1473 bp, Stenotrophomonas maltophilia
gtgagtgaggggatcgtttcctacgcacagaatttcgaggacgtgatcctctggcgcgtgctggcgcatgtcggtgcgggcaactatgtcgacgtaggtgcgcagagcgcattcgaggactccgtcagccgggcctttcatgagcatggctggaagggcgtgcatgtcgagccgatgccgttctacgccgaacagttgcgcaacgagcgcccgggtgacctcatcgtgcaggccatggtgggggtggaggagggcgtcggcgaactcttcgcgatgtcaggaacaggcctgagcacgtcccgtggcgatcttgccgagggctatcagcgtgacggctgggccgtcagccggcaggtggtcccggtgctgaccctggacaccgtgctggacaaggtggatggcgaaatccattggctgaagatcgatgtcgagggtgccgaactgcaggtcctgcagggctggcatggcagccgtcggccgtgggtgcttgtggttgaaagcaccctcccgatgagccaggaacagaaccacgagacctgggatggcctggtggtggagaagggttacacgttcgcctacttcgatggactcaaccgcttttatgtgagcgacgcacatcccgaactggctgccgccttcgggccgggcccgaacgtgttcgaccggttcatgctttcgggtactgcgacctccacgtttgccgcgaagctgaaccagaagctggagctcgccgcccaggaaaagcagcgtgttgtcgaggaaaaacagggagtggaagccgaactggcggtgtcgcgcgaggagcgcgcgcatgcccgggagcgcttggccgaagccgaaaaggcgtcgctggtacagcgcctggaagcgggagaacgcgagatcgatctgcatatgcgcatctccacgaccctgtcgcgggtcaacgaactgcaggacgagctgactgaagaacggcggcgggcgatggatgccgttgccgccgcgatcgctgacgtggcgcatgagcgcgatgaggcgcttgcccgtgccgcgcatctgcaccgtgacctgatggtgatccaccagagcacgtcctgggtggtcaccgcgcccctgcgcgccatcgcgcgtggggcacgctggtcgttgaaggcgccggtcgcgcttctgcgttgggtcaaggcgaagaccatgccgaaggtccggcacgtgctctatgcggtactgcgccgcgccgcccgccagcccctggtgaagcgcctggcccgacgcgccttcgtcgccatgcccggcctggagcggcgggtgcgcgcattgcacggtgccgccaatgggcgccccgtgccgggagaaccgcaggccgtggccagtggcatcgcctcgtcggatctggttcgcctgctcgctgcgccgctgcctccggatgtgtccgcgcaggcccggcagagcctgctgcgcgtgcgccacgctgccatgggagcgaaatcctaa

SEQ ID NO: 499175 - DNA, 1251 bp, Stenotrophomonas maltophilia
atgctgagcggtgtgggcaaggcctaccgcaactggggcagcgagtggaagcgggtggcgtcctggttcggattcccgacccgcccgcttgaagagcactgggtgctccaggacatcaatctccacgtggggccgggcgagacgattggcctgatcgggcagaacggtgcgggcaagagcaccctgctcaagatcgtgaccggtaccgtgcgcccgacgcgggggcatgcgacccgtaccggtcgtattgccgcgattcttgaactgggcatgggattcaatccagacctgaccgggcgccagaacgtgattcacgccgccggcctgatggggcacgagctggaacagatccagaaggcaatgccggaaatcgaggcattcgcagaaattggcgactatttcgaccagcccgtgcggacctactccagcggcatgcagatgcgcgttgccttcagtgttgctacggccttcaagcctgacatcctgatcgtcgacgaggcgctgtcggttggcgattcgtacttccagcacaagagcttcgaccgtatccgcaagttccgcgaccaggggacgtcgatcctgttcgtgtcgcacggcatgtccgaggtgaagacgctgtgcgaccgggtgatcctgctcgacgcggggcggatcctgaaggacggtgcgcccgacgaggttgtcgactactacaacgcactcgttgcgaagaaagagaaccaatccctttcgatcgagcagcatcgtgaagatgatgggtggctgcagacccgcagcgggacccgcgaagtcacctgcgaccagctggaactgctcgatgccgatggcaatcccatcaaggtcgccacggtcgggcagaaggtcgagttgcgtctgaccgccggcgtgcacaaggccgtcgaccgccttgtgctgggctacatgctgcgtgacaagttcgggcatgtagtgtggggaaccaacacctggcatacgcggcagatcgaggagaatcttgcggccggcgacacggcggtgttctcgatgaccttcacctgcacgctgggcccgggctcgtactcggtctcgcctgcgcttgtcagcggtgacaatcatctggagaacaactacgagtgggtcgacaatctgctcgtgttcgacgtggtcaacgtggatcgcgacgttttcatcggcaccaactggctcgatgccagctttgtcattgaccgcacgcccggcgttgaccgtggtccggatggaggtgtggcgtga

SEQ ID NO: 499176 - DNA, 795 bp, Stenotrophomonas maltophilia
atgagtgagttgatgcggtccatatgggcctaccggtacttcatcctttcgtcgatcaagaacgagttgagggtgaggttcgtccgcagcaagctgggcgcgctgtggatgatcatccatcccctgatgcaggtgctgatcttcgcgaccatcctttcagaggtgctttcggccaagttgccggggatcgacaacaagtatggctacgcgctctacctgatggcgggcacgttgtgctggagcatgttctccgagacggttggccggtgcgtgacgctgttcgtggacagtggaaacctgatgaagaaaatggcgttcccgaggatctgcttgcctttcattactggcggtacgatgctggtcaacaacctgttgctgctgctcgccatcttcgcggtctttgctgcgctgggtcattatcccggcgtgcaggcgctgtggctgccggtactgatggtgataacgctgttgttcgcgatgtcgatcggcctgctgctcggcgtgctcaacgtgttcatgcgcgatatcgggcaggttgttccggtcgtgttgcaggccctgttctggctgacgccgattgtctacaacatccgcatcctgcctgagcacgtacagaacatcttcaagctcaatccgttgtatccgctggtcagcagttaccagaacgtcctgctctacgaacagccgccggtgtggggcgacctggtctggctgacaatggcaacggttgtattggcattgatttcgctggtgatgttccgtcgtgccagcccggaaatggtggatgcactgtga

SEQ ID NO: 499177 - DNA, 1395 bp, Stenotrophomonas maltophilia
atgactcgaccggactccatttcggctacggcttcagtgcgtgcgttgacgtggctgcgcaggcagccctggctgcgtgttgcctttcatctgttgcccatcgggctgcgcgagcgcgcattgcggctgttctcgcggcgattgcaggcgcggacgcgcttcgcgcgcacctcggcgtgggagaagcagctacagcctgccggcgaggttgttgcccgcgccgcaggcagtggagcggaccagcccggggtcaatgtcctgggctatatccatggtcagttcggattggctgaagcggcgcgcagctatgcgcgtgcattgatcgaacagggtgtgccggtcgcgcttcgcgacatcgatcttggcttgccgaacgcgcgcggcgaccatgcgcttgatgcatacctcgacgatacgatgccgcatgcagtcagcatcatcttcgtcaacccggattacctggcgcaggccctggcgagtatccccctggctcgcgggcaggggcgctacctcatcgcctgctggttctgggagctggaacgcctgcccgacagctggttgccagccctggagctggtggatgaagtgatggtggccacaggcttcgtcgagaatgccgtggcccacgccacccgcaagccggtgacgcggattccgatgccgttgggtgtcctcaacgacagtgggctgcagcgcgtggacttcggcctgccggaggacgcattcgttttcctgacgtccttcgatttcagctcgcggatggagcgcaagaaccccgaagcggtgatccacgccttccgcgcggcgttcccggtgcagcgtcgcgatgtccgcctgctgatcaagagcagcaatggccatcgttttccgcatctgctcaagcatctgctgaccctcaccgacggtgacgagcgcatcatcgtccgtgacgaagtcatcgcacgcgagcatctcaatgcattgcaacgttgctgcgacgcctatgtgtcgctgcaccgcgccgagggcttcggcctgggcctggccgaatgcatggccatgggcaagccggtgatcgccaccggatggtcgggcaacatggaattcatggatgccgattcggccgggctggttggattcaccctggtaccggtgggcactggcgagtatcccggtggagcaggccagcgttgggccgatgccgatgtggaacaggcggcggatttcatgcgccacttcgccgatgaccgggcctttgccgctgaagtgggcgcgcgcgggaaacgcatggtcgaccgcctgctttccggccgccatgttgcagcgagcgtcgccgctcgcgtcgaacagatcaaacaacaggctgcacttggtgccggccttcatgacgaaatgaatgtacgaggcgtgcaatga

SEQ ID NO: 499178 - DNA, 1449 bp, Stenotrophomonas maltophilia
atgcgcgcagcccgtaccgccaccctcttgctggccctgttgccggcgctgtcctgggcgcagcagaccgcgcccgccccgagcaaggaaaccagcgggcaggcagcgaacagcgaggaggcggtgacctcgaaggtgccgctggaggacatccgccgcttcgtcgccgtgtacaacgcggtgcgcgcggcctatgtcgacccggtcgatgacaagaagctgatgcagtcggcggtgcgcggcctgctgctcgacctcgacccgcacagcacgtacttcaacaaggaagacgcgcaggccttcgacgagcaggccaacggcgcctacgagggcatcggcgtggagttgcagcagcagcccgacaacgccagcatgaaggtcatctcgccgatcgacgacacgccggcggccaaggccggcatcctcgccggtgacctgatcatcgccatcgacggcaagccgatcagcgcaattgatgccagcgaaccgttgcgtggcccggccggcagcaaggtggtgctgaccatcgtgcgcgcgggcaagccgaagccgttcgacgtcagcctcacccgccagaccatccgcgtgaccagcgtgcgcagccgcctgctggagccgggctacggctacatccgcctgagcaccttccaggccgacaccgggtcggacttccagaagcacctgcagcagctgcagaagcagtccggtggccagctcaagggcctggtgctggatctgcgcagcaacccgggtgggctgctgactgccgcggtgcaggtggccgacgacctgctcgacaagggcaacatcgtcagcacccgcggccgcatcagcatcagtgatgcacggttcgatgcgacgccgggcgatctgttgaagggcgcaccggtggtggtgctggtcgatgcgggttcggccagtgcctcggaagtgctggccggcgcactgcgcgacaacaagcgcgcccgcgtggtcggcagccgcaccttcggcaagggttcggtgcagaccgtgctgccgctggacaacggtgattcggtgaagctgaccaccgcgcgttattacacgcccagcggaaagtcgatccaggccacgggcatcgtgccggaggtcgaactgaagcctgcggcgcgcccggaagacgaggcactgccggccagcctgagcgattacagcgaagcgaccctgccgggccatctgcgtggcgacgacgaaggcaccgagggctaccacgccggtgcggtgctgccgggcgatggcccgatcaacgacgcgctggccgagctgaagaacccgggttcggtggctgcacgcttgaaggccgaggcggcgaaggcggatgcggccaaggccgcgaaggccgctgcggcgaagccggaagcgaaggtcgaacctaagccggaagcacagccggaagcaaagcccgcaccggccccagcgaagccgtga

SEQ ID NO: 499179 - DNA, 411 bp, Stenotrophomonas maltophilia
atggatgattcgaacctcgcgaccacgatcagccaactgcttggtcgcgatccgctgccgattgaccgtgccactggcttgctggaatccttggcgagtcgccatggaattgatccgcgctttgtctattggtgggcaggcaaagcgacgtctgatcagacgatccaatacgacagcagtgatgaaggcctttcctgcctggctgaactgctggcggaagtgaacggcgaaatgtgcctggtagcgtcagatgagcgcgcatcgccgtggccgatctggactctgcaggcaagtgaactgattcctttgctcggcgagttgccgttctttgagtacttcgtggtgctggatgacggcgctacactgctgttcgatacccaccacaacacgttggtggtcagtcgcgagtga

SEQ ID NO: 499180 - DNA, 600 bp, Stenotrophomonas maltophilia
atgaacctgtccgacccgaacttccagctggagctggccgccaacatcgccgtcgccggctcaatcctgctggccggccgcaacaacgtgcacacctggtggctgggcatcgtcggctgtgcattgtttgctgccgtgttcgaacgatcgcacctgtatgcggacatggtgctgcagttcttcttcatcgccatcagcgtgctgggctggtggcagtggttgcgcggtgaccatggcgcgccgctgccgatcaccgcgctgcgccgacgtgcctgggcctggctggcaccgctggcagtggtggccaccttcggctacggctggatgctgacccgcctgaccaacgcctacgcgccgtacatcgattcggcggtgctggtaatgagcgtgatcgcgcagatcctgatgatgcgccgcaagctggaatcgtggtgggtgtggctgctggtgaacaccgtggcggtgccgctgtactacagccgtggcctgcacctgacctcgatcctctacatcggtttctggataaacgcgctggtcgccctgcgccattggcgccatctgatgcggaccgaggccaaggcagccgatgccgccgcctga

SEQ ID NO: 499181 - DNA, 1041 bp, Stenotrophomonas maltophilia
gtggtgggcaagttctgcccgctgcacctcggccacgaacgcctgatcgacttcgccgccacgcgctgccggcagctgctggtgatcggctggtcgcagccgggtttcccaggctacagcgccgagcgtcgcgagcgctggctgcgagcgcgcttcccgcaggcgacggtggcggtgctcgatgatgcgcgcctggcggcattgtgcacgcagcatggtttgcccgtgcgcacgctgccgcaggacagcgacaacgagcacgtgcagcgcgagttcaccgcctggctgtgcctgagcctgttcggcgggccggtgcaggcggtctacaccggcgaggactacggcgacggcttcgcgcaggcgctggccacgcacttcggcgcgccggtacgccatgagcggctcgaacgcgcactggacgtcgggctggcgtgtggcacccagctgcgcgccgatccgcatgcgcaccgtcatggcctcgcaccgcaggtctatgccggctatgtgcagcgcgtggcgttcattggtggcgagtccagcggaaagaccacgctggcgcgcgtgatggccgagcgcctgcagaccgcctgggtgccggagtatggccgcacgctatgggagcagcagggcggagagctgacgccagatgatctgcttcgcatcgcaatggcacagccgcagcacgaagacgagaccgcacggcatgcgcatcgctggctgttctgcgataccacgccgctggtgacgctgggctacagcggctggatgtttggtacggcgccggaggcactgcggcaggctgcattgcgaccgtatgacctgctgttcctgtgtgcgccggatatcccgttcgaccaggacggcacgcgggtgggcgaggccttccgagcgcagcagcatgcgtggtacgtgcgcgagctggaggcgcggggagtcgactacgtgctgctggagggggggctggaagcgcgcatcgcgcgcgtgcagagcgagctggcgaagcgggcggacaatcggttcagtgtggcccagcctctgtag

SEQ ID NO: 499182 - DNA, 456 bp, Stenotrophomonas maltophilia
atggtggacatcgcacacagggtcggcatcaaggcccccgcaagccaggtgtatcaagcactggcaacccccgaaggcgtcgccgcctggtgggccgaagacactcacggcgcccgcgagaccggcggcacggtcaaggtccgtttcaccaataacggccaggaaatcggtgccatggaaatgcagctggaacagctcattcccggcgagctggtgctctggaagttcctggccggccctgccgaatggatcggcacgcatgcgcgtttcgcgctgaaacaggaaggcgactactgcatcgtcctgttcacccatgaaggctggaaagagcgcgtcgagttcacctcccactgcagcaccaagtgggcggtgttcctgatgagcctgaaggccctgctggaaaccggcaagggccagcccaacccacacgacgtcaggatcgacaactggaattga

SEQ ID NO: 499183 - DNA, 912 bp, Stenotrophomonas maltophilia
atgtcactgccactggtccgcctgccctcgctcgatctggtccgcagcttcgtcgccgtcggtcgccgcatgagcattaccctcgccgcgcaggacctgtgccttacccagtcggcagtcagccggcagatccttgcgctggaggaactgctgggcgtgaagctgctgctgcgcgggcatcgttcgctcagcttcaccgcagaaggcgagcgcctgttccgcagcgccgacagttcggtgcagcaactgcaggatgtgctgggcgaagtcagcccgcgcggccgcgcacgcccggtcacgctcagcgccagcatcggcgtcaccggcctctggctgctgccgcgcctgaatcgcctgcaggccctgcacccgaacatcgacctgcgcgtctccgccgacaaccgcgtggctgacctgcgtcgcgatggcatcgacctggccattcgctatgccccggcgcaggccgtacccgaaggcgcgctgcgcatgttcggggaatcgatcgcaccggtgatgcgcgccacggcagagacagcgccgttgcgctcgtcccaggcagtggccgggctcaccctgctcgacttcgacgacccaccccacccatggctgcagtgggccggctggctggccgcacagggctgggccggtgccaaaccgaaagcgatcctgcgcttcaaccagtacgaccaggtcatccaggccgcactggccggccagggcattgcactcgggcgcctgcccctgatccagccaatgctggacgaaggccggctgatgcaggcccacgttgcggcgcccccgcacgaaaccgcgcacgcgtactggctgatccaggccgagtcgcagccgcgcagagacgtgcagcaggtggcggcctggatacagcaggagtcggtcagcgctggcccttga

SEQ ID NO: 499184 - DNA, 879 bp, Stenotrophomonas maltophilia
atgaacgccgctgcattgttgccctccccccatcgcgtcaccgcacccgcgcccgccatgcccgttgcggccccactgaactatctgcaggcgaacggcagccggccattcagctatgcctgtcctccaccggagggcactccatgggaaagccacgcgtacacgcccacttggatgccgatcaacgatgcccggctcgcacagggccagacctccatccaccgcgagggcttcgagttgtgggatgcccccaccgccgtacaggacttccaggacgacgcgcagatccgcagcctgtactacgccgagtccgccgcacttgcattgacggtcaccggcgcacgctgggcgcacgtgtttgaccacctgctgcgccggcgcgaacccaaccgcgatgcggtgtcgttcgggcgccaaggcagcgatggccgcgccgccgtcaacggccgcatccacaacgattacaccgaggcatccgggcgcggacgcttggcgcgcgtgctgggggaggacgctgccacccaggtgaagcgtttcgcaatcgtgaacatctggcgcgccaccaacggtcccgtacgtgacacgccattggcggtgtgcgatgcccgcacggtggccgcacaggacctggtcgacagtgacgtgcgctacccgcgccgtgttggcgagatctatcacgccgtgcatgcaccgcagcaccgctggtcgtacttctcgctgatggccccgcacgaagcactggtcttcaagcagtacgactcgcaaccgcagggtgtcgcccgcttcgtgctgcatactgcgttcgacctgccaaggattcccgccgatgcaccgctgcgcgagagcatcgaactgcgctgtctggtggtgttcgaatga

SEQ ID NO: 499185 - DNA, 588 bp, Stenotrophomonas maltophilia
atgaaggcgcccatcgaaatctggttcgacttcgccagcaactacagctacctcagcgtgatgcgcatcgaagaggctgcccgccaggccgggcgccaggtgcagtggcgccccttcctgctcggccccatcttccaggcgcagggctggaacaattcacccttcgtgctgcagaaggccaagggcatctacgtctggcaggacatgctccggcagtgccgcaagcatggcctgccctggcagaagcccagcgtgtttccacgcgtctcattgctggcctcgcgagttgcactgtacggcgccgggcaagcatggatcggtgcattctgccgccaggtgatgacactgaacttcgctgaggaccgcgacatcaccgatccacagctgatcaacgaggtactggggggcctcggcctggatgctccagccatcatcgccgcggcgctctcggaacagaacaagcaggccctgcgcacgcagaccgaacaagccatggcccgcggcatgttcggcgcgccgacattcttcgtgggcgaagggatgttctggggcgatgaccggctggcggacgcactggccaacggctga

SEQ ID NO: 499186 - DNA, 765 bp, Stenotrophomonas maltophilia
atgagtgcttcagacgcagattgcctgcacagcaaagtggcggcggtcaccctcggcttctgggtgatgaagatcgccgccaccgccctcggcgagaccgccggcgacctactgtcaatgacgctcaacctgggctacgtggccagctcggccatcctgctggcgatcttcgccggcctgttggccctgcagatgtcggcgcaacgcttccacccggtgctgttctggtcggtggtgctggccaccagcaccgccggcaccaccatgtcggacctgatcgaccgcacgctcggcctgggctacgccaccggcgccagcctgctggccggctgcctggcgctggtgttgctggcctggcggctgtcggagaagtcgatctcggtcagcaacatcgaatcgcgccgcgccgaaggcttctactggaccgccgtgctgttctccaacacgctcggcaccgcgctgggcgacttcctcgccgacgattccgggctgggcttcaccggcggcgcactactgatcggcagcctcatcgcgctcaccgcactggccagccgcatcaagggcatcaaccgggtcatcctgttctggatcgccttcgtgctcacccgcccgttcggcgccaccttcggcgatctgctcaccaagccgctggaaaagggcggtctgggcttcggcacagtaggttcgtcgctggtgctgttcactattctcgccacactggtggcgctgccgatgctgcagcgtaaggcgcagccagccagctaa

SEQ ID NO: 499187 - DNA, 306 bp, Stenotrophomonas maltophilia
atgctcaaagactacccagagcacatcaagagcctgcaggaatcgctcaattcggtgagcaaccgacgcatgaagtccctaccgccatttgaggatgcagtgtggaagctggaggattgcctcgacggattcatcgatgatgctcagggtgagctgactgcagctcaggcatccggtaatccgcaatccattgcagcagctgacgagaaattcaaactgatgttccgagcgcgctccggcaacggcggaatgaaaggcctccatgaactgtacgagtatttcaaggcatcgggagaacagccctaa

SEQ ID NO: 499188 - DNA, 3108 bp, Stenotrophomonas maltophilia
atgcctcgagccatcgttctggcgggacaacccggcgcgggtaaaggcggactggtcaccgctgttgagattgagctttccgatgatgttgtaaaggtcgatcctgacgagcttcgcggcgctcaccctgatgcccgactcctgcgccagcagcacccgtacacatgggccggccatacacatgaagacgccagccaatgggccaaggagctgcgttcgacagcagtagaggggcgtaggaatctcatcctcgacaccacgcttggcaatggtgatagcgcggtctcattgatcaaggaccttcaagccaacggctacgacgtagagatgcgaggcgtcgtggcgcatcgactggaaagtgaacttggcgtggacgcccgcttttccaactctctggatagcagaggcttcggccgctacgtccccgaagacgtgcgcaaacacgtttacgatgccctgcccggcaatctggacaaggtccaggccgagaccggcatccagattcggctctacggacgcgaaggtgctcaggtctacgacagccatagcgatacccgcctaccgggcgcagcgctggaagccgaacgcgaagctcggctgaaagaccctcgaatcacccaatcattgcgcgatggctggcgcgcacaaggccgctggcacgccgagcttggggataccctgccccacaacacaaaggtcagcccaccaacagcggcagccgttctcgatgagcgcgcaacgctcaaggttgttgaaggcattacgcccaacatccaggaagcacgcagcgtcgaccacaccatccgcgtgcgcccaaacatggtgcggggcgccgtcatcggtggcgccgcagcgacggtcgttgaagccgccacggaaggaacaaggatcgccgacctgtacgcacgcgacaaccggacgggcgcggaagccgcgctgctggacttcggagcacgcagcgtcggcggttggaccggcgcggcagtgggcgccaaggtcggtacgttgctgggcatcgagtccggccctggcgccattgtcactggcatcattggtggcgggttaggcgcttggggtggcagtgagatcgtcgattggatcgagaaataccagatcaacaaccaggccgacggcaccggcaggatctggacgtttgacccggcgcatcccgaaaagggctggacgcacagcgagcgggagatcataggcaccgtcggcaccctggccgatcgccctatctacggcgcgactacactgctcacggccgacgccgaattgacccagcaactgaactaccaggcctcaagccgggccgtcgggctgcggctgtccgcgccggatcaaccgatcaatcccttcagcattgccggcgatgccagcgatacacccagcgcactgccacgcccctgggagcgcaatccggaaaccggcgaatggcggcgcgaggtcgtccatcaggtcctcgagcacggcatcaggaacaccacgatcgaagtggccaacgccgtcaagtccgcccagcttgacgaagccgcacagggcatcatggccttcaacgccgcccgcagctcggcggcctttgccaagcagtacgagcaggcctacaccgcacaaggctggtcccagtacggaccgattccggatgaagtgatctgggcccaagaccatcccgatcacgtactggcatccgatggacgcacctatcagcaacagggcgacggcgaatggctgcatgacggctggatctacgattcgctggccgagggcaacatccgcgacgagttgaacggaacctactcgcagatccgcgccatccaacagatggaggcgcccgtacccggcgcccacgaacgcagtatcgaggcactgaccgtcaacgaacgcgaagcccgtgaccaggccatgcaggaagccaatcgactgggtgtcgctgcaccgcaagcgcagcaggtggccgccgctgccgtggctgaggttcgcggcgagcacgccgaagaacggctgacgccacaagccgtgatcgatgcgcacaccgttgaacgcgctgcactgtcgcccaacacatcgcccttggtacaggagcatcgcgctcctgcgcctgcagcgccgacgccttcggatcgtgtggaatccgtgcaggaaccggctcgccgcgaagcaccacgacaggagccgaccgcagccgctgcaacgcaacctgcacgggatgagtcaagcgagcggcgagcgcataccgagacaaatcctcctgcgcacccgatgccggcagcccctgtgccgtcacccggcattccctccgctgagcgatctcccgcacagccagaagtgagtgcatcatctacgtcgggtgtcggacaccccgctcctgcgcaggagcccgttgctactcacacccactccccgaccccgtcgatccagaccgaagtggctgaagccgcggcggctactgctcgtctccacgaagccgaagcaacgccagcgccaatccagcttgagccagacgttccagccaccctcgcagcagccgacccagctgcgcccccgctgacaacagacgccgcgcccagggtctcggagcacgagcctccttacgcgccaccacccgtggaagcaccggcggcggcaccctcaagcgcaacggcccagcaagagcccgaagcgccgcccgcacccctgctgcccacccagcccgagcatcccgatcacgccctctaccagcaggtgcgcgaaggcgtggcaacgttggatacaaagcacggccgcaccttcgacgaagccagcgagcgcatgaccgccagcctgctggtgctggccaaggacaacgacctggaccgcgtcgaccacgtactgctgagcaacgccacggcagacaaaccggccggtcacaccctgttcgtggtgcagggcgagcccagcgacccggcacaccagcgcgcagcaatgccgaccgaactggctgcgcagaccacggtagaagaatccatgcagcagttcgacgtcgtcagccgcgaagcgcagcagcgtgccatcgccaaccagctggagcagcagctggaagatcagcgcgtgcagcacgatattcaggcccgcgccgccagcatgggctga

SEQ ID NO: 499189 - DNA, 576 bp, Stenotrophomonas maltophilia
atgaacgctgatgatctgaagaccatgccggtgatggcccctctagccaaccagcacacaggtggatcgattgcatccagacgcaccatctacgtagatcttgatggcgtaatggccgacttcgacgcggcatttcccgccctgtttggcctggaccatcgcttgcttgccgacgatgaaatgtgggggcacatcaacaaccacccgtcgttcttccgcgacctaccgccgatgcacggtgcagtggaattcttccacagcatccaccacttgaacccggtgattctcactgcctgcccgaaatcgaactatccactcgctgccatccagaagcggcagtgggtgcgcgaacacctgtcagcgacctgcctggtgttgcctgtgctcggcggcaggcacaagcctcttttcatgcaccagccgggcgatgttctgatcgacgatttcgaagcgaactgtgatgcctggacagcggccggaggtgtggcgatcaggcacgccggcgattggaccgcgacgggtcacgcgctttcccagattgaagatctgtcaggagcagcgctcgcgaagggctga

SEQ ID NO: 499190 - DNA, 990 bp, Stenotrophomonas maltophilia
atgagtggccccgcgctgaagttcttggatgatgatcgaattggtcgcgtcgccggagttgacacgagccgtgtcgcgatcgatgtcacaaactcggaaatgttgacacgggttggtatcggtcagctaatagcaattaagggtgctacccaagctgaatttttgatcgcgatggctgaccgagtcactcgctcgctgcgggaggaattgccagatccaatcgagggagagagcgggttgttgctggtatctccgtcagatcacatgcaggcctttgtcatcggtacctaccgaacgattgacggcgataggccaaatacgttcaagcgaggcgctgacagtttcccccaaattgatcgagattgcttcgttattgagggagggaacctacagcgatttatgggaattctcggctcggatctgtccgagaatgaacgtttgaagcttggcacattcgtggtagatcgaagtgctgaggccattgcaagcggggatagattcttccagcggcatgcggcgattctcggaagcaccgggtccgggaaaagctgggccgttgcactcatcttggagagggcggcacggcttaaatttccaaatatcatcgtatttgatatgcatggtgagtatgcgccgctcgccgacaaggagtgtggcggatttgcgcagcgtttccgcattgctgggcctggtgatctgtctgctccgaaagatgatgctctgttcttgccctattggcttttgaatcgggatgagatgctatcgatgattttggataggagtgatcaaaatgctcctaatcaggcgtctcgttttactcttcatgtccgaagcctgaagggcgaggcattggatgattctgggcataataaggtaaaagagacgtttactgttgattctcctattccatatagaatttcggatcttgttgctaagttggtggctgacaatacggagaagggtgtcggcgcgaagggggggggcgattaa

SEQ ID NO: 499191 - DNA, 1038 bp, Stenotrophomonas maltophilia
atggaactagcggaactgaaaaagcggctccaaggttttctgggtgatggacttgttctcgtaattggatctggattgtcttgtgcagaaggcattcctggaatggccgccttggggaaatacttggctgtgcaactccccccaaccctgtctcctgacgacaatgcgttgtggaagaaagtacatccagccctagaatccgaggggcttgaggctgcacttcttaagtatccaccaacgtcatcgcttgaggctttgattgtgcaaagcaccggggccttcatagctgcggccgaggcggagattatcacggatgtatttgcgaacggtcgtgagcttcggttgacaagtcttatcccgcacctgctgaagccaaatggtgggttgcccatagttacgacaaactatgaccgacttgtcgagcttgcatgcgaggaagcggggctgggcgtggacacgatgtttagcgggagcgtcatagcgcgtttaaatcccacggagagcttctggagtttctgcaggggcgcggagctttctggtcgccatgtccggcatcgatttgctgccaaagcgaatgtgtttaagcctcatggaagtctggattggtattaccgcgaaggaggtcctgttcgattttcgggtgcacttcctttgccaaggctaataattacccctggtttgaataagttccggagtggctatgagagtccgttcgataagcatcgagaagaagccaacgatgcaattgataaagcgcaatccttcttgattgttggctatgggttcaatgatgaccaccttgagacgcacctcgttcctcgcatacgctctggtgctaaaactattgtcctgacatacgaattgtcggaaaaggctaggggcattgccctgagcaacaagaacgttgttgctgctgagtattatagaagtgatgatgcggttggcactagatttgtggtcgatgggcagcaaatgactgtcagcgacgttaatttctgggatcttggtggatttgtaaaaggagttctatccgtatga

SEQ ID NO: 499192 - DNA, 168 bp, Stenotrophomonas maltophilia
atgggtcagcaaaatgccatctggagctcgcgggggggcttgctgaggcctatggggctgtgttcgaaatgtctgatgaccagcttcgagtcttggatcgatttgagggggcggggtttggataccgtagggagcagtgggaaattctcgtacacggtaggccactga

SEQ ID NO: 499193 - DNA, 807 bp, Stenotrophomonas maltophilia
atggcggatccaatgaccatcgccggtgctggcctagcggtactaggttcaaaagacgtgctcggaaagctccttggcccaagcgctgaatacctcggtggaaaggcctctggtttgattgagaagtgcgatctgaatctcgacgatatattcgcaagagcgttcaaaaagattgctggcagggtcgatgagccgggccaagtgaacgccagaatactcaagaatgtcgtcgatgaggggcggttcgttgaggacggtctcgtggctgagtactacgccggcttgctcgccagctctagaactagggatggtttagacgacagagggctgccacatttggctatggttaaaatgatgtctgtctatcagattcgacttcatttctatatatatcactcgattttaaggttgtttggcggtaaggaaataaacgtgggtcagcatgacgggcgcagacgtttgatggtctatgcgccccttcagggggcgcgtgatgtgcttatgccggatgttaatgaaggagaagacttcgagtcggttttcctgcattcaataaatggactgtactctcacggtctgatttctgaatataagtacggatctgtggcgaatattaatagcatgtacggtggtgctgatgtgccgggatttgtagtcaccccgacatatgcagggattgagctatttatgtgggcgataggggctcagcgcccagatgctcatgaatttttgaaaaagagggttgatgatttgactagtccgatctcgatcgattccttggcggtagctgtaaatggaaaaggctga

SEQ ID NO: 499194 - DNA, 4260 bp, Stenotrophomonas maltophilia
atgaatcgcatctatcgtcgtatctggagtgccgccaagcagtgctgggtggttggaagtgagttgagcgcactgcgcgggaaaccccacggtggtggagcacgcttgtcgggaaactgcgctgcattagctgcttgcttcttcttcctgccgctggcgcaggcgatggaacctgtgcactgcgagtccgaacagaccgagtgttcgtcggaggttgctgcgacaaacatcgtgcgcatgaactcattgttcaaggcaacagatgacctatcccgtgccggtctcctggcagtaggtgagacgatctggggtgatggcatcaagcgcaacggcgatcacaacactgcgtttggctaccgcgtcgaggtgaccggtggctacaacactgccgtgggttcgaatgcacgcgcgcatggtctgggctcgactgcgctgggcaacaattcctgggcaagtggtgtcaacagcgtggcggtgggaagtggtgcacaggtcaccaccaatggcggcgtaggcgccattgccgtgggtgctgacgcccgtgccgggacgaccgggttcacgggcgccgtgtcaatcggcaatcaggcggtggctcgatacgatggggtggcgctggggtatcgagccaacgctctggccagcaattcggttgcactgggaaattcttccactgcctaccagaataatgtcgtttcggtcggaaactccagtaaccagcggagaatcgtcaacgttggtcgtggtagtacgtcctacggaagcaccgatgccgtgacgggcgggcaactatatgaaacgaaccaggacgtcagcgctgctcggagcctggctggcaccgccagttcgaacgccagcaccgcgctgagcaccgccaataccgccaagtcgactgcggacaacgccctgctcagagccaatgccctgaccgggctgctcaatcagacgtctgcgtccggcaacgtccgcctcggcgcaagcaacagcggcaccgtactggatgtgcgcaacagcgcaaacgccagccgtaagatcacgggcgtggcagacgccacgctaagtacgaccagcgcggaggctgtgtctggcaagcagctgaatgccaccaacaccaatgtagcggccgcacggtccgtcgccgattccgccaagaccaatgccgacagcgcgctggcaaaagccaatgtgatttccggccttctgagccagacgtctgcctcggggaacgtccgcctcggcgcaagcaacagtggcaccgtactggatgtacgcaacagcgcaaacgccagccgtaagatcacgggcgtcgcagacgccacgctgagtacgaccagcacggaggctgtgtctggcaagcagctgaatgccaccaacactaatgtagcggccgcacggtccgtcgccgactccgccaagagcaatgccgacagcgcgctggcaaaagccaatgtgctttccggtcttctgagccagacgtctgcctcggggagcgtccggctgggtgcatccaacagcggcaccatactggacgtgcggaacagtaccagcgccaaccgcaagatcacgggtgtggcggatgccacgctgagcacgaccagcaccgatgctgtgtcaggcaagcagctgaatgccaccaacaccaagctggcagatgcacagcgcgtcgcagacgcggcagccgcgcgtctgaacgcatccgccccggctatcgggctggcggcagaggcggaggggagcggaagcaccgccagcgtagcgatggggcgctcggcgaaggccaacaacaccaacagcatcgcagttggtgcagatgctcgggccagtgtcgacgccaacggtgacaagagcgctgccactggtgcagtcgctctcggtgctgcaacgcgtagtggcaacggcgcggtggcggcaggcctgcgtgcttcggcagtgggcgatcgcgccgtggccgtaggcaatgatgcgacggccgcggcgacccatgccgccgcgctgggctacaaggcagacgcgagcggcaatcaggccgtcgccattggccgggaggccgccgcatcgggtctgtattcgacggcgcttggcaatcttgcaaaggcgggtgccgaaagtgccattgcgttgggcgaccgcgccctggcatcgcacacaggaagtgtcgctctgggcaacggctcccagtccaccggcatcaatcaggtctcggtcggcagctccagtatcaagcgcaagatcgtcaaccttgcggatggcgctgtcagcagcagcagtaccgaggccattacgggcaagcagttgaatgaaaccaacggccgggtaacgactgcacagaatgccgccaacggcgcgcagaccaccgccaatgccgcacaggttgatgccaccaaggccttggctgaagccaccgttctgggtgggctggtcgggcaggtttcggccacggaggctgtccgcctgggtgagaagaatagcggcaccgtactgaatgtgcgcaatagcgcgaatgcgaaccgtaagctgaccggcgtggccgatggcgtggtcagcgccagcagctacgaagccgtgaatggcaggcagctcaatgccaccaatgagaaggtggttgctgtggaaggcatggccacctctgcggctgcggacgcgacccttgcaaaggtggatgcggccaaggcgttggccgaaacagcggttctgggcgggctggtggcgcaggtgtctgcctctggcgatgtgcgcctgggcgggaagaacagcggaacgacgttggatgtgcgaaacagcgccaatgccaatcggaagatcagtggtgtggcggatggtctgctggacgttggtagtgccgatgcagtcaatggcgggcagctgcatgcggttgagcagtctgcgcaaggagcgaggaacactgcagatgaagctgttagacgaattgaggaaattgctgagagttcgcgctatttttcgagcgggaagggcgggcctgaaggtacggcgcgagcaggcttgatcgccgttgctattggtgattccgccgaggcatcagtttcaagtgagggtgctgtcgccgtaggtggcttctcttctgctcgtggcaagaattctgttgctttgggcagggctgctcgcgtggatgagctagctgacaatgggttcgctcttggcgttctcgcttcggtgcaggaggctggtggtgtctcgatcggggcgaatagcattgttcagaagggtgccactagtgcattggctctcggagcatcatctgtggccgatgaggcccatactgcctcgtttggcagtgacgaggttaagcgccggctcaccaacgttgctcggggcaccgacgaccacaacgtcatcactgtctctcagctcaaggattccctcgcctctctcggcggcggcgcaggcatgggtgcgaacggcaacatcattgcccctacttatgcagtgcagagcggaacgcagaacactgtcgaggatgcgctgatggcactcgacggcgcagtcgtcagcaccacctcgcgcgtgaatcaggtcgaatcccagctccgctccgtgttccagggaaccccctcggtccgcgcagacggcacccaccagctcacactggccggtgccaacggcatggtcatctccaacgtggccaacggtctgatcgcggccggcagccgcgatgcgatcaacggtggccagctgcactcgatgcagcagcagctcaatggccgcatggatgggctggagcagcgcattgacgatcagcctcaggcccgcgccatggcggctgcgtccacgccgtcgccttccactgaagagatcgcgcctgcaccggagaccagtggctcgccgcagatcgcctcgaccggtgaaggtgacaagccagccccgcagccgaagtcgaagcaggacgacacgcccaagccgcaggtcgacaccgccgacctggagaagatgctggcccgtgccaacgagtacaccgatggtgcgatcagtaccttcgagcgtcgcctggacaagatggacaagcgcttcaaccgcatggcggcgatgagcagcgcgcagagtgcgatggcgatgaacaccgccggcctggccacctacaaccgcctgggtgcgggcgtgggctacagcgaaggtgagtcggcgatggcggtgggctaccagcgcgtgctcaacgagaagggttcggccaccttcagcctcaatggtgcgttcaccaacagcggtgagcgcagcatgggcgtcggcgtgggcatcggctggtaa

SEQ ID NO: 499195 - DNA, 12324 bp, Stenotrophomonas maltophilia
atgaacactatctatcgtctggttttcaaccgcgcgctgcgcgtctggcaggtggcgtcggagctggtgaagggtggcggtggcctggtcggccatgtgccgggccggcagagcgccgcgctgtcgccgctgggcttcgcactgatgtgctcactgggctgggtcagcctggcaactcctgcactggcgcagtccgatgcgcgcatcatttccgaccccaatgcgccgggccgtgaacggccgacgatggtgacggcccccaatggtgtgccgatggtgaacatcaccacgccgtcggcggcgggtgtgtcgcgcaaccgctattcgcagttcgatgtcggacgcgagggcgtcatcctcaacaacgcccgcggccaggtgcagacgcagctgggtggctgggtgcagggcaatccgtggcttgccaccggcagtgcgcgggtcatcctcaatgaagtgaacggtccggccagccgcctcaacggctacgtggaagtggccgggcagcgcgccgaggtgatcatcgccaacccggccggcatccaggtcaacggcggcggcttcctcaacgccagccgcgtgaccctgaccaccggcacgccgatgttcacgggtgctggggcactggagggctaccgcgtcaccggtggtgcgatccagatcgatggagagggtctggacaccagccgcgctgactacaccgacctgatcacccggtcactgaaggtcaacgccggcatctgggccaaccagttgcaggccacgctgggcaacaacgtggtcaatgccgaccacagccaggccagcctgatcccggccaacggcgaggcaccgaccttcgcgctggacgtgggcgctctcggcggcatgttcgccaacaagatctggctggtcggcaacgagcacggtgtgggcgtgcgcaatgccggcagcatcggcgcgcaggccggtgagctggtggtgacggtggacggccgcctggaaaacaccggcgcactgcagtcgctgcagaacgtgcgcttgcaggcgcgcggtgatcttgcaaatgccggcaccatcgccgccacgcgcgaggttgcgatcaccaccggcggcacgctggacaacagcggcggcaagctcaacgcacagcgcctgcatgtcgaggcgcagggcctgcgcaaccatggcggcaccattgaacagactggtgtgcaggcgctggcgctcaaggccgaagcggcccgcaaccgcagcaacggtctgctgggtgcgctggatgccgtcgcgtccggtggcaacggcggtggcccagggggcggcacgtcgccgggcagcggcggaggaacgccgggaaccggtgccccgggtacggggacgccgggtaccggcggcggctcgaccggcacgccgacctcgccagtggtaccgatggccgagggcctgatcgccatcgccggcatgctggacaatgacggcggcagcatcgccaatggtggtgcggtatcgctcgccgcacgtgccggactcgacaacagcggcggtcgcctgggagtgagcgcgctgcaggctgggggcgagctgcgcaatgatggcggcacgctgcaggtgcatggcgatgccgcgttgcatgtcggcctgttgtcgaaccagaagggtgcgctgagcgtggccggcggcctgcggctggatgcgcagtcgctcgacaaccgcgggggtgaattgcggcacgccggcaaggcggcatcgtcgtggacggtgcagggtctgttcaacaatgacggcggcctgctggccaccaacgccgcgcagttggcgctgcaagcaggccaggtcggcaatgccgatggccgcattgaacatgccggtgagggtggcctcacgctggacacgggtgactgggctggtcccggtggacggctgagcacggtggggcgcctgcactggacgactggcagcgccgacctgcgcaacggtgcgctcagtgcggcgggattcgacatcgtggctggcacgctggacaaccgcggcggcagcctgctgtcgctcggaaccggtgccagttcggtgaaggcgtcgaacctggacaacggcgcaggtggcacgttggccggcaacggcgacctgatagtggccgcgaccacgctggacaacaggaagggcctggtgcagcaggctggcaccgggagcttgagcgtgcaggccgatacgctgcatggcagcgaggggcgcctgctcagcaacggtgcactggtgctgtccggcggcgagctggatgtgagcggcggtacgacgtcggcgcagagtgtgcagatccacgccagggcactgcgcaaccgccagggccagatcgtctcgcagggtgtctcggagctggcactggacgtacgcgatgcgctcgacaaccagggcggccagatcgtcggcaacggcggcctgcgcatcgacgccggtcgcatcgacaaccagaagggcacgctgcagtcggccggtacgcagggcgtggcgctgacggtgcgcgacacgctggataacagcggcggcggcatctccggcaatggccaggtgcagctgcaggttggcagcctggtcaaccagggcggcaaggtgctggcggcaggcagcggcgcgctgcaggtgcaggcccgagagcgcttggacaacagcaacggcggccgcctggccggtaccggtgatctgcggctgcaggcggcaagcctggacaaccgcagcggtgcaatcgaacacgccggcggcggtacgttgcagatccgcgctgacagcctgcagggtgcgggcggccgcatcctcagccagtcggcgctggaacttgagggcggcgacctgctgctgggggccggcagcactacccaggcagagcgcattgccatcgatgcgcagcgcttggacaacaccggcggcaacctcagcgcgaccggcagcgacgcgctgcggctgcacgtggcgcagggcgtggacaacagtggcggcacgatcgccggcaacggggcactggatgtgcaggccggtgaactgatcaaccgcacgggcacgctcagcggcgccggaacggccgacagcaccctgcagatcgtcagtgcgctggacaatcacgaaggcacgatcgccagcaacgccaaccgcctgacgatcgccgccgcacggctggacaacagtggcggcagcatccgccaggccggcaaccagggcctggacatcaccaccggccgcctggacggcagcaagggcacgctggtctcctcggccacactgaccttgcgcgccgacgacatggatcatcgtgacgcgacgctgggcgccgatcgcctcgaccttgaggccaccacgctcgacaacgccggtggccgcatcattgccagcggcgaaggcgccagtcgcatcaaggcgacggcgctgggcaatgccggtggcacgctggccagcaatggcgacctgaccctgctggcccggacgctggacaacagtgcaggcaggatccagcacgccggcagtggccagctgcaggtctcggcgcaggccctgctgggcaagggcggcagcgtgctcagcaacggcagcttcgtgttggatggcgcctcgctcgatctgagtggagcgattacctcggcgcgtcgcgtcgccatcagcgccggcaccctgaccaccgccggtggcacgctcaccgcaaccggtgaagatgcgctgcgcctgcgcgtacagggtatgctggacaatcgcggcggttcactcgccagcaatggcgcgctggatgtcatcgcgcagcagctgaacaatgcgcagggcacgctgcagggcgcaggcgccgcgcactccacgctggcgatcggcctggcgctggacaaccagaagggccgcatcctgctcggcggtgccggcacggtcaccgcggccagccttggtaaccagggcggcacagtgcacgcgggcggcagcgcgctggtgctgggcgttgacggtcgtctcgacaatggcgagcagggcctgctgtccagcaccggcatggtgaccctggacgccggcagtctcgacaaccgccacggcaccctggtcgctggcaaggacctgacggtgaccacggcggcaggcttggacaacagcgacggcgcgatgcaggccgccgaacggctgcagctgcagggtaacggcctggacaaccagcggggcacgctgctgggtggccagctggacatcgatacccgcggccaacggctggacaaccgcgccggcacgctgggtacgcagaagggcgcgctgagtgtgcgcagtggcgttctggacaaccagggcggtcgcgtgcagtcggcggccgacctgaccatcaacacggccgggcaggacatcgacaaccgtttcacggcgggcagcggtgggctgctggcggccgggaagctgcagctggaaggcggtgtgctggacaaccgtggcggcgcagtcaatgcacaaggcgatgcgcgtctgctgctggcccgcgttgacaacagtgccggtggaacacttgccagcgctgcggatctttcgctgcgggcggcgagcctggccaatgccggtggtcgcgtgcaggccggacgcaacctcgacctgaccctcgacgggcacctggacaacgccgccggcgcgatcgcggccggccagcggttgaccctcacggccgccagcgtggacaaccgcaacacccgtggcggtgacggcacgcatgggctgcaggcgggccagctgcagttcggtgcacagtggctggacaacagccagggccaggtcgtcaccgatggcagtgcgcggctgcagatcaacggccagctgcagaacaccggcggcgtgatcagcaccggcggcaacctggacagccaggcggacaacgtcgccaacagcggtggcctgctgcgcgctgatggcagccagaccctggtggcacgtgtgctcagcgaagacggccaagtgcatgcgcagcgtgacctcggccttaccctgcagcagggcatgcgccatcgtggcgaatggatcgccaacggcacgctgtcgctgaacctgtccggcgacctcgacaaccagggtgtcgtgcgcggtggcaacctcgacctcaacgcccagaacatcaccaacgcagcctcgggtgagatctccagccagggtacgacccacctcaatgcccgtggccagctgaccaaccgcggcctgatcgatggcgcgctgacgcacctggaggccggcgagatcgacaatctcggcaccgggcgcatctacggtgaccacgtggcgatctccaccggcgtgctgaagaaccgcgccgaagaggccggtggtgccacccgcgtcggcaccgtggccgcacgcgagcggctggacctgggcgtgcgcgaactgcagaacaccggcaagggcctgatctacagcggcggtgatgcggccatcggtggcgcgctcggcgccgaccggatcgccagcggcattgcagggcggatcgacaacatcagctcggtcatcgatgtgagtggcaacctgtccatcgatgcgcaggtggtcaacaacatccgcgagaatgtggcgatcgccccgacccaggtcaagaccatcgacactaccgtcaacatgatggtggcggcatggcagaagaactcgaagaacaccgcaggcacggtcagcgataccagcaattacaaggcctgggagttctactacatcgcgccggaagacgtgctgcaggacgagccctacattgcgccggacggcacccgcctgggcaaggcggtggttcgcctgaccgcgagcacctcgcgcttcttcttcggctctggtggattgggctatgacgtgcgcggtgagcgctggcgcatggatccggtcaacggcaccgtcacgatctactacgtgagcaagggcactgccgccaatccggaccaggtgccgggcggcgatccgttcgacgtgctcaagtcgaaggagaagttcacctaccagaacgaccgcctgacgttctccagcgcctacggcacctgcagcactacctgcatccagttcatcaccccggcgtcgttgagcaatcccgatgcgaccatcgtcggtcgccgccagcacacgcaggaacacggcctcaatgaagaaaagcgcgttgcccaccacgtggcccatgaggaccagctgcagcccggtgccggtgccgatgcggtgatccgttccggcggcaacatgcgcctgtcggtggacgagctgaacaaccgctacgcgcagattgctgcgggcggcaatctgcagatcgtcggtcacggcgccgacagccgtgtcagcaacgtcggtctcgaattgttccgcacgcataccttcaacaacacctccatcgcctacgacggcacccgaacgcaatggaccgccgagcccatctccgaaaagatcggccagctggggggccagattaccgccaacggcacgttgagcatcgatgtcggtgacctgagcaacctcaaccaggggcgcaacgccccgaacgtgcagaacggttcggccatggccaacctcaacgtgcaggggcccaaggcgctgccggatgggccgggctatggcggtgcgcaggggcccggccagtccaccggcgccggtgccgaacgcgcgctggcacaggcggccgatgccgccggtacccagcagggcggcaacgtcggcggcgtgagcggcaacaccggcacgtccgggccgcgcgtggtcgcggccagtggcggatcgccggatcgcatcgcgatgggcgcaccggacacgcgcgcgccgagcgccagcctgttcaacgtcaatcccaacggtggccactacctggtcgagaccgatccgcgctttaccgaccacaagacctggctgagctcggaccacctgttgggccagatgggctactcgcccgataccgtgcagaagcggctgggtgatgggtactacgagcagaagctggtgcgtgagcagatcggccagttgaccggtcgccgcttcctcgacggctacgccagtgacgaggcgcagtaccgtgcgctgctggaggccggcgccacggtggccagcgaatggggcctgcgccccggcgtggcgctgaccgaagctcagatggcacagctgaccagtgacatcgtctggctggtcgaacagaccgtcaccctggccgatggcagcaccaccaccgcgctggtgccgcaggtctacctgcgcctgcgcccgggcgatctggacgggcagggtgcattgctggccggcgccaatgtcgatatcaaactgggcaatggcctggtcaacaccggcaacatcgccggccgcaagctggtaaccatcgatgcaggcaacatcgagcatctgggtggcagcatttccggccagtacgtcgggctgtcgtcggacaaggacatccgcgttgccggtgccgccgtgacggccaccgatgcgctgtcggtcaaggccgcgggcaatgtcacggtggcctccacggtggagacacagcggggcggtggcacctaccagtacgagaccaaccgcattgatcgggttgccggattgtatgtgaccaacccaagtggtgatggtgcattgtcagtcgcggcgggtggcgacatcagcttgaaggcggcgcagatccacaacgccggaaaggagggcatcacccagcttgtggccggcggcaacatcgagctcggagcgctgacgctggatcagcgccaggatgcgactttcgatgatcgaaaccatcagcgcggcagccagaccacccacgccgtgtcgtcggtgcagggcggcggtgacgtggtgctttcggcaggaaaggacatcacgctggccggggcccaggttaaggccgacggtggcatggcgctgcgggccggcggggacatcaacagcctggcgttggtggacagcagtagtttcgacagcgccgtagccagcaagcgtagttcgcggcaggtcacccggtccgacgagaccgtgcgtggaagtcagttgcaggcaagtgacaacgttttgctcaccgcaggccgcgacgtcaatctgaacgccacccaggtcgccagctcggacggcacgctcagcgtggcggccggtcgcgacgtcaacctgctttcggccaacgcaacgcatgacttcagcctggacagctacgacaagaaaaagaaaaccctgtcgagcaccaccaccacccgccacgccgagagcaacgacagctacgccattggcaccggcttgatgggcgagagcgtgagcgtcaccgccggccgcgatctgaccaccgtaggcgcggtggttgacgccaccggcacagtggtcctcggtgcgggcaacaatgtgctgatcacttctgcggaggaccatcacagcagcgagtccagcgagagcaggaagaagtccggcttcaccggtggcttctccaatggaaccgcttcgatcggctacggcagctcgaagaacagcagcagttctgccgagcagtcgaccacccaggtcggctcggccatcgcctcacgcgaaggcagcgtgctgatcaacgcaggcaaccagctgacgatcgccgcgtccgacgtggcagcaggcaaggacctaaccctggtcggcaaggacatcaacctgattgcccgccaggacacggtggacacccaggccagccagtcgagcaagtccagcgggttctcggtgggcgtcacctatgacccggccaaggcgtaccgcaccgcacgcgacaacgccaccgaaggcatggccgacagcggcacgatgatgggccggatcacgcgtaccgctgaaggtgtcgcggccggcgtgtcggcggcagtgctgccggcgatcacggccggcagccagcgctccaacagcaaccagagccactccaccagtgacgcgcgggtcagcaacctcaatgcaggcggcaatctctcgctgattgccaacggcggctcgatcaccagccagggtgcgcagatgacggccgagggcaatgctgtcctgctggccaccaaggacatcgtgttcgatgtcgcgcacaacaccgagcgcagtgacagcgacagccgtggcaagggctggggtatcgccaccaactccgccggtctgccgtttggcaccaacaattcgcgcggcgagggcgccggccagagcgacaccatcaccggcacacagctgtcggtgggtggtggtgtacgcatggccaccaccgagggcgatatccgcctgaccgccgccaacatcgcggcggaaaaggacgtcagcatccgcgctgcgggcgacctgacgatccgtagcgggcaggacacggtcagcaatgccaaccgctcggacagcaaggcgatcggcaccgtgcagatcgccgataccgagaagttctccggctggcatcgcgagcagcatcgcgatgacagcgcgcaggtttcgcaggtggccagcaccgttggcagtctcggcggcaacgtcaatctcaccgccggtggcaagtacacgcagagcgccagcaatgtggtggcggccaaggacgtgaacatcactgccgccgagatcgagctgctgaccgctgacgaaagcggtcactactcgcagagcgacaaggacttgaagatcggtgccttcgcgcgggtgaaatcgccgttgatcgatctgctcaacaacgtcgacgccgcccgcaagtccgacgaccgcctgcagaagatgcaggggcttgctgctggtgccaatgcctatcaggctgccagtgccatctccagcatggccggcaagggcggaggcggggcactgctcagtgccgaggccggcgttggcttcaagacctccagcagcagtgccgatggcagcagccaggtctcgcgcggctccaccatccaggggggcggcaacgtcaacctgaccagcacccagggcgacatccacgtggtgcagggcaatctgagcgcgggcaacacgctcagtctggaatcggccggtgacatcctgctggaagcgggcaaggcgcatgtggccgaccgcagcaagagcagcaatgccggcgccgaagtcggcgtgggcgttgcagtgggcgcgcagaccggcgtgtacgtttacgccgaagccagcgtcggcagcagcaagtccaacgccgagagcagcacctggcagaacaccacgctgaccggcaagaacgtctcgatgaaggccgagggcgataccactctccgtggcgcgaccgccaccgccgaccgcatcgacgtgaagaccggtggcacgctgaccgtcgaatcgctgcaggacatcgccgagagcatgtccaagaacagccaggtgggtggccgcgtgcaggtgtcgttcggcaccgcgtggaatgccgacggctacgccagcggaggcaaggccaacggtagctatcagggcgttggccagcagagcggcctgtttgccggcaatggcggttaccacgtcgatgccggccaggtgaacctggtgggcggcgcgatcgccagcacgaatgcgggcaacagtgaactgactgctgattcgctgaccttcaccgacctgcagaaccatatggactacaaggccacgtcggggagcatcagtgggggcttcggcaacgggggcaagggaccggccggcaagggcgtgggggccggcgagcagctgaagggcatcggcacgagcatcgtgacgggcaagttggaggggccgacgggtgtctcaatggggggcgggctgcccatgcatgagagcggcagcgacagctccagcacgcgtgcgacgctgaccgagggcaacatcaccattggcggcaggaagaccacggcggccgagctgggtgtcaacaccgatgcagccgctgcacaccgtgcactggacacgatgcctgatgccaacaagttgctggccgatcaacaggcgatggcgaacgcagccagcacggtgcttgccaccagcaagcaggtcgccgtggatgtgcaggcctatcagagcaacaaggcaacccaggcgtactacgacggcctgtcaacggaacagaagaaggcgttcaacgcgctgagtgcggaacaacgcgatgcggtgctgacggcaaacagcccagcctacgaaaacgccaagaagtggggcacgggcggcgattacaaccgtgcattgaacgcggtgacgaccgcgcttgtgggaggcgtagcggggcaaggtgccggtcaggtcgcctccaatgcactggcgccatatgccgcctacttcatcggcagcacacttgacccgaaccatggcagtgacccgaacgcgacgctgcaattgctgtcgcatgcggtgctgggtgcgctgctagccgaagccaatggtggcaatgcggggaccggtgccgtttcggcggcaggcggcgagttggctgcgaaggtgctgaccaatacgttgaccgggggagatccttccaggctgagccaggaacagaaggagatggtgctggcgctgtcgcaggcggtgggtgcactggcgggtggcttgtcagggcaggatctggctgggatcgcgttgaatgcagggatcgccaagaattcggttgagaacaacttccttgccgaggatcaggctcgagtaacgaagcagcaactcgacgagtgcggcagcgacacgtcatgccagaagatggtgcgggacgttgccaagcaactgtcagagcgaatggactatgagctgctctcggtttgtacagcgaactcggcgagccctgcgtgtcaggcgtttgtgaatgcggccgtttcctacaagtatggctcgtggcccggagagcttgggctgttcgatgatcttggccgcagcagcgaggcgctttcttcgtttgcccactccatgaatggacgtgcctatcgtgagctgatatttgagaacggggggatccagccggtctatatcctgcctcaggaacacactgtagctgcactggcggagtggaccggaaatcttgacaggacgatcgatcagtacggcctcttctcgaaggaatcgtcagctgagctggggcttggacttgcgaaggtactgcttcgaaaatatggcgctgttaccataatcgaagggagcggaggcttcgggaagggggcgaaggcgggcagttccgaagcactgccgcgagcgacgtctgggccagtctatgcaacgaataaggaagcgactgctgctgccacggctttgggctttaggcgtgtaaaggagactgctcacgatggtgagcttgtctttactaatggaaagatatttatttcaagggatgtggatggccataatggtggtgcttggaaggcagcgaaatcggtgaaggcgctaggtagccgggatacccggcttggtacgtttgattccagtttgaaaaggataggggggtga

SEQ ID NO: 499196 - DNA, 1599 bp, Stenotrophomonas maltophilia
atgctgcgcgagcagcaggaacaacgccccgacgtccgcctggagcggaacgcgcagaaggagggcgaccgcctgccggcgcaggagcacccctgcgtgcgcatcgatcgcatcgtgctggaaggcgaggacagccagcgcttcggctgggcactggcggctgccgacccggtcgacgatccggccacaggccgttgcctggggaccgaaggcatcaacgtggtgatgaagcgcgtgcagaacgcgatcatcgcccgcggctatgtcaccacgcgggtgctgtcggcaccgcaggacctcaaccagggcacgctgacgttgtcggtggtgccaggccggttccgcgaggccgtgttctccgacccgcagggacggcatccggccctcgccaatgcactgccgatccgcagcggcggcctgctcaacctgcgcgacatcgagcaggggctggagaacctgcagcgcgtgcccaccgtcagcgccgacatcaagatcgcgccggccgacggcgaggacgcggcgccaggccagagcgacctgcagatcgactggacgcagcgttcaccggtacgcgccagcgtcaccctggacgatgccggcagccgtggcaccggcaagctgcaggccaatgccacgctgtcattggacaatccgctgggcctgaacgagctgttctacatcagcgccggccgtggcgtgttcaacggccgaggcaaggacaccaacagctggaccgcgcactacgacgtgccctacgggtattggctgttcggtgccaccgccagcgcttacgactacagccagaacgtggtgggtgcctttgaaagctatgactacagcggccgcagccaaaacgccgaagcgcgggtggaccggctgttgctgcgcaatgccaaggtcaagttcagcgcctacgcgcgcggctggcagcgagagtcgaagaactacatcgacgataccgagatcgaagtacagcgtcgccgcaccgcgggctgggaactgggcctgacccacaagcagttcatcggcaacgccacgctcgatgccagcgtggcctaccggcgtggcacgggggccttccacgccctgcgctcgccagaagagatggcgcagcagtgggatccgacgctgccgctggaagggacctcgcggatgaagctgatcaccgccgacgcgcagttcagcgtgccgttccagctgggcaggcagcgcctgcgctacaccgccgcatggcgggcgcagtggaaccgcacgccgctctcgccacaggaccgcttcgccatcggcggccgctataccgtgcgcggtttcgatggtgaaagctcgctcagcggtgagcgcggctggtcgctgcgcaacgatctttcgctgggcatcggcggtggccaggagttctacgtcgccgccgactacggccgcatcggcggcccatccgcgcagtggcagtccggccgtgacctggcgggcatggcgctgggcctgcgcggcggctggcagcagctttcctgggatggcttcgtcggttcggcactgcacaagcccgcccatttccccaccgactacaccacattcggcttcagcctggcctggcgctactga

SEQ ID NO: 499197 - DNA, 393 bp, Stenotrophomonas maltophilia
atgaccatcgtcctacagattgaaggcgccgccatcaatgacatccccagcctgtacgcggagatcaaccgcgtgttcatggccggcgagaactggcagctcgggccaagcctggacgccctggatgacctgctgcatggcggctatggggtgttggccggccacgaccgggccacggtgatctggggtgatatcgagcacagccgcgccgcactgggacgaactaccacatgtcagtggctgcagtccaagctggaagccccgggcaccttcaataggcggaccattgcgctccagctggacgccctgcaacgaggccagggccagacctacttcgagatcgtaatggagatcttcgcaagccaccggcagatcaccctggttccggcctga

SEQ ID NO: 499198 - DNA, 1737 bp, Stenotrophomonas maltophilia
atgatcctggacttcaaagccaggctctattgccaagagacccggttccctcgccgaaacgttgatccgagcgatccgctgtgggttcagcgcattgacgagttcttctctcgcaccccgctccttccgcctcctaacgatccgaccgagtatgcggccgcgttcgaggcgatttatccgcaagagacccatcgtcgccaatacatcgctgacgccatcagcaagggcaccccctgctttgggcaccgcatgctggccggtctgataagcgcctcaaaggctccctgcgtcttcacgaccaactttgatcctctgattgaagaatccagcctgctggcggcatccctaatgcccccaggtgccgcgagcaagcctacggtggcgactctagactctgcacacctggctacgcgctgcctggatgagtctgactggcccctcatcgccaaacttcatggcgactaccgttcaacatccctgaagaacaccacgagcgagctggcttcccaagaccatgatctgcgccgggctatggttgaagcctgcaagcggttcggtctggtcgtagtcggctacagcggacgcgattcctccgtgatggaggcgcttgagtcggtcctggcctacgagaaccccttcccaagcggcctctactggtgtgcgtcttcccgctccaagctcctgccggctgtgaatgattttttgcagaaggctgtgtctgcgggagtcagcgtcttcatcatcgagtccgcgacgttcgacgagttggccggcgatctgctcaaccaaatcagccttcccagcccgctgctggaccatgtcctgtcgttccagccgacccagctcgcagctcccatccccgtgcgcacggcggaagcacggaagttccccgtgctgcgcctctccgcattgctggttgaaagtctccccataacggcaagaagagtagccttgggccgcccatcctccatcgttgaggtgcgggaaatgctcaaggccacgaagtgccggtcggcggtggcaatggttgggaatgagctcgcagccttcggcaaagatgcagaaatcctcgcttcattgcacagtctgaaaccagtgctaaacgggcattggacgctggaccccgtccaagacagctgggcgctaggcctcatctacgataccctccttcgcgcattggcccggcgacgaccgttgattccgagacttaagcgttccgggcactcgcttatggttgccagcgcaagggtcaacgaaacagacgagcagcgacatcgccgcgaaagccaactatccaagctcaaggcggcctatggaagcgagctcacggggaataagttcggtcgcaactacaacgaagccatctcggttcggctggaagagattgagggacgctggtggtgcgggtttgacccgtacactgccgtagaagcaccgcaagatgagcgactggctccttctgacacggcccaaggcgacccgctgggctggtcgacgcagcgcaagccagatccgaccgctgactggagacgagagcgctgggcgaccaagtacaacggtgcttgggccaacatcatcgacgcgtgggcgagcttgctcacgtccccacacggcgtcacctttcacgcgttcggaatagaagatcaagagggagtcgatgcagcctttcgcatttcaccgctcaccggtttcagtcgtcctggacatcacgacaaatactttgaccggaggcagtga

SEQ ID NO: 499199 - DNA, 1449 bp, Stenotrophomonas maltophilia
atggtagatgtttctcgctcgcagctaccgccgctgtccttgctttcggaaccggagctggccttttctcctgagcactccggggggcgagacgtccacccccttcgcgggctggcgcactacggccccttctcgtcccagacattcagccagttcacgcccaccgttcgcatcgccacagtgggcccagcaagtgcgttctggactcggggcgcacttatggcatcgctgaaagagcgacatggggctagcgataggagcggctacgccccagattttcccggtttcgccagcgtattcggcgtggacttggcttcctcggacaaggccaaccacatccgctggcccgactccatcaacgatcttccaggatctggcccgcttcagcatcgcctggtggccgccttcgacgcagctctctcgcaactaagcacaagacacgaacagtttgacgtggtcctagtccatctcccagaggcgtggcttcctcacacgtccggggacgggttcgacgcgcatgatgtcctcaaggcattgggagcaaagcacggcatcccaacccaagtggtcaacgaccggaccttcagcttctccaacaaggctcagctggcttggaggctgtcgatcgcgctctatgtcaaagccggcggcattccttggaagctcgcccctctggcgggagtgcccgcggacactgcctacattggtttggcatacgcgctgaagaaggtcaacgacgaaacccactttgtcacctgctgctcgcaggtgttcgacatggacgggggcggcatgcagttcgtggcgttcgaggcaaaggatccggtcaaggacgtgcgcgaagcacgaaggaatccgttcttgtcacgagaagacatgcgagccgttattgcccgtagtctatcgatctaccaacagcgcaatggaggcattcttccccggcgaatggtcattcacaagagcaatgcgttcaaagaagaggaggttcttggtgctcgcgacgccttgacggccgtccccgaggtggaatgcatcgagatcagctccagaccgacttggcggggagtatggctggtcaaatcctctggtgggacggcgcgcacccagccagcgagatacccagtcccccgcggcaccttcgtcccccggtcgggcacgtccgctcttctttgggctgcaggcaatgtttcagacgtttcaagcaaatcagactactaccaaggcgggaagagcatcccacgtccacttctactgacccgtcacgcgggcagcggaccactggaaacgatcgcccacgaaacactggcgctgaccaagatggactggaacaacgacgcactctacgacccagtgcccgtcagcatccgctactcccagaagctcgccaggaccatctccaatgttaaggaccttcccgggaacagctatccatatcgtctattcatgtag

SEQ ID NO: 499200 - DNA, 771 bp, Stenotrophomonas maltophilia
atggcaaacggaaatgccccccaggactgcaaagtggctgtcttggtggactgcgacaacgtaagtcctgacatcgttgaccatgcgctgttgatgggtgcccagttcggcagggtcgtgctgcgtcgaggctacgggaatcacgccaccctcgccaaccggtggcaggaagtgatggtccaacaggcgttcacaccttgcctgcagtatcagtacgctgcggggaagaacacttcggacatcgctctggctttggacgcacaagaggccatgttcgatggcagggcggatacgttctgcctggtcaccagcgactccgactttgcctatctctgccgaaaactccgcgagcgcggcgcaaccgtttgcattgttggcgaggccaagacaccactcgccctgcgcaacgcatgtgaccaattcttcctctgggagagcgtttcggctgctgggacacgtgacaccactggtctcaacgaatcagcgagcacagcccccggcaaagtggagcgccccctccccaaacgtcggcctaggttcttggtggatgcggtggccttgcttgcaggcgagacctccgagggaaaagtggggctgggcgcactggggcaatacttgcgacgaaccaacccatcgtttaccccgaatgcatacggccactctgggctgctgaacatggtgaagacctacgacctgctctcgccgcagcaggaacccggcggcaactggtcggttgggctggcaaccagccctgccggcgatgccaaatag

SEQ ID NO: 499201 - DNA, 483 bp, Stenotrophomonas maltophilia
atgcccgcctccgcactccgtgcctttcgcctgctccgagcgttcggtgcccttgagtacgcattgaaacaagttcccgggttcaccgacacttactcaaacggatccgccaaggtgaattggcaagccgtcgacacttcacttgaagcgatgcaaccagagctgctcacgttggccgtgtctgactcgaccaagcagaagattctgggcgggaaccgggatcgtcccatggttcaggtggtgacggtgcacggcggccacaacatcaccgccttccgggccaaagccttgagtgcgtcagacccgagggcgctgatgcaagccgcccgcagggttcgcaacaacctctttcacgggggcaaagaagatccgcttgaagaggcattccctggcgatgacaatcagtggattacagccgcgaccgacgtcgcgagtggcgttcttgatctggtcgtgaatggaaggctacggcccttgccctga

SEQ ID NO: 499202 - DNA, 807 bp, Stenotrophomonas maltophilia
atgtcaatgaaaaaaatggttctaagcagtgcgttcttgcttcctgcactcgtagggtgcgggaaggccggagcgccggagtgcggcgatgagatgaccctggacctggttcgcagcatcatccagcgggagctgggggcgaccagtgctgctgccaatttgagcgcagagcagcttcgcagtgttcttcccatctctttggctcatccgacgagctttgatgagaagatcagccgctacagttgcgaagctgacctggccgcgccattcaacaaccctgggcaggacgtttacaagctacggcttgaatacacctctcaggcggtcaatggacaacacttggccgaggtccaggtgcttcctggagatcttattggcatcggtgcggctatcagctctaatgtcaggagccaaacacaagccatggctcccgcagctgcggccccagtggaagcgtcacaggcagtggacgttgatcctgcttatgattcagcgatgtcgacgaaggcggacgattaccaagagcccaactcggacgagccgctggcggatggcgcttcgactgggcccagctttgactgtgagaacgcgtcgtcggccgtagagcagatgatttgtgccgacccggaactggcccggttggacaagcaaactgcagaggcattcggtgtcgtccgggcccgttcgatggacccgggtgaggttacggcgaatcaagggcggtggcgcaggacggtacgggatatatgtgccgacgaagcctgtatagagcaggcctaccagacgcgattggccgagttgaattga

SEQ ID NO: 499203 - DNA, 1524 bp, Stenotrophomonas maltophilia
atggcgatctaccacacccgcgtcaaaaccttctcccgtgccaaaggtcattcggccgttgccgcggcggcctaccgcgcgggcttgtcgctcgtagatgagcgcacgggagcgcggcacgactactctcgcagaggcggagtggtcgagagccgctgggtggtgcctttgaaggcgcccgattggtcgctcgatgcggccaggctctggcaagcagccgaggcggcagagaagcgaaaagacgcgaccgtggcccgagagtttgagatcgcactaccgcatgagctaaacgggccgcagcgctcggccctgacggcggacatcgcccgggccctggttgatcgctacggctttgcagcccaagcgagcatccactcgccgggcagcaacgacggactcaattggcatgtgcacatcctcgctaccacccgccgcttggacgccgaagggcttgccgacaaaacgcgcgagctcgacggtggaccctcggggcgcagcgaagtggagtggctccgggcgatggtggcccagctgacaaaccagcacctggccgctgccgagatcccagtgtccgtcgatcatcgaagtttggaagcgcaagccgaggacgcccttgaacgcggagacatcgtcgcggcagaaattctgggacggcgcccaacgatccacctgggccagcaggtctcagcattggagcgacgaggcgtggagaccgaggttggcaacgcattggccagcatcgttgcggacaatcagagggctgtgcatcagacagcgatacggtttgagagagcagcgacggacacagaccatgcccatggacatgcgtcgattccgccgaaccgtgtcgagttggggccgaaatcgggccaaagctacatcgaggacgtaaagggattcggtcggcgaggaattctggccactcgcactcttcccgatgcaccccaaccatcgctgcaatcgctgatggatagcgcatatggactttggcgtgacctggtggcggctgggcttgaggacgcgcttcggtccacgcgcctgcttctacgtcgcctggatttgaccgttcgcaatgggggcgtggggaaaagggtgcgcaaggatatccagcgagcgctacgaggcttggccgccgtgaggcgacgagcgacggagtggctgcgacgggtagaggccgaacggcgaacagcatcgcttttgacgcgcgcggagcggtccttggaggattttgtcgaacaacagccccgaccgacaggccctgcactggtggcctgggtccggcgtcgcggacgtcgtttggcagctgtcgagcagcgcttggatgccctgaggaaagcccgtgcgaagattgaggacggccaggaagaggcctgtgcggatcagctgtcggccgccgtgacagagttggaagccagcagcaaggtggccctggatgggttagacgctctgctcgatgaaacgggagtctccgcagagctgactgcatccacgcagcaagccaggcctcggcctaagcttcactga

SEQ ID NO: 499204 - DNA, 267 bp, Stenotrophomonas maltophilia
atgtcatccaccaatcactaccgcgatcagatccaacgggccacccatcggctggcccagcttcaagccagggagcttctggcgcatcagcggcaggatgcccgggagaaggccatcaagcgccgcgacgacgccaagcgcagacgacaagtggccgaactcgttttcctggccggggcccagaacctgccagacaacgagatcgtcgcagccctgcagcggcacatgcttgcggtgaacgaaacacggctctcaccaccccactga

SEQ ID NO: 499205 - DNA, 1299 bp, Stenotrophomonas maltophilia
atgagcagcccaatccgttccagggaccacgacgcggtgatccagtcgctgcgcgccggcgtcgttccacgcgccggtcagcatttgatccaagtcgggcgcgcccgtgaagtgcaaaccctggtcagtgacatcgatcggctcgccgatggcggctcgtccttccgcctgatggtgggtgagtacggcgcaggcaagacctttttcttgaacctcgttcgcgccattgcaatggagcggaagctcgtcgtggccagcgcggatctgaatcccgacaggcggttgcatgcttcaggggggcaggcccggtcgctctacgcggagctcatgcggaacttggccactaggaccaagcccgacggaggcgcgctgcccggggtggtcgagaagttcatttcgaccgcagtggccgagtctaagtcgcaaggcgtatccaccgagcaggtcattcgcgcgaagctcgagcagctgagcgaactggtgaacggctatgactttgccgacgtgatcgccgcctattggagagggtttgagcaaggcaacgagcagctcaagtccgatgccattcgttggttgcgtggcgaatttgccacccggacggatgcgcgtgcagcgctgggcgtccggaccatcgtggacgacgcatcggtctacgaccagctcaagctcatgggccgttttgttcggctggcgggctatagcggcctgctggtgtgcctggatgaactggtcaacctctacaagttggccaacgcccaggcccggaatgcaaactacgagcagctcctgcgcatgctcaacgactccctgcagggcactgcggttggccttggttttgttctgggcggcaccccggatttcctgatggatacccgccgcggcgtctacagctatgaagctcttcagagccgcctggctcagaatacctttgccaccaacggactggtggacttcagcggccctgtggttcgactatcgagcctgacagccgaagatttctacgtcctgctcaccaagattcgccatgtctacgctgccggcgacgcgggcaagtatctcttgcccgacgatgccattcaccagttcatgacccactgcgccaatcgaatcggcgatagcttcttccgcaccccgcgcacgacgatcaccgcattcatcaacctcttggccgtcttggagcagaacccgggcgtggactggcaggacctgattggatcggtcgaggtgacagctgaccacgggggcgacggcgaactggtcgtgcaagaggacgacgagctggcatcgttcaggctctaa

SEQ ID NO: 499206 - DNA, 2178 bp, Stenotrophomonas maltophilia
atgactgcctccagcgccttccactcgctgcaccctcgaatccagcgctacctctggaccgaacaatgggaggcgctgcgtgaggtccaggaattggcaatccccctcgtcctgagcgccgaccgggacgtgatcatcgccgccagcaccgcctcgggaaaaaccgaggccgcttttcttcctgcgctcacgcaccttctgaacaccgacgaggagggcctgattgtctacatcagccctctaaaggcgctcatcaacgaccagtttgaacggctgcagcggctttgcgaggaccttgaagtgcccgtttggccttggcacggggacgtatcgggctccaccaagcagcgattctttaagcacccccgtggcgtgctcctgatcacgccggagtccttggaggcgatgctctgcaaccgcggaacctccgtagccgccgcattctccaagctcctctacgttgtcgtggacgaactccatgcgttcattggaagcgagcgcgggaagcagcttcaatcgttgatgcaccggatcgacgtgctattacggcggcggactccccgcctgggcctgtcggcaaccttgggtgacttttcgagcgctggggccttcctacgcccgggcgttggcgtttcccccgcgctggtcaacgcctcatcagccggaaatgatctccaactggtcatcaagggctacgaacaactcacacctgacgcggggtccgacgagaatccggcggctcccgctggactggccgagcacctctaccgggtcctatcagggacgaacaatctgatcttccccaatagccgaagggaggttgaacgctacacccacctcctcaacctgctgagcgaacaggacggccggccgagagagttctggccacaccatgggagcttgtccaaggaaatacgcacggacacggaagcggctctgaagcaaaagggtcgtccagcaagcgcaatttgcacgaacaccctggaactgggcatcgatatcggagcggtgaagagcatcgcgcaaattggccccccaccttccgtggccagccttcgccaacgccttggtcgctccgggcgccgccctggagagccagcggtgttgcgcggctacgttatcgaggatgcaatcgacgctgagtcgacgttgaagacaaggcttcgactggacacagttcagtccactgcgtgcgtcatgctgctgctggagaggtggtttgaaccgccttcggtcaacggcctacacctttcgacgctcgttcagcagttgctttcttccattgcccaatacggcggacttaaggcagctcaagcgtatcagctgctctgcgcagatcaaggaccgttccacggcctgtcccaagacgcgttcgcagagttacttcgccaccttggccaagaacaggttctgattcaagatggctccggcttgctgctccacggcccggtcggcgacaagttggtcaaccactacacattctacgccgctttcagcgtcgacgaagagttccggatcgtggccgccggcaaggcactaggcacgctccccgtgtcccaactggtgactgtcggccagcgtatcttgtttggcggtcgcacttggctcgtcgagcagatcgatgacgcccaaaagacgatctacgtggccgcagcgaaaggcggcaccccgcctcttttcaatggaacgggggggcaggtccacacccaggtccgtcaaaagatgcgcggactgtatcagcaagagatcaaacccgacttcttggaccccactgcctctcgcttcctgcaggaggcgcagagcgcctaccgtctattgaggctcgacgggaaggttctcttcgaccagggcagcgacgccttgctgctgacgtggctgggagactccgcaaatgaagccatcgcctgccttttgaacgctcagggattcacttctcaggcaggtaggctgggcgtggaaatttccattggagcaaggagtctcgatgatgtgatcaaggtgcttgggcgggtggcgaagatgccattgccatcgccagaaagccttctccactctgcgaacaacctggtcacgcagaagtgggactacctccttcctccacgccttttgaggcgctcctacgcgtccttgaagctggactttgaagaagccatcatgtggctcgctcgcgcgttctag

SEQ ID NO: 499207 - DNA, 288 bp, Stenotrophomonas maltophilia
atgacagacatggcgttccacactgagatggaagacgagcaggcgatgaagtccgtcttgcgtcggctggccatgcccgcttctgtactgtcctatgacgtccgagtcgatgaggattcttcgggcgagtcggcgttatgggtctatttgaccgttgatgacaagaccgttgcttctaacacgaagaagctaaatgagcttcgtagcttcatttcagcaatgcaggaatcagctttgcatgacggcgtatcgcgttggccgtatgttgagttccttaaaagccgctag

SEQ ID NO: 499208 - DNA, 1077 bp, Stenotrophomonas maltophilia
atgaaggaggcagcggatttgtcaaaagtcattcggaagacggcgagcagcggcaagctggactatgtccccgtcgttgtcctgaatgagaccgccaggaccaagttgcacgtcgttggatggttgatccctcacagcgaccatacggagttctcaataaagcttgaggggttcaagaagaccaaggcctcgccctggcaggaagatccaatcaagaccatcacgttgacggagacttctactctaaagctgttcaaataccttcagacacatcttccattggcgcagcaatctgaagcaggggagttcatcctgatcaaggtggctaatggggtggccgatctgagcgggcacgatccccggtccttggtcggcgcactgaccaaagtgctttcccattcggatttggtccagtatttggccagtacagagctcactcatgagctgaccatcgcgctgcggggatctgttcgcctcagcgagatgcgctcggcggttgcggagctgcgttccagcctagggcgtggagaggcggctgagcacgtctaccagttgtggtgcgaaaagcactgctgggcctttggcaatgcttatgtggttcgggacgaggtgagggcaatcactaccggggataacatcgacctgatgttgcctaacgtcattgcaggttatcgagacatcgttgagctgaagcggcccgacatggaggttctcctctatgacaaagctcacaggaactattacttctcagccgaggtatcgaaagccattggtcagtcccaccgctacctcgacatgctccacgacttcgcagacaagggcttgctcgaccacaaagaagtagtggcttaccacccgcgcgcgaccatcgtcatcggtcgctctcatgactggtcagacgagcagcagcgcgcacttcacggtcttaatcggcgcatgcatggaatcacggtcatgacctacgatcacctgttggcccaaggagagcggctgatagagatgatggcgcctgcttcagatgccggtgcaagacccgcggataccgctccggagttagcagacggcattccttggtag

SEQ ID NO: 499209 - DNA, 2193 bp, Stenotrophomonas maltophilia
atgactaggaagtctttctcctttgtggccagcggcaatgccctggttggattcccgctgatggactggctatgcgtgcattttgatgagcacgcgcagtggtcggaaggcagcttcttcgatgctttgacccaagctctccaaggtctccctgtgatgccagatgctgtccttgtgatggctgacgggggcttgatccctgacttgcttggttactggaccgatgattccatcgggcgcggtatttttctgcatcgcggcgagaatgctgaggggcccgtgatcaagcattgcctcttcggatcctgggatgcagcctccggattgatcgtgcattcggcgtcgacggcatcaggcgctccagagcttgacgcggccgctgcaatcaatgccggcctgagggcattggtggaaaggaaccaggtggtccaggtcgcgcccgccgggcatacctttcgtcatccctccggcaccactaacaagatcttcatacaggctcgcgagttggtcacgggggatgccgagctcgggttcgcagcacgtgcgttgattcgtgttctaccggccctgaacgatcctgaccttcgtgtcgtctacattgatagcatgggcatctactctctcgttcgggcggctctcgggcccaggggagaaaaggtgcgcatcgagagctttcgctcgtattctgagctgtcgacactgtctaagccggttgagcgctacgcggtggtcatctctgcatccaccagtggtggcatggcaagagaatttactgagcgcatggggtttgagcaggatcgggtagctactgtcatcgatatggtgcgggaagatcggcacggggcgattcttatcgccctgagcgagttcgaccccactcttcttgacgtggacacaaatgaggccgacgtacagatcgagttagttggagagcatttctcttccaaatccaagccgcctcggatggtgacgcttggcttgcctcacttgcccaaagctttgcccagctacctaaagactgttggccgagcggccacattggatctgctaaagccccatgccgggcagtctaggcccatcagtctggacggggaggcggtggccagttcggacgattttaaaaggtggatccgggaggaggtgacgtggaatctcccggtctcgatcgatcatctgattgcggcggacacgaacggatctgtgagcatggccaacactgtggccgataccatcaatgccctcacaggcaagcgtccggttgttatcgaagcaggaagtctcaccagagcatcgctagggggtgcctgcggcgtggcggttgtccaggcagtcgttggcgatggtgcattccttcgcgaggttagccgacacctgcgggactacatcgacaccgactgccctcggcacttcatctgcgcggtttgttgcccgagttcaatcgattcgcgggagcggctcaagcaatttcttgttcgtaatccaacagcccgtttgtatgggttctcgtcttggatagatctgccaatcggcgctaacagcgccgaggactcctgggagcgctaccgtgaaatcgcttcccagatcgaaatggccaaaatagaccttcctcctcctcagaaggctattgtaagaaaggcagcggacagggcggtggcgcatattcaagcaagcaccggaggcttcctgcccaagcttgatgggagcggtttggatcagacagagggctttgtctttcttacgaagggctttcgaggtctgcccagtgagagcctcacgttcctaatcatctcggccgtcctgcagtccgcccgagaattgaaggatgcggagcggcaattgaagccaaccggttatgagtctgtcgttctggcgccggagaattttcagcgcttcaacgacaacatcttgcaagtgtgtctgctgcgcgcagcgctgccgtcggagatggactactcgtcaagtgccgaagtgagtcttctgatgaaagaggtgttacagaagatcttcgcgcgccgacatctgacttttggaggagccgcgttggagtttgctgcggcgctgctttcaggaaggatgaagctggctccggttcatttgaagcagttgctggaaagtacgctgccggaacttcttgatgaagccgagccaagtgcactcctcggcttgctccatttcgtggaacggcgggtctag

SEQ ID NO: 499210 - DNA, 1134 bp, Stenotrophomonas maltophilia
atgattcagctaaattctgcgacgcatagatcgctgctggaaatggaggacgtgatcgctcagatcgcagcctccgatgagaacgacctaaatgtggggaagggatttgcgtccaagcgcatcggggctttctacgatgctgcgcggcttcagttgctggccacctgggcacgacactcgcctggccgatccctcgcattcagtggtctgaataccgtcgaatccgtcaccactgagtggtgtgactacgctccaggtatcgtttccctgcgcctttgccaaggaatgtggattggtgatgaattcgttgaccgccgggatgccttggagccggcatttgacaagatggttagaaccgacggactgaattttccccagctgatcaaagggcgttcgctcgacttttcctgcataagtggtgccaaactccaatacctgcggccacttttccgcgctcggaatccggagtccgtcaaaggcaaacaggagatgtttgatctgcttactgccttgaacgctgaggtttccaaggtggatacgctgaaggtgcctgacggtttcctggaggctagctctgttttcatgagtgaattgctgcggaacactcaagagcacgcgacgcgtgattgccgcggactgccctacgttgcgcatgctgaagggttcatcattagtcgcacccagttggccggcgaggtccatgagcgggacttctctggaaatcctcggcttattgatttctgggatagagaggtgggaagtggcggaggaggcgcacttaaatcgctacaactcagcttctttgacaccgggccggggatagccagcagggctgctgcaaaggaagtcgagagcatgtcgctggctgacgagagggagatacttctagccagccttaaaaagaatgagagcacaaagaagcagaccggggctggtaatggctacccggaggtgcttgagaggctgcggcaagtcggtggattgatgtccatccgtacgggccgcctaagggtgttccaagcctttgcacccggtgaggaccgcgacatattcgagtttgaggactggactgctcgccccctgggccccgctgcaggtaccgtggtttccatcatcttgccgatcagacaatga

SEQ ID NO: 499211 - DNA, 672 bp, Stenotrophomonas maltophilia
gtggtcgcagtgattcctgcggccccacagatgctccctccagccaggctccctcggtgccgctattgcggcggtcctgcgcggtgggctcggcgtgaccgaacgccagcgaccgctaccgctgcgaaaccaggcccccttttcaagctcggccggctgtactgtcccctccgactgcttaggttgcttcctcaccagctgttcacgcggcaccgccggagggcacaatcggaacagccgcccaatgagtgggctgcacagacctcgcattacttgcgcgtaatattacttgggtgtaatgatatggatgtctcaaaagaggagcggctggcggaattcctacgacggctgaaagctgcgccgggagcggcaagtggtacagaagcgtccgatttggttgccgataccctgaacgccgtcgagaacgagctgacgaccatcccctacgacatcagtgcctcgatgacggacggtcggatgtatccgcctcaagctgacagcgctcgcacggtgtcacaggatcttacgcggtatcgcaatagaggccacaacactctgatccacgttagtggcgccattcgcatagagaacataggtggaacatgcctactcagcaaagcagctcagaacggatacaccatcccagaccaatggtctcccaagacgcggtag

SEQ ID NO: 499212 - DNA, 348 bp, Stenotrophomonas maltophilia
atgagcatctttaatctaatcgtgctaaaggccgaaaaccctcgtcagttggccgacttctattcggggctcgggatgcgattcgtcgaagaacagcatggcaatggaccaattcatcatgccagccgggcaggacatgccaccttcgagatctaccccttcacagagaacgatgagcgaaccacgggcacccgcataggcttcgaagtccagtctatcgacgatgcaattgctgcatgtgccgcgcaagtggtctcgccccctaagagcacacggtggggacgtcgggcggtcattaaagaccctgaagggcacaagatagagctcctggaagcgccgcgcttttaa

SEQ ID NO: 499213 - DNA, 1398 bp, Stenotrophomonas maltophilia
atgccgccgactcagccccctaaccccctccaatcctacctggacgaccccagcggctcgttggagatgtccgacattcgcatcggcaggtttcggatcggaaagctggtggtcaccagccgagaggccgcgatccaggcccaagagattctcaatgccgcctatgagcgcacccgccgcgcacgctcgactaagaacggcactcggtatcccgaaccgctgcctgtgggcacaccagggcgatcgctttccgtagaagtcgacgactacatccgcaatcgcggcgactacagctgtctggccagagagactgtcgaggcgacctctcgcaccctacggctgcttctaatgacctgcggggacataccagtcacccgtatcgaccacgctcacatctacaagttgtgggatctcattcgctgggccccagatcgtctgctgtccgaccctgagtaccgcaggtttacctacgaccaggcggtcgcgcgcggaaagcaactcaacgtggctcctccggccccggccacgcttgagaagcaccggcgcttcttatcgactttcttcaagaagcttgagaaatccaaggccatcggcgcctcaccgatggtcgccttcgacgagatcaagaaggacttggtcgtggatcccaacaagcccgagcgcctgtttgacgatgcagagctcaagcgcatcttcgagccggggacatatatctcctgggctagcaagtacccccatcgctggtggattcccatccttggcctctgcacgggagcacgcatcaacgagatcgctcagttgaaactggcggatgtggtgcaggaggccggcgtctggtgcatccggatccagaagaccgtcgatcccgaccttgcgcacaagacccgagatcggagccggcagcgcctgaaggggaaggcagccattcgaaccctccccatccccgccccggtggtcgacgcaggcttcctagatttcgtggccgatatccgcgcgtgtggccatcctcgattgttcccccacctgaccgccggcgtgaaccgcaagacaggcgaatccaaccagcgctacagccaagcggcgctcaaccagttcagcacctacctgaagagcctgggtttcgggaagggaatcgggctgcacgcgtttcggcacaccatcgccacggagctccatcacaagggaattcccgacgaggacattgccttgctgacgggccacagcatcagcaagagggttccggtgctacatgaggcctacttccacaagaagccagagcttgccagaaagaagcagatcgatctcttgggccgctacgcaccaccggtggagctgccgatctaccgaaggggacagtttgcgaaacaactaagcgacccaggcaagttctacccgtaa

SEQ ID NO: 499214 - DNA, 369 bp, Stenotrophomonas maltophilia
atgaccatcgatgtcagcggcctgtcggccaaagaactcaaagccctgatcgctcaggcagaaaagcagcaaaccaaggtactgacccggcccaaggctgccgcaatgcgagccaagatcaaccaatacgtcaaggaccacggttacacgattgaggagctttacggagcggtttcaacggcttcttccgagacccccaagaggccctccggccgcaggcccaggaagtccgccggcagcaaggtcgcccctaagtaccgcaatccggccaacctcagcgaaacgtggtccggccgtggccgccaaccaaggtggctggctgcgctggtccagaaggggaaagagcccagcgagttcttgatcaagtag

SEQ ID NO: 499215 - DNA, 1347 bp, Stenotrophomonas maltophilia
atgaacccacacttctcggccgaaacaccggagcggccccaaccgaaaagcctgtatgcgcaagtggatttcatcgagacattgggcgaaggattggccctggttggcttcgacggggtggatactgagtggttcgcggagttcaccgagcgctatggcctgaacgacaatgccgcgagcgcgaacgcgaacgcatgcgaagaattctttcgagaggcaccgctgttccacctgcagctgaccatgttcttcgatgaggccaatcgccggtttaggccaaggaccaagcactggctgcttcttgagatttccgatgagggccaactgttcgggcaactgtatccaacgctcttttctccggcccagaccgtcgagtttaacgcttttcgccttccgctgatgaaccgaaggagtcagcagctgaacaccttcgcacttttgccggcccaaacttcgatgccgcaaacaaggccgacgcccctgcacattgaagagctggcggtgctcgatgtgggccaggggtcggccaatgcattgctgtgccgcgaaggcattgcacgcatctactttgacgtgggctgcggcgtataccgcaatgccgccacgcggccaccgaacatcagcttctgccaatgcggggaccctgttgtagtcctttcccattgggatgctgaccactgggccgcagccgctgttgatacagacctgctgacgcgcacttggatcgcccctatcccagagacgatcaagcatattgtgttcttgatgaacatttgggccgcggggggagagacgattctgctcagcacttcgggccctgttcgcctcggccctgggatcaagctcgttcgttgccgaggacctgcaagtgaccgcaatgagtcaggcctagcgctgatcgccgagcgcgaaggcaggcgctggctgttacccggcgatgccagttaccacaacattccaggagccttaaaacgcccggtcacaggcttagtggccacccaccacggggcccgcgtccatggaaccggcgcgccggtgcccttgccggcgtccgattacgcccgattggcctattcctttggccccggtaatacgcacggaatttacggagtttcccacccccgtcccgcgggagtgcacgcgtatgacgccgccggctggacacacacaagctggagcgttaccacgcctggcaaggctaaagtcggcagaccggggcacgcccgtgcaactggccagcatccttctaagcatctgaaaggcatccgcatcggatggatcgagccaaccaaggcgcttcctcatttgaccagttgccccgacgcaatgccccttacgcagacgtaa

SEQ ID NO: 499216 - DNA, 789 bp, Stenotrophomonas maltophilia
atgaccgagatgtccaatcccattgctctaggtcagttgctcgcccaagtgtcggatccttatgatcgcaacgctaggttggcgcccggtctcattgtattgatgccgctgacggtgtccttcatcgcagcgtttcgcgatgaacttgacgcaatgcaagtggtggccgcggtcgttgtgaccttctgcgcgcccttccttctctctagcgtagtgcgcttccagggcaagaagctcgaaaacaagttggtcaagaaatggggaggcatgccctctacgattcttcttcgccatcgagacgagcgcctgaatcctgtgacgaaggcccggtatcacgacgcgatcaacgagaagctaaaagcagaagtcccctctgctgctaaagaaaggggcaatccaagcagggccgaccatgcatacgaggatgcggttgcaaagctgagggagaggacgcggggcacggaatcgttggtgcttaaggagaacatctcctatgggttctttcggaacatgtccgcgcttcgcccgtttggcgtggttacgtctgtggctggtgtggtggtggggttgctcctgaccggtgcgttgactctcaaccccctggctttcaactgggccacgctgcttcaccctggttttgagggtggggcaacgcttctagtgtcgggctttctgctctacttgtgggtgaccaacttcacccacggtcgcgttgagagcgcggcgtatgcctatgctgagcggcttttgaccgcgcttgatcgtattcccagcagctcctcaccttga

SEQ ID NO: 499217 - DNA, 1077 bp, Stenotrophomonas maltophilia
gtggcagatagtattgaattggattttttggccgtcgaaacgtccaagagcggagacgccattggcgttcgctacgaactgaatgggcgcacccgaatccatgtggtcgatggtggctacctggaaaccggcgatcgcttggtcgaacacatcgccaagcactacggaaccgctaaagtcgactcggtggtgctgacccatccggacagcgatcacgccaacggcctgcgcaaggtccttgagcgctgtgaagtgggggagctttggatgcatcgcccctggctttacgccgaagagttgcttcctcggttcgagacttacaattccgcagacgctctgcgtagtcgcctgcgcaagctgtatccgggaccggcggcgctggaagagctcgcgcttgagaaggacatccctatccgtgacccgttccaaggtgcctacatcggtgattttctggtgctagcccccacgcgtgcccgttaccttgaccttgtggtctcgtccgagcgcacccctgaggccgcgaaggacagcacgctgattgaggcgtctcttgagggcttggccgcgttggtcaaggctgccaagaacttggtgcagggtttgtggggtcaggagttcttcccggtgggtgggaccagtgaagagaacgagatgagcgtggtccagaccatcgtcatcaatggcaagcgcgcgctgctgaccggcgacaccgggcgagacggcctcgctgaggcggccgactacttggaagcgacgggtggaacgctgcctggcgtctgggccttccaggtcccgcaccacggggggcgtcgaaacgttaacaccgaggtcctcaaccgctggctgggcgaaccgcttaagacgcaggaggacgggtataagttcagtgccgtgtgcagttctgccaaggctgacacggcacatccccggaaggtcgtggtgcgggcaatgattcaccgcggagcgcacttctccgccacggaagggcgcaatctgttgctttccacgggcatctcgcgggccaattggggaagcgtagagcagacgccatatccgcctgactatgagaaggactga

SEQ ID NO: 499218 - DNA, 252 bp, Stenotrophomonas maltophilia
atgagcgagaaggtgcagtccaggcacacggacggcacggcaaaacatctccacattcccatcttggaggaaggcatctacgaggttctcggtcagcccaaactcagcggatactatgctttttacctcaatgacaagggttacatgtcctactgcgcgttggatccaaaattggccaccgcagtgttggcgaagatcggttccgatgggctacgtgcagcgttgctggccgtcgggaagacgctctattga

SEQ ID NO: 499219 - DNA, 234 bp, Stenotrophomonas maltophilia
atgtactggcttgaaatttattcaccgcacgttggcacagcccgcgtggaaggcctaagcaaggctcaactcgacgccatcgcccccttcttgggcggagcaggcctcgccagctccttcggcatttaccagcccgatggaagcaaggaactactgggaggttgcctggccgcgtcgctggaggaggatggcgtgcactacctgcacattgagactccggataccacccattaa

SEQ ID NO: 499220 - DNA, 312 bp, Stenotrophomonas maltophilia
atggcgcatcctgatttctatgtttccgccgtgcagtacaacagcgatggctcgcacattgccaagctgcgcgtgcatagggttgataagagcaatggcagcttcaaggcggatagttacagcgacctgacgcgcccccaagtcatcgggtcggtcgaaaagaatgtgactttcactaccgtcgtccgtaaggaagacggtgggtggcggctcggtgcggcgctggagattatgtcggtcaagaccgattacctcaagaccgtgcgggatgagtcgacgcgggacaacctggagaagttgcccactttctga

SEQ ID NO: 499221 - DNA, 765 bp, Stenotrophomonas maltophilia
atgtccaatgctattaaaaatagattagatgcgattcattctgtactgaagaatggtggtgaaccgggagcgcagcatcttctggagacgtggtctgttcagacggctcgattggtcggcggcagctcctggggcagcggacggtggcgaatcgtctcgctgggcgcagccccaacgcagcagggaataccacgctctggcagcagatcgttcacctgcagcgacccggtgcgtgatgtcgcgatctgggattggagcaacaagagcgaagtgttcggcaaccggattccgagtgccgatcctgatggggatggtgtggcgttcgagcttgcgttgcgcttcccgggccagcaggcgacggatgcgagtgggttgttctacaactatcagcgggaatacgaccctgcagtggggcggtattcgcagcgtgatcgcattggactactttgggggattgcaagcttcgcgtatgttggtgggaatcctatttcacagtccgattctctgggattgtgcgaagacgataatggttctgatgcgtccattcatcaaaagacatatggcaagtacttcaagtcatgcatgtcttacgttcagcctccgacatggttgactttgccggtgtctagtgcatccgttctgatattgtttgttgaagtgccctttgttgccggtgttgcaacagtgggaggaggagcgctggcgagctatgaggttggagcagctatagtctgcgctatggctggaattcaaactctgcagtga

SEQ ID NO: 499222 - DNA, 375 bp, Stenotrophomonas maltophilia
atgaacgaatcggacttcccgcatctgcacgcctaccgcagcaccgccggcgacgacggttcgccacaggctgcgccaacagaggacaggaacaccttcattgccaatctccaccgcatcggctccggtgcggcggccgatggacagccctggcccgagcggcatcaactgcccggccgctgcctggccctggccgatgccgattgcgcgttgagtggattgcgggtggtgctggaaatgctactggcggcggagcgcacccggcagaatggcgaaccggaagagtacgtgggcgaccgggtgatggaggggttggtcatggcctgccagtcgttgtgcgcgcaggcggtggggcggttgcagcccgaagggtga

SEQ ID NO: 499223 - DNA, 315 bp, Stenotrophomonas maltophilia
atgtgccgcgcggtggtggaaatgcgtcaaggactgattgatgcagacatagggggcggccttctcaaaaagcgagttgcgctgccgggccgcggaaagcgcggtagcgcccgcgttattgtcgcaaccaaggtggggcgctactggttctttctcttctgctacgagaagagcgcgcgcgcgaccatcagtagtgcggaacgggatgcccttcagctgtatgcgtctgagttcttgggaatgagccctgcacagttggacagggcagttatctgcggagaactgcaggagatttgccatgacaaagacggttga

SEQ ID NO: 499224 - DNA, 342 bp, Stenotrophomonas maltophilia
atgaaaaaagcggccagtgggccgcttttgcttttgttcttatttttttcttgcgtgggtggacgccgcagaaatctgtcagaggctgggggcggtgagttcgcgggggtgtccgcggcatggatgccgcggccaagcccccagggacgggtttacggcgtcccccgcgaactcaccgcccccagccaaaccaaggctttccgcgatcaaccgtccacccacgaggggctgcgccgttcgccggaacactacttcgccggcgacatccacatgtcgatgaccgcgctgaacacctccgtccccgcgcggtcgcgcacactcaccgtcaccggcagtgcatag

SEQ ID NO: 499225 - DNA, 3345 bp, Stenotrophomonas maltophilia
atgaccctgtccgatccacgccgcgccctgcttccgctcgccctggccctggcctgtgcgactaccgcgatgccggtgctggcacagggactgcagagctcgttcgagccgggccagccggctccggcaccggccgcaggcgcattgcaggtcacgatcggcaatggccctgcggcgccctacgccgccaagcgcaatgtcggctacagcggcctgcacgcactgcgctacagcagtgaaggtggcaatgtgcggcgcgaactgttcaaggcggacgtgaccatcgaggccgataccaccctgtcgtggttggtgctgccggagatcgtcggcaaggacaccgtggcgtcaacctatgtgtctctggacctgctgctggacgatggcagtcgggtttcggccggcgctgcgcgtgaccagcatggggtggccctcggcgcccgcgcgcagggcgactcgaagacgctgtacccgcagcaatgggcgcgcaaggcggtgcggctgggcgatgtgcccgcgctgaagggccgccgcgtggtggcgatcgaactggaggtggccagtgccgacggcgcaccggtctccggctggattgatgacgttcgcctggacaccgtgccacggcagcagccagcgcgcgtctccgactgggtgctgaccacccgcggtacccaggccaacggcaccttctcgcgtggcaacaatttcccggccacggcggtgccgcacgggttcaacttctggaccccggtcaccgatgccggtgtgctgaactggctgtaccgctggaacgagcagaacgacgcgcagaaccgtccgcagctgcaggcgcttgcgctgagccaccaacccagcccgtggatgggcgaccgccagaccttccaggtgatgccatcggccagtcgtggcgtgccggaggctgaccgccgcaagcgtgccctgtcgttcgaccgcagccatgaaagcgcccgcccttaccgctacgacgtgcgcttcgacaacggcgtcgcggcatcgatcgcgccgaccgaccatgccgcgctgttccgctttgacttcccggaggacggcgacgccaacctgctgttcgacaacgtcgatgcccgcggtggcctgactctggacgccgccacgcagacgctgtccggctacaccgacacccgcagcggcctgtccaacggtgccagccgcatgtacgtggtggccagcttcgacaagccgtggcgcagcagtgggcgcctcagcaccggccgcccgaccggctacatcaagttcgatgccggcagcgaccggcgggtgaccatgcgcatcgccacttcgctgatctcggtggagcaggcacgacacaacctggcgctggaaatcaccgccaccgatacgctggagagcgtggccggccgtgcgcaggatgcatgggacgcacgcctggcccgcttcgacatcggcgatgccagcgacgaccagaagaccacgctgtattccagcctgtaccggctgttcctgtacccgaattccggccatgaaaacgtgggcagcgccgccgcaccggagtggcgctacgccaaccaggccagcgccagcgatgacaacaccgatggcagcgcgacccgcacctttgccgccgtgcgcgatggcaaggtgttcgtcaacaatggcttctgggacaccttccgcaccacgtggccggcctacgcgctgttcacgcccgacgatgccgggcagatggtgcagggtttcatcgagcagtaccgcgctggcggctggatcgcgcgctggtcgtcgccgggctacgcggacctgatggtcggcaccagctcggacgtggccttcgccgatgtgtggctgaagggcgtcggcggcttcgatccgggcgaggcctacgccgccgcgctgaagaacgcgaccgtggtaccacccgaccgccatgtcggccgcaagggcatggaccgttcgaccttccggggctacgccagcgccgacgtgcatgagggcatgtcgtggacgatggaaggcgcactcaatgacttcggcatcgccaacatggccgatgcgctggccaagcgcgcggccacgccggccgcacgcgagcgctacagcaccgaagccgactacttccgccaccgcgctgccagctacgcgacgatgttcgaccctgccgccggcttcttccagggccgcaaggcggatggccgctggcgcgtggacgccaaggactacgacccgcgcgtgtggggccacgattacaccgaatccaacggctggaccttcgccttcactgccgcccatgacggcgaaggcctggccgcgctgtacggtggccgcgacaagctggcggcgaagctggataccttcttcgccacgccggaaaccgcagacccggcactggccggctcctacggcggcaccatccacgagatgaccgaagcgcgcgacgtgcgcatgggcatgtacgcgcacagcaaccagccggcgcaccacatcccgtggatgtacctgtatgccgggcagccgtggaagacccagcagcacgtgcgcgagatcctgtcgcggctgtacgtcggcagcgagatcggccagggctatccgggcgatgaggacaacggcgaaacctcggcatggtacgtgctggcctcgctgggcctgtacccgctgcgcatgggcgccccggagtacgtgatcggctcgccggccttcgagcatgcacgcgtggagctgcagggtggcgcggtgctgaccgtgaacgcggccaacaactcgcgcgagaacgtctacgtgcagtcgctgaagatcaacggcaagccgtggacgaagacctgggtgccacacgacctgatcgccaagggcgcgaccctcgacttcgtgatgggaccccgtccctcgcgctggggcagcggcgtggacgatgtgccgcgctcgttgaccgcgcgcggccagcgcccgcagctgctgcacgacctgctcggcagcggcgcgaaggcgacgctggccgatggccgcgccctgcccgcactggtcgatgacgatgcgagcaccaccgtgggcctgggcggcggcgcaaccatcgcgctgaccggactgagcgacggcacgccgacgatgtacacgctcaccagcggcgacggccgcatccagggcggtgagtggacgctggaggcgcgcaacggcggcggcagctggaccgtgctcgaccagcgcagcggcgaagacttcgaatccgcccgccagacccgtccgttccgcatcgccagacccggccgctacagcgaataccgcctgcgcctggcggcaccggcacggctgccactggcggagatcgaactgctggcggccggcaccgtacaatga

SEQ ID NO: 499226 - DNA, 1215 bp, Stenotrophomonas maltophilia
atgagccatgaactgatctacctgctgctgatcttcgcgctgctggtgatcccgcgcgcgctgcagcgtttcagcctgcccgcgccgctgacctgcctgctgttcggcatcatcggcatgctctggctgggcgaccaggcccatgatgcggtgatcggcctgctggccacgctgggcatttcctcgctgttcctgttcgccggcctggaagtggacctgcaggcgctgcgccgtggcatgtggccgctgctggcgcacctggtgatccgtaccggcacgctgttcggcgtgggctggctggcctggcgttatgcggggctgccgtggcaggccgccggcctgctggcgctggcgctgctgacgccgtccacgggcttcatcatggactcgctgtcgcggctgggcctcagcgaagacgagcggttctgggtgaccagcaaggccatcgccggcgaactgctggcgctggcggcgttgttcatcgtgctgcaggccggtgacccagggcacatggcgttgtccagcctggcactgctggcgatgatgatcggcctgccgctgctgttcatcgcgctgggccgctgggtggcaccgcacgcgccgggctcggaattctcgctgctggtgatggttggcatggtggcggcctacatcacctacctgctgggcgtgtactacctggttggcgcgttcatcgccggcctggtcgcgcgcctgctgcaccagcgcatgccgctgctggcctcgcacgagaacctgcacgcgctgcgcctgttcgcctcgttcttcgtgccgttctacttcttcaacgccggcaccaaggtgcccgccgaagcgctgagcttcgaggcgctggggctgggcatcgtgatcaccctggtggtgctgccgctgcgcatcggcgtggtctggctgcagcgccgggtgatgttcggcgagagcttccgcagcagcctgcgggtttcgctggcgctggcaccgacgctgatcttcaccctggtgctggcggcgatcatgcgtgagcgcttccagattccggcggtgctgttcggtgcgctgctgctgtacgcggcgctgaccacgctgttgccgtcgctggtgttccgtacaccgtttgacgttgatccggtggagcaggagccggccggcgagggcgaggccgcaccggtagcggcgaccgaagcactgccggcagcaccgtctgccgagcgctga

SEQ ID NO: 499227 - DNA, 978 bp, Stenotrophomonas maltophilia
atgacagtcgacagcgctgaatcgatcgttcacggcctctgggctgaccttaacgcggatatcgatccttcgaagcactttccagccgtcacccccaagctcgcgcattacactagtttgttcgtggctgaggccatcatcaaaggtgatgagttctggatgtcccaccccttcgtcatgaacgatcatgaggagctacggtggggcttgataaacgggactgataggttctttgatagcaaggcgatctcacacgccgtctcttcggaagaccagtatcgggtggtgatcgaggccctccaggaagcgagagatcgggacggcacgactcactcatacgacacctatattgcttgcttcagtgagcatcagcccggcgaccaagacggcctgctatcgatgtggcgcgcctatggagctgatgggggaggtgtagccatcgttttcgattcctcgaagctggtggaggacgcgagctcaccattgatcatcgctcctgttgaataccgttcgactgaggagcgatttgcctggatggattgggcaattgcaacgactgcggaggcaatcagggccctagggccccaggcagatgcttcccaactcaggctggcggcgtggacctactacgctcgtgtccgaagagctgccctgttttcgaagcacaagacgtttagcgaagagaaggaatggagggttgtgtacgacccaaccgcggacactacgggcggtttgtaccaggcgttgatgagctacgcgatcactccgaagggcattcaacccaagctgaagcttgggctaggatcgaagtctgttggcaaacagctacacttggaggagatcgttgaggcgattctcctagggcccactggcggctcatcaattgcgcagcatgcgatgagacgcttatgcgttgccgcgggcaaaccagggctctctagcaaggtttacagctcccgcactccatacaggccgtga

SEQ ID NO: 499228 - DNA, 1014 bp, Stenotrophomonas maltophilia
atgcggaagcgtgtgcggggcaagaccacgtactacttcttcgaccatggcgggaagccgcgccgcgaaacacctctcggtaagagctacccagaggctgtgcgcaggtgggccgagctaatggcaaccgaggcggctgtgccggagatcgtgacttttcgcgacgctgcacagcggtacaagcaactagtcatcccgaagaagcgcgcatccacggccaaggtcaatctggccgagctggcgaagcttgaggaattcttctgcaatccgccggcgccactggccaagattcggccactgcacgttcggcagtacctggactggcgaaccaggaacgcgacggtggccatggtcagtgccaaccgcgagaaggcactgctgagtcatctgtggaacaagtgtagggaatggggcttcaccgacgctgaaaacccttgcaagggtgtgcgtggttatggcgaagcgggccgcgatgtgtacgtcgaagacgacgtataccgggcagtgtggaatgcagccgatcagccgttgcgcgatgcgctggatctggcttatctgactggccaacgccccgccgatgccctcagcatggatcgcagagacgtgcgcgatggcttcctgcatatcagccagagcaagaccaagcacaagctacgcattgccatcgagggcgagctggccgagctactgctgcgcttcggtgccaggacgttcaagcggcgaggcaagcagaagggcgcagtgatcgtgcatacggcgctgctgcttgacgagtacggccagccgctgagcaagggcaagctgcgaagccgattcgatgcagcgcgcgagcgtgcaggcgttgccaaggcagcgtttcagtttcgggatctacgtgcgaaagccggaaccgataaagccgattctgcggcagacattcgccaagcccagcgtcagctggggcacgcatcagtcgttatgaccgagagctacaccagaaaaaggaagggcgagaaggtctccccaacaaagtga

SEQ ID NO: 499229 - DNA, 291 bp, Stenotrophomonas maltophilia
atgacccaggaacatatcagccacccggaagggttgccgaactgcgccgccggccaccgcgcgcgccacatccacgacaagcgctgtgcctccgccggcggcggccacctggtcgagtgcgcctgcaggtcgaccagcaagcatgccgatcccgatgcggccattgctgcgtggcgccggctcaatatgcccgcgcgcagcgcgcgcagggcggaacccatgttgccggagaacgtgctgcagctgcctctcttgggttcaccgcgggaggtgcgccgtgtcagcggctga

SEQ ID NO: 499230 - DNA, 501 bp, Stenotrophomonas maltophilia
atgcggcgcgtggatcccgccaccgctgttgacgggcgccaggtgcgcgcttgggctgacacccttctgaaagcgctctacaccgctcagccagtgcgctgggagtaccgcaacaaggacgatcaccggcctggctgctggatgcaggccgacgcagggcacgtctacgccgcccaccaacgtgggctcgttgtccgcgcactgttcgaaacaccgcgcgtaatccagcccgagaaggtccatgacttccagcgacgagtgtgcacgcgctgtggcatgagcgaggactgggcagggccggattgcttcccacccgacaacaagcccgacccgcgcaagctgctgcctgtccacccgagctggttccttgagccgctgcagtggatccgggacgccgggcccgctccggttagcgcgcacgagcgccgccgcagggccaccgaagccacgttcctgatcgaacagctcgaagcccacatcgaggagtgcaacaagccatga

SEQ ID NO: 499231 - DNA, 408 bp, Stenotrophomonas maltophilia
atgcagattcaaaagggctttacgctcatcgaactgatgatcgtggtggccatcatcgccatcctggcggcgatcgcgacggtggcgttccagccatacatcgtccgcactcagttgaccgccgcgctggccgatctcacaccaggcaagaccaaggtggaaatcctcgtcaatgagggccgttcggccagcctggtcacgccgaactacatcggtgtcgcccagaacgcccactgctcgaacgtcgaagccgaactcagcgactccggtgtcggccacatcagctgcaccctcaagggacacagcgtgctggacggcaaggacctgatcctgcgccgctccgccgagggcatctggagctgcgatggcagcgcgttcgaagcgcgctatcgcccgaccggctgctga

SEQ ID NO: 499232 - DNA, 441 bp, Stenotrophomonas maltophilia
atgaagaaccagaagggcttcacccttatcgaactgatgatcgtcgtcgcgatcatcgccatcctggccgccatcgcgctgccggcataccaggactacaccgccaagtcgaaggtcaccgctgcgctggccgacctggcttcgcacaagacccagttcgagatggaaaagagcgccggtcgtgtgccgacgccggcgaccgcgggcttccaggctgaagaaaccggttcctgctcggtcatcgctgtcgccgataccggcatgacctgcaccatccgtgagccgggcagccgtatcggtgccggtgcccagctggcgctgcagtacaccgataccgtgaccgacggcaccggtgctatcaccaccccgggtggctttgcttgcgttgttaagggtatggacgacaagttcatcccgaagggttgcaccaagggcaagtaa

SEQ ID NO: 499233 - DNA, 951 bp, Stenotrophomonas maltophilia
atgaaggcgggcaatgattttttccgcgcctctccattcttcctacggttgacgagggatgaggatccgtcagacacgaactgggtccttggcatcatcttcctgcgctggctcgcccgaaatcacgctttccttgacgcatcggtcggctctacggtggcagccgccccctcgccgacagacaccctggcatgcatcgaagctgccttccaggacgaaatccccggtgctgcgttcgacccggaattgctggagttcaccgttcgctacttctgcatggccgctccctacttttcggacttcttctcgttgttcccccaagacgccatgccttcgccggacgccatgtgggacaaacaggagcaggtgtacgcaattatcgactcccgtctgcggtcatggcgcaacggcgagccaatcgtccgcgcggtcatccccaatgccgatcaacaaggacatgccaaaccgtctacgccgctggacgctgacgtctggatcacgacgctggcaacgctatcggatgctgcggtcactcacgaaggttgctgggcatacgccgaccacttctacagggctctgacgacaccagcatcagtagaagtcgtcctggcggtcatgagggagttccttcggaacccgccacatgacgcgtcgatcatgtgtgcagcggagaacttcctgtcggatattccgctctcccgctacatcaaagcgtattccatcctcgcacccgaactcttggacgcctcttcagatgctgcgctcaatctcttcaactatccgggcagtgaattaacgccacgccaggtccgacagttcatcaaagagctcaggcgctgcaatccaggccgcgacgtggtcgcagagctggcccagctggccattgaatgggattcggaagacgacgagatattctcaatcgtcatcgacgcagcgcagaagcaagggtag

SEQ ID NO: 499234 - DNA, 3006 bp, Stenotrophomonas maltophilia
gtgaccttcgccattgaaacggccatggccgggctaccaaagctggactacagccgctcgctgtcgcgctacggactctcccaggtcactgtcgtcttcaaagacggcaccgacctgtactttgcccgccagcaggtcgccgaaaggctacagcagatcgcatctcagctgcccgaagggttggacccagagatgggtcccatctctaccggcctgggcgagatcttcatgtacaccgtggaggctgagcccaacgcccgcaagcccgacggcaccccgtataccgccacggacctgcgcaccctgcaggactgggtgattcggccgcagctgcgcaccacgcctggagtgaccgaggtcaacacaatcggtggctttgagcggcagatccacatcaccccggatccggcccagttagtggcactgggctttacgctgaacgatgtggtcgcagcggtcatgcgcaataaccagaacatcggtgccggctacatcgagcgcaacggccagcaatttctggtccgcgtgcccggccagctggccaatctggacgcgattgggaacatcgtgctggaccggcgcgatggcgtgcccattcgcgtccgcgacgtcgctagcgtaggcgaaggcaaggaactgcgcacgggtgcggcgacccagaatggccatgaggtcgtggtcggtaccgccttcatgctgttcggcgcaaacagccgggaagtctcccaggcagccgcggccaagctggacgccgccaacgccagcttgcccgctggcgtgcatgcaaaggccgtctatgaccgcaccgcgctggtggatcgcaccattggcacggtgtccaagaacctgatcgaaggcgcgctgctggtggtggtggtgctgttcctgctgctgggcaatgtgcgcgcttcgttgatcaccgcggcagtgatcccgttggcaatgctgttcaccattatcggcatggtgcgtggcggcgtgtcgggtaacctgatgagcttgggcgccttggactttggcctgatcgtggatggggcggtgatcatcatcgagaactgtctgcgccggtttggggaggcgcaacacgcactggtccgccagctcaacgacgaagagcgctttgatctgaccgcctcggccacggctgaggtgattcgccccagtctgtttggtctaggcatcatcgcggcggtctacctgccgatcttcgcgctgtccggggtggaaggaaaaatgttccacccgatggcgatcacggtggtcttggccctgaccggtgccatggtgctgtcgctgaccttcgtaccggcggcaattgccaccttcctgcgcggccgtgtggccgagcacgacaaccgcttgatgcgctggtcacgtgcccgctacacgccgctgctggagtgggcgctgcggcggcgggtcgtagtgctgacaggcgcggccgtgctggtggtggggtgtggcgtgctggccacccgtttgggctcggagttcgtgccgagcttggatgaaggcgacatcaccttgcagcccatgcgtatccccggcaccagtctggagcagtcggtggccatgcaggaaacgctggagaagcgcttggcccagttcccggaggtggccaacatcttctccaagatcggcaccgccgaagtggccaccgacccgatgcccccctccatggccgatacctttctgatgctcaagccccgcgaccaatggcccgacccgcgcaaacccaaggccgagctggtggaagagctggaggcggcggccaaggagatcccgggtagcaactacgagttcactcagcccatccagatgcgcaccaacgaattgatctccggcgttcgctcggacgttgcggtcaaggtctacggcgacaatcttgaccagctgacccgcctggccagccgggtcgagcgcgtcctgcgcggggtccccggcgccgaagacgtcaaggccgagcaggttactggcctaccactgctcaccatcacgccagatccagcggcattggcgcggtatggattgaatccgggtgacgtgcaggacacggtggcaaccgccatcggcggtagcgtcgctggccagctgatcgagggcgaccgccgattcgacctggtggtgcgtttgcccgaatcgctgcggcaagacccggctgtgcttgcggacctgcccattccactgccggagagcaccagtatcgatgagtccagccgtgtagccgctggtgccaacggtgggcctcgcactgttccactacgagaagtggcgaagatacaggtagagcgcgggcccaaccagatcaatcgtgagaacggcaagcgtcgagtggtgatcaccgccaacgtgcgtgagcgtgatcttggcggattcgttggcgatctgcgtacccgcatcggccaggatgtacctcttccagaggggtactggatcgattatggcggcacgttcgagcagctcatctcggccagccagcgcttggcggtggttgtcccggtcacattggcgctgatcttcgccctgctgttcatggccttcggctcggccaaggatgccgccatcgtgttcagtggcgttcccttggcattgactggtggcgtaatcgccttggctctacgcggaattccgctgtcaatctctgcgggcgtaggcttcattgcgctttcgggcgtggcagtactcaatggcttggtcatgattgccttcatccgccgactgcgtgagcaaggcgacgccctcgaagatgctgtccgggatggcgccctggggcgactacgaccggtcttgatgactgccctggtggcttcccttggtttcctgccgatggctttgaacgtaggcgctggttctgaagtacagcggccgctggccacggtcgtaatcggcggtatcgtgtcctcgaccgcgctgacgctgttggtcctgccggtgctgtaccgctggctacatcgcgaccgcggcagtcgtggcgatggcgctatccaagatccctcaacctcatga

SEQ ID NO: 499235 - DNA, 171 bp, Stenotrophomonas maltophilia
atgaacgagatcaatttggaagaggtccgggcagcgatgttcacggacccgagcgtgaaagcagtagacggcctgcggctggtcccaggcccggcaactggccgcgcgattgtggccacgatcactgtcgctgccccctcggcggaccttgacgtggtccacgctgtgtga

SEQ ID NO: 499236 - DNA, 1305 bp, Stenotrophomonas maltophilia
atgcttgctctcgcgatttttattgtcactcttgttttcgtgatctggcaacctcgcgggcttggcataggctggtcggcactcgccggtgccgccgttgctttagccactggggttgtcgggtggaacgatgttgggacggtgtggggaattgtctgggatgcaacgttcaccttcgtcgctcttatcatcatctctctcattctcgacgcagccggtttcttcgcgtgggccgccctgcatgtggcccgttggggcggcggcaatggtcggaagcttttcccgctcattgtcctgctgggagctgcaattgctgcagtgtttgccaacgacggcgcggctcttctgctgactccgattgttctcgcgatcctgttgcgcttgaatttcccgcctgccggcgcgctggcatttacggtcgcctgcggatttatcgccgataccgccagccttccgctcattgtctccaacttggtcaacatcgttacagcgaacttctttgacgtgtcctttgggcgctacgccgcgatcatggtgccggtgaacctggtatcggtcggagctactttgatcgtcctatggctctggttccgtcgcgacatccccagtaggtatccagtccaggatctagaagcgccccgcgacgcgatacgcgacgtggcagtttttcgcgcagcgctgcctcttctagtactgctactaattgcgtacttcgtaaccgggccgctcggcgttcctattgctttggtgacgggtgcagctgcactagtgctgatgggtatcgcaggccgctgggcgactggaggccggggcgccacaatggctgtgaccaagatcctctgtgacgcaccctggcagatcgtgctgttctcgatcggcatgtatctagtcgtctacggactgggtaatgcctggctgactgacgcggcgagtgcaatcctagagtggttggcaacgcagggtagcttcgtggcaacgattggtacgggctttgcggtcgctgctctcgcttccattatgaacaatatgcctgcgacactggtcggtgcgcttgctatcgatggggcgaacgtatcgacggccactcgcgagctgatgatctacgccaacgtcgtgggcaacgaccttggtcccaagctgaccccaattgggtcgctagcgaccctgctgtggttgcatgtccttgccggaaaaggccaacggattacgtgggggcagtacatgaaggtagggctcatcctgacgccccccgtcctgctgaccacgctcatcgcgctttggatttggctgccgtttacacgataa

SEQ ID NO: 499237 - DNA, 726 bp, Stenotrophomonas maltophilia
gtgattgatcgcattgcggcagatctgccaaacatcgaccccacacaacttgcgccgatcgacgtagacgccctcatcgggcttggcgacccgatccatccaccgcggatgctcatcctctacggctcactgcgtgaacgctccttttcccgcctgctcgcagaggaggtcggtcggcttctacgctggtacggctgcgatgtgcgtatcttcgatccgcacgacttgccattgcccgacggcgcgtctcccgatcatcctaaggtgagcgaacttcgcgagctcgcgtactggtccgagggcatggtctgggtcagccctgagcgtcacggcgccatgaccgccattatgaaggctcagatcgattggatacctctggccgacggtgccaagcgaccaacacagggcaagactctggccgtcatgcaggtttccggcggctcgcagagcttcaatgcagtaaaccagctacgtgtacttggccgatggatgcgaatggtcaccatcccgaaccagtcgtccgtggccaaagccttccaggagttcgatgaggccgggcgcatgaagccatcggcctactaccagcgtgtcgttgacgtatgcgaggagctagtgaagttcacctggctcgtacgaggacgcgcagcctacctcgttgatcgctattccgagcgcgttgagagcgccgatgagctttccaagcgcgtcaatcagcgctctatctga

SEQ ID NO: 499238 - DNA, 411 bp, Stenotrophomonas maltophilia
atgacactaacgatctatcataatccggcctgcggcacgtccagaaacgttctggaaatgatgcgccagtcgggcgaagacccgcaggttatcgagtacctgcagtcaccgccgacgcgcgagagacttgtcgaactaattgccgcaatgggcatcacgcctcgcgacctcctgcgcaagaagggaacgccatacgaggagttgggcctggacaaccctggcctcaccgacgaccagctggtggacgcgatgatggctcatcccattctcatcaaccgtccaatcgtggtctccgaccgtggcgttgcattgtgccgaccgtctgagaaagtgctcgcactgctggcgaaccccgtgtcttcctttaccaaggaagatggcgagatcgttacaaccgggacgtcaccgtga

SEQ ID NO: 499239 - DNA, 531 bp, Stenotrophomonas maltophilia
atgagccttactcagcccttcaacgtcctgttcctatgcacgggcaattctgcgcgatcgatactggcggaaagcgccctgcggagtattggcgatggccgcttcaacgcgttctctgccggcagccacccgaagggcgaggtccacccgctggcgattgagacgctgcacaaggccaactacccggtcgaaggcctgcggtccaaagcatgggaggagtttgccgcggcaagtgcgccccgcatggattttgtcttcactgtctgcgaccacgctgctggcgaggcgtgcccactgtggcccgggcgaccattgacggggcattggggtatcgaggatcccatccgcgaagctcacggggaaatgtggcaacgcgccgccttccgaaaggcgctgatgtacctggaaaaccgcatccgagccttcgtcgcgctgccactccatacgctgtctcgagcagcattgacagcgcaagtctgcgcaatcggccagctcgaaggcacttcgttctcccgaccagacgttgcttga

SEQ ID NO: 499240 - DNA, 348 bp, Stenotrophomonas maltophilia
atgaaagatgattccgccgtcctcgcactctctgcgctcgcccagtctgatcgcctagccgcattcaggatgctggttcgtgctggcccggatggcatgccctccggcgaaattgcggaagctctcgcgatcgcgccaccacgcatgagctttcacctctcgaccctggagcgagctggcctgctgcgctcgtggcgagacgggcggcgcgtgctgtacgccgctagctatgggcacatgcgccaactgctcgcgtttctgactgaggactgctgctccgggactcccgagatttgcggtgacctcttcaaactcgcccgcccatgtacctcggagacctgcggatga

SEQ ID NO: 499241 - DNA, 735 bp, Stenotrophomonas maltophilia
atgtactcggatcgggcctccgatttcgccgttcgttgcgatgagctaactcatggtcaggtcatctcgcgcttggcggacatgtacgacgaagtgtacgtcgatgaagtgcaggacttggctggctacgacctagatctgattgagcgcctgttgaggagcccgatcggcattaccctggtgggcgacactcgccaagcgacctacgccaccaactacgcgcctcggtatagccagttccgcggaccgaacttggcgaccttattccagctttgggagtcgcacggcctgtgccagatcgatcaccgcctcacgagtttgcgatgcgtgcaggccctgtgtgatctggccgacgcgctctatccgcagatgccccggacccaatcaggcaatgatcagttgaccggtcacgatggtatataccttgtcgcgcccgagcatgtcactgcgtacatgcaggagtttgccccaaccgtgctgcggcatgaccgacggcaggcttgcgatggcctaccagcaatgaacttcggccagtccaagggacgcacctatagccgagtcctcatcttccctaatggtcctttgacgcagtacctgcgcactgccgacgcgtcccgcataacggcgccacccaggtattacgtggcctttacccgggcgcggcagagtgtggcgtttgtgtataacggcacgtgcgcgctggttggccaccagctctatacgcctcaatcctaa

SEQ ID NO: 499242 - DNA, 1581 bp, Stenotrophomonas maltophilia
atgccgatcgaacgtattgttatcgataacttcaagtcttttcgtcacctcaatctgcagctcaatgcgcacatgaaccttgtggttggtgacaacgcggtgggaaagtccaccttgctggaagcgatccacgcagtaataactgggcagctgtatggtcgcaacctcacctacgagctcacaccctatctttttcaccagccaacggtgagggagtacttagcggctctgcgcgcaggaacgcctgcgtcaccgcccaggatctccattgaagcctatttggggaacgatcccgcgctggcgtctttgcgcggcaccaacaactcattaggtctagacagtgcaggcgtccgattgctggtcgagctcagcgacgactatcgcgaggaattcaacgcctacctacagcaacaccagggcgcgaacagcctcccagtggaatactacacggtgcgctggtactcctttgccaacaacggcgtcaccgctcgtaccattccgttcgattcaactatcatcgacacacacggtatcaagacactgtccggagccgatcgctatatcgccagcatcatcgaacaggcgcttaccccagcgcagcgagtttcgttatctttgagttttcgccgcatgcggcaaagcttctcggaagaggacgacgttgccgccattaatgcttatctcactcagcacacaggagacatcagtcacaaagcgctgacggttggcgtggactcttcaccgcgctcaacgtgggaaacaagcttgtcaccgtacctggatgagcttcctttcacccaagctggcaagggtgagcaaagcgcagtaaagatgaagctggctatgcatgctgcagggtcggcgcatgtactgctgatcgaagagccggagaaccacctctccttctctggcatgagccagctgattgacaagatttcagcgctctccacgacgcagcaggtggtcatcgcaacccacagcagcttcgttctgaacaagcttggcgtggacaacgtgatcctgttcagcgcccaaggccagatgaaactggatcagttgccgcatgatacgcacgattacttcatgaagcttcctggtcatgacacgttgcgactgattctggccaagcaggcaattctggtggagggcccgtccgacgagttgatcgtgcaacgtgcctactttgatcaccacggtgtagcgccattggcccgtggcgtggacatcatctcggttaaatcactggcgtttaaacgcttcttgcagattgcggagcgcctgcgtattcaggccaaagttgtcaccgacaacgatggcgatatcgcgctggtgcaagagcgatatgccgacttccccaatgccatctactacgattctgacgagagcgccccatcgttggaagagcaacttattaaagccaactcactggacgagctgaacaccgtgctggccaagtcattcgccgacgaggtggcgttgctcaagtacatgaaaggtcacaagaccgatacggccctagccattttcaacagcccccattcgatcaatttcccggactatgtccagcgtgctatcgcctaa

SEQ ID NO: 499243 - DNA, 357 bp, Stenotrophomonas maltophilia
atgatcgatttgccttgtccatcgtgtggcttcctgaccctggaagacgtctacgggtcccacgccatatgtccgatctgcaactgggaggatgacggagtgcaacttgccaaccccacatccaccggcggagccaacggcgagtctctggcgcaagcgcagcagaatgctctttccagtttcccccttggcgtcgaggtcgcaagcggctttcgccgcggatctggctggcgccctttgtccagcacggagatcgggcactacgaagctctagggggcggcaatcactggcacagcaagagtgtctcgtacgagaaggaggcttactggtcgatgctgggcgttctttcgatctga

SEQ ID NO: 499244 - DNA, 252 bp, Stenotrophomonas maltophilia
atgatcgacctgaaccaaatcgatgacctcgcccgtcgcctcagcgacctggtgccgccgggcctgcgcgaatcgcgcgaggaactgcaggccaccttcaagagcgcgctgcaggccggccttgccaagctcgacctggtcacccgcgaggagttcgaagtgcagcgcgccgtgctgctgaagacccgcgaaaagctggatgcgctggaaacggccgtgcgcgagctggaagggcgcggcgccgcagaatga

SEQ ID NO: 499245 - DNA, 660 bp, Stenotrophomonas maltophilia
atgtatctttctgctctgcccccctcctcctgcggcgatgacgccgccaccccgctgctgctcaagcgcggcgaacgcttcctggcccccgacgtctatcgcacctgcctggacgggcgcgaggcagtcatcaaggactattcccgctaccgcggcacgcccgtttcgctgatcgcgcgactgatggtgcgccgcgaggcccgcatgctgcagcgcctcggcggctggaagcacgcccccgcgctgctcggcaccctcggtggcctggcgctgggcatggagttcatccccggccagaccctgagcaccgcacaggccgtcggcaatgaggtgttcgagcagctgcagcacgcgctcagccgcttgcacgccgccggcatcacccacaacgacctgcatggcaccaacgtggtggtcagtggcggcgtgccggtgctgctggacttcacctccgcctggcgcgccccgcgctggctgcgccgcaacccgctcagccggcagatgcgccgcagcgacatgaagaacctgctgaagatccgccagcgcatgaccggccaggccccgagtgccgcgcaggccgcattggtggccgacccgggttgggtagccgccgtgcggcagggctggaagcggttctacaagtgggccaagcggcggtaa

SEQ ID NO: 499246 - DNA, 762 bp, Stenotrophomonas maltophilia
atgaagacgaccacgctgttcccctggccaggcggtaagacccgtctgctacctcacttgctgcccctggtggccgagaccccacaccgtacctatgtcgaagccttcgccggcggcgccgcgctgctgttcgccagagagccggccagcgccgaggtgctgaatgacaaccacggcgaactggtgcgcctgtatcgggtggtggccaaccaccttgaggagttcgtccgccagttcaaatgggcgctgacgagccgggaaatgttccgctggtgccagctccagcatccggacacgctgacggacatccagcgcgctacccgcttctactacctccagcggttggcctggggtggaaaggcgaccggccagagtcccggcttcggccggggcggcaagggtttgaacctgctgcgcatagaggaagatctgagcgctgcgcacctccgactccacaaggtcaccgttgaacacctggcctggcagcagtgcatggccaaatacgatggcgctgacaccctgtacttcctggacccgccgtactgggagaccgaggggtacggcgctccctttgagatggagcagtaccgggagctggcccgccagatggcaggactgcgtggggcggccatcctgacgatcaacgaccacccggcgatgagggaggtgtttgggcaattcaggggccgggttgtgccgatccggtacacgatcggtcgacaggcggtgcagcggagggagttgatctacacgacctggtag

SEQ ID NO: 499247 - DNA, 348 bp, Stenotrophomonas maltophilia
atgaacgctgattactacgccgtcactgattccggttatcgatccgtcaccgccgacggccccctggcggctggggagacgaaggtcacgctgctgcctcaagcgcttctgacgaagctcaagggtgagcagatgaagtccgagtgcagccagcgcctacggtccaccgactggacccagatggcggatgcgccactgagcgtggagcagaagacggcgtgggcggtctaccggcgggcactgcgggacatgcctgcgttgtctgggtttcccgacgtgtcgtggccaagccctccggcttcggacggcgctgcttccggcttgccacgggccacagacgcaacgtga

SEQ ID NO: 499248 - DNA, 765 bp, Stenotrophomonas maltophilia
atgcctgacgtcaaactctcccagctcgccgccgccagtgcggcctcggtagcggccggggccggcctgtggacgatggccggccacatccttggcctgcgcatggagtatgtggggccggcgtccatccgcgtatccagcggcagcgcgtgggtaccgtctttgcagcgagcgatcgaggttcccactgctcttaccctcaatggtctcacgcttgcggcgaacacctggtaccacctttacctctatccaggtgaggcagcgccggccatcgaagccgtctccatcgttccggccgctccctacagcggcaccgcccgagcgaagaccggcgacaccagccggcgctacatcggcagcttccgcaccttggcatctggcgctattgctaagttcacccatgatctggccgcatccgcgatcacttatctggaagacctgaacgcggctccgtttgctgtggtagccggtggcacagccacgaccgccacgacggtgagctgcgcggcaatcgtaccgatcacttcgaagcgcgcgaagctgcttgccaacaacaacgccaccgggcagatcatttttatgtcgaactcggaggcggtgaacgccctcagcacgtcgaactggctggtgctgatcctccagctgggctcgttctacacggaggtgccgctggattccagccaggccttcaactacctgtacagcgcagcacccagcggtgggcaggccttcattcgagccgtggggtacgcttatgaacgctga

SEQ ID NO: 499249 - DNA, 447 bp, Stenotrophomonas maltophilia
gtgaatgcgctgtgggtggtggtgccgccgcaggccaaggcctcgccgcgtaccctgaaggatctggccggtgccggcgtgcagcgcatcgcgctgggcaacccggacagcgtgccggtcggacgctatgccaagggcgcgctggaagcggcaggcctgtggccgtcagtgcagggcaagaccatcaccacgcagaacgtacgccagtcgctggattacgtggcgcgcggtgaagtggatgccggcttcgtctatgccaccgacgcacaggcgatgcccgaccgggtgcgctgtgccttcgcggtgccggtggcggggcgcattgcctatccgttggcggtgaccaaggccagcgcgcaaccggctgaagcaaagcgcttcaccgccttcgtgcgttcggcacagggccaggcgatcctggccaagcacgggttcggcaagccctga

SEQ ID NO: 499250 - DNA, 684 bp, Stenotrophomonas maltophilia
atggatctcgactggagcgcactgtggttgtcgctgaaggtggccggctgggccactgcgatcaatctggtgctgggcgtggcactgggcgcgctgctggcgcgtcggcgatttcccggccgtgagctgctggattcactgctcacccttccgatggtgctgccaccgaccgtgctgggttattacctgctggtgctgatcggtcgcaacggcccgatcggcgcgtggttgcagtcgtggttcggcatcaacctggtattcacctggcaggctgcagtgattgctgcggcggtggcctcgctgccgctggtgttcaagccggcacgcgcggcgttcgaggaagtggacggtcagctggaacaggccgcacgcacgctgggtgtgtccgaagcggcggtgtttttccgcatcacgctgccactggcctggcgcggcatactcgctggcctgttgctggcgtttgcacgcgcgatgggcgagttcggcgcgacactgatggtggcgggcagcattccgggccgcacgcagacgttgtcgatcgccatctacgaggcggtgcaggccggccaggatggcaaggcaaatgcgctggtgatcctgacttcggtggtctgtatcgtgatcctgttgctggccgcgcggctggtgggcgggcgtcgccgggagctgcgcgatgtggcttga

SEQ ID NO: 499251 - DNA, 846 bp, Stenotrophomonas maltophilia
atgtggcttgacctgcaggtgcagcgcggcctgcagggggccggccaggattttgtgttggacgtatcgctgcagtgcacgcagcggcaggtggtgctgttcgggccttcaggcgccggcaagagcctgactttgaaggcggtggctgggctgctacggccgggccagggtcatgtacggctgcaggggcagaccctgtttgatgcggccaccggcgtggatctgccgccgcaacgccgccggctgggctacgtgttccaggattacgcgttgttcccgcatctgagcgtgcgccagaacgtggcgttcggtctggagaaggggtggttgaatccgcggatcggccagcgcttcgatgcggtggagcagtggttgcacgcattccgcatcgacacggtgggcgatctgctgccctcgcaggtctccggtggccaacgccagcgtaccgccttggcacgcgccctggtgacgcagccgcaggcgctgctgctggatgaaccgttctccgcgctggaccatgatcttcgccagcacctgcggcaggagctggaggccgtgctggacggggccggtattccactgctgctgatcagccatgatcccaacgacattgagatatttgggggccagatcgcctgcatcgaaaatgggcgactgacctctcctcccggctcgcgtcagaggccgacccgtcagccccgccttctaccatccttagtcagctccccaacaagcccgggtcttgaggggaagagcaactatcagtcggtcggagactcagagagcccaaagccacgatacatctgcccgcgagccgcgcaaatgggagacgaccctggtgcatag

SEQ ID NO: 499252 - DNA, 1398 bp, Stenotrophomonas maltophilia
atgacgccaaagagcgccaaccaatcttccgaagagcgcgcaaacggcgatcttgcatggccggaccttgcgcgctcatcgatactgatcgttgacgacgaacctggcatgcgtagcttcttggttcgtgccttgcgaccgcgatgcaaagctgtggaagctgcagctgacaccattgaagcggagcagcatctgacggagcgccactttgacatcgtgattgtggacaacgtgttgccagggaagagtggcatcgcgtggctggaggaccagcgcaggggaggggtcttggccgacttcattctgattactgcgtacgcagacttggattccgctatcggcgctatccgcgcgggagcggctgattttcttctcaagcctttcagaaccaatcagttgctggccgctatatcgcgctgcctggaacgcggtcgcctacggcgggagaatgccattctccgtcacgagctacatggctccggtgcaccagctgcgcttcgagacaggctcacaggtagctcgcgtgcgattcaggccaccaaggatctgatcgcgagggtcgcaccactgcccagtagcgtgctgttcactggagaatccggctctggaaaggaggttgccgcaagatcgctgcacgcgttgtccgcacgggcatctcatcctttcattccaataaattgtgcagctgttcccagcgagttgattgacgttgaactgttcgggagtctcaaaggaacgttcagtggagcgaactcgcctcgccaaggactggtcgcctatgcagaaggcggaacattgctgtttgacgaagtcgctgatcttcccttggctctccaaggaaagctgctaaggatgcttgaagatagacggatacgaccagttggcgcagatcgggagattccgatcgatgtcagattcatcttctcaaccaacaagaatttggttgcggaagtgaagaatggaacattccggtcggatctctactatcgcatcaacgttctcgaggtgtcgcttcctcgccttcatgaccgcggcgctgatgtgttggagctggcggcgggcttcatgcgtgagctggggctgcagcttggccttcaaccgattccgatcgacgaaaggacccgggcatatcttcagagctactcgtggcccgggaacgtccgcgagcttcacaactacgttgagcgtagcctgatactcggacactttccgactcagcttgagcggttggagtcactctctgacccacgaagccggctgctctcggaggtcgagcgcaggcacatccttgcagtgcttcgagagactggcggagatcgcgaaagagcggccacgatcttgggcatatcgcgaaagacgattgatcgtaagtgctccagttggaatgtatcagcctag

SEQ ID NO: 499253 - DNA, 2022 bp, Stenotrophomonas maltophilia
atgaaccgagcgcgatcagttcgcttccgcctgcttctaatcgcgatccttccaatgtttgtgatcctgccggctatcgtcggcggactcatctaccaatgggatttgcgcttcgaccgactgctcgcctcgaaggttggcggggacctgaaagttgcgggacagtacatgaaccagctgctcgtcaacgaccgcgcgacgctggctgcgattgctgattcgcagagcttccatggcgtcattagccagggggtcaacaagaatgcagagcttggcagcctactagcgtcgaaagcccaaggtggttcactagacttcatcgcactgttggattcaaacggtcgcttgttggctagtagcgagccggcctcgccagctgagcttgacttggactggtcagtcatcgaaaaggccctgaagggggcgtccagcgtggaggtgggggtggtaagccgggacgatctgatggagatctccccaaagctcgctgcacgggccgaggtcattcgtccgcataacgcaaggaatcctgtcgattcggcccagagtgagaagcggggcctaatgattcaagctgcaacgccggttgcactgccaaacaatcaggtcggcgtcttgattgcgggtaccctgctgaaccacaacaccgaattcatcaagcagatcactgatcttgtctaccgagataaggccctgcgtactggcgcaacagggatagcctccatcttccttggtgatacccgcatcagcaccaacgcgttgttggcgggagggaacccagcgtcggggacacgggtgtcttctgaagtggccgaggccgtgctgggccagggaaagacctggcaggcaagagcctacgtagtcaatgattggtacattgccggctatatgcccattctcaatggccggggcgtacccattggtatgctcttcgtgggctttctggaggagccattcaccaccgcccgtcgaaattccatcggagcgatcgtgttcggttgcctgcttgttgcagtcatcaccgtacccctttttctgtacatcgctcgcggcgtgttcaagccacttgagcggatggatcaggcaattggacgggtcaaggcgggtgaccgcagtgctcgctccggagcaggggcatccaatgatgaaatcggacgtgtcgcttcgcacttggaccagctgctctgtcagctggaagagaaggaacgacagctggtcgcctggaacgaggagctcaattccagggtagaggagcgaactgctggtctcgcactagccaatagacggttggaagagacgacccagcacctgattgtcactgagaagctggcaacaattggcgagatcgcagcaggaatagcgcacgagatcaacaatccgcttgccgtcatgcaggggaacctcgagcttctgcgtgactcgatcagggagcccgagggtcagcggtttggagaagagattgacctcattgaggatcagattgggcgtatcagcaccattgtttccaagttgctgcagttctccaagcccagtgagtactccggtcatagtgagctgctagagcctgccacgctgatgttggagacgctgcccctgattcaacacctcatcaagcgccatcccgtgaagatagaggagaacttcctgtccacacggctcgtaacgggcaatcggggcgagctgcagcaaattcttgtgaacctcatgatcaatgcaatctatgtgatgcagaagggcggaacgctgggattggcgacgttggacgttgacgacgttcatggtcaccctggcgtcgctttgcgagtctcagatactggaagcggcattcctcaggatattctggtccgaatttttgagccattctttacgaccaaacatcgtcaaggtaccgggctgggtctttccatcagtcagatgcttgccaaccgctacggtggcagcctgtctgtggagagaaccggcctgacagggacggtcattgaactatggatgcccgaggctgccgacgatgaactgcattag

SEQ ID NO: 499254 - DNA, 936 bp, Stenotrophomonas maltophilia
atgacacaccgtctcccagatgttgaaacgagaatgcgaaggcagccgacgttgtgggacgttgcgtttgccgtcaggggtaccatcctgcccaggatcgcattgcatctactactgattagcattgtgaccgcaggagcggtgctcgcatcaacggagcatccaggaatctttgctcgcttcagtggcgttccgttcacgctcattggtatcgcactttccgtattcatgagctttcgaaacaacgcttgctactccagatggtgggaggcgaggcacctttggggtgacctggtcatagcgtgtcgctcgatagccaggcagacgtccctgctggatccaaacagccgagcacagatcctgcgaggcctgtgtggcttcagtgcgggcctctattctcgactgcgccgagccgacgaagcccatgcgatcgcaccttggtgggatattggcaaggcatcacaaggcccgaatccgacggacgctgtgctccagggcattggcttgaagcttgcccatctggctcatgagggaaggatcgactcgattcagtactcggtgctggataagcagcttgccaacttggctcgtatccaaggtgggtgcgagaggatactcaatactccgattccattctcgtattcgctgctgcttcaccggactgcgatcgtattctgcacaacgcttccttttgcgctggcaggaacattggggtggtggacctttctaccggtgctcattgtggcgtacacgttttttggtctcgatgcgctgggccgtcagctggaggagccattcagttccgcgccgaacgcgctcccgatctactcaatgcagaggacgatcgagacagagctaatgtctacgctggccctgactgtggtcgatcaggagtcggtacagcagccagtgcagcagccacgtagggaggagtga

SEQ ID NO: 499255 - DNA, 1980 bp, Stenotrophomonas maltophilia
atgtcaacagatatgttcgtgatgcattcggatcatacgccggcgggggatcagcccgaggcgattgccaggctgattgctggcatcgaggagggagcaacacatcagaccttgaagggaattacagggtcagggaagaccttcacgatggccaatgtgatccatcggctgaagcgacccacgctcattcttgcgccaaacaagacgttgactgctcagctctacggggagatgaaggcgctgttccccgagaacgccgtggagtatttcgtttcctactacgacttcttccagccagaggtctatatcccaggtagcgatcgttacatccagaaagactcagccatcaatgatcaccttgagaggcttcgactatcgactacgaagtctctgattgagcgtagagacgtgattgttgtcgcttcggtgtcctcaatctatggactgggagacccacagagctaccgggatctgcaggttgagcttgcgcttggaatcgagctggatcagagggacttcctgcgtcggcttgcatcgcttcagtacgacaggactgagcggaccctgaagcgtggcacgttccgtgtgtctggcgatgtggtcgatatttttcccgccgactctgagtacaaggcaattagagtagagctcacggacgaggggagagtgcagtcgctcatctggattgatgcggttacagggaagaagcttggcgatgagacgcgctacctcgtttctccaaagacactcttcgcaagccccaaaacagaaatcaatgaggctacgaaggccatcctcaaggatttggaggccagggtggcggagctcaacgcatctggtcgaatcgttgaggcaaataggctttacgagaagatcacgaacgacgtggagatgatgagggagctgggatattgctctggcatggagaactactccagttacctgaactcaaagccgtcaggagctaggccgacgacgctcatggactacctcccgaaggatggcctgctatttgttgacgagtcgcacgtcatggttcctcagatcgcggcaatgttcaggagcgatcagagcaggaaggagactctaatcgagtacgggttccgtctaccttcggcaatgaacaacagaccgcttagcttctctgagtttgaagccatcaagccccagacgatcttcgtttcggctacgcctggcgcctatgagattgggagatccaagggaagattgattgaccagctcatcaggcccactggcttgctcgatccgctggtagaggtgaggcctagggagggctacaggtgcgatcttctgtcagagatcgcccgttgtgtacgagagggcgacagggtcttggtgaccacgctgacaaaggtgtctgctgaggagctgtgcgagttcctcgaggatcaaggggtgcgtgcgaagtacatgcactcggatatcaaggcagaggatcgagttgagatcatcaatgggctgagggccggcgagttcgatgtgctagtgggtatcagcctgctgagagaggggctcgatattcccgaggcctctctggtcgctatcgttgatgcggaccaggcgggcttccttcggtcgagccaggccctcattcagatgattggacgagctgcaagaaactcgcgcggtaaggcgatcatgtatgccgatacgatcaccagtgcgatgcggcaggccatttctgagactgatgacaggcgacagcatcagatcgcgttcaatgaggagttcggcatcaccccgtcaacgtctcgcggaatgttgggatcaacagaggctcgccctgaccggtcgcaagcccattcagcggagttctgcgccagcctagaagatctctgtgatcgaattacatcaaaggagcgacagcttctggatctctctgatgccggggacgaggaggagatcgagttcgtccggctggagctagacaagctataccgccaattcatctacatgtaa

SEQ ID NO: 499256 - DNA, 276 bp, Stenotrophomonas maltophilia
atgcctcacagccctcgggagaaaaagcaggcccttacccgcgtacgtcggatcagcggacaggtggctgcattggagcaggctctggagagcggggcggaatgtgctgcagtacttcagcagcttgctgctgtgcgcggggcggtcaatggtttgatggcgacggttctggagagctatctgcgtgaagagttcccgcatagcgacacccacaccgactctcaaaggaagtcgattgacgagaccatctctattgtccgctcctatctccgttag

SEQ ID NO: 499257 - DNA, 1329 bp, Stenotrophomonas maltophilia
atgaatgacccatccggcctgagccaagctgcaggcacgccagcagaaggctacgtatatgggatgccggcgcacgcggaccgccgcgccgccgttgaggaagtccatgcgcgaccgcacctgctcacccagtctccgcgaagccttctccagctctccttcatgacagaaggggacatgagtcgagatcgtgccgcgatcgacgatctttcaggtcgtatgggggctgcagtcgaggatcacaccacacctcatcacgcgcttacgtggaatgagggcgatctgcactgcgagaagcacactgagttctcttcctacctctggagcgcaccactgagctcagaaacaggtgagccttgtggggacaacccgtttagacaggggttcaagccgccaggacccgtgatctcggctgttagcgtcaggcttttgccttggaccgcggaggcggagaaggaaatagattgctttgatcccgtcagccgctgctattcgctggttgagaacggtgccgcggccattgtgaccgacttccggcaagacgaggaagggctaacccacatgctcatccttgatcgcggcctgactccggcgcgggcaggggcgctggcacaacgactgctcgaggtcgagacataccgaacgcttgccctgctagcgctaccgctgactcgctccatgacgtcgaatcttcgtcgcatggaggcgcgtctggctgcaattactgaagagatgcgcagggcctccggtggacgtcgtgacagtgacgtactcctctcggatttgaccagcttggctgcagagttggaggcggacgccgcggcaaatctctataggtttggtgcaagtcgggcttactacgaaattgttgaagagcgactggatgcgttggcggaggatcaagttgccggctatagcacctgggcggacttcttgtatcgaaggattgcaccggccatgcgaacttgccagtcagtgaaggagcgacaggggaagctctcagacaagttgacgcgctcaatctcgctccttcggtcgtggattgatgttgagctcgagcggcagaaccgcgacctactggcgtccatgaatgaacgggcgaaggttcagctgcgcctgcagcagacggtggaaggtttgtcggtggccgccatctcgtactacgtcgtgagtcttctcgcatacctgctcaagggtttgcctgggacgcatgacatcgcagcaaccgtcactgcgatcttggttcccgctgtattgctgctgatttggtggattgtccgaaggattaggcatgcacacggtgactcggcagtcgaggacaaggcctaa

SEQ ID NO: 499258 - DNA, 831 bp, Stenotrophomonas maltophilia
atggaacgcattgagcgtcacgcaagcttcggtggatggcaggacgtctaccagcatgaatcatccagccttggttgcaccatgaagtttggagtctatctccctccacaggcgtccagcggcccggtacctgttctctactggctctctggcctgacgtgcacagagcagaacttcatcaccaagtctgcagtgcagcagctcgctgctgagcatggcattgccatcgttgctccggatacaagtccgcgcggagagtccgtcgcggatgatccagcttacgatctcggccaaggcgcggggttctacgtcaatgccaccgaggcaccgtggtctgaccactaccgcatgtatgactacgttgtaagtgagctgcctgctctcgttgagaagaacttccctgttagccaggctcgctcaattagcggccactcaatgggcggccacggtgccttggtcatcgctttgcgaaacccaggtcgctatcgcagcgtatccgccttctctccgatagtggcgcccacccaggttccttggggccagaaggcgttttcggcctacctggggggagatcaggagcagtggcggcagtatgacgccgtggagctgattgcagatgcaaaggagcgcctgcccctactggtggatcaagggctcagtgatgacttcttgcagaatcagcttcgccctgaactgcttcgagatgcatgcgccaaggcgaatcatccgctttcgctgaaccttcgcgatggttacgaccatagctactacttcatctccagcttcattgccgatcacctcaagcaccacgcatcggcactgagcacctaa

SEQ ID NO: 499259 - DNA, 1305 bp, Stenotrophomonas maltophilia
gtgatcaagacctccagaaatcgtcatcaagttgtgatcgttggggcgggcttcggcggactggaggccgccacgcaccttgaaggagtggatgtcgatgtaacaatcattgaccggcggaactatcacttgttccagccgctgctctaccaggtagctggtgcgtcactgtcaccgtcggagattgcatggccgatccgctatctgttccgtgaccgcccggaggtgaggaccctcatggcggaggtcgagggtgtggataaagctgcccgccaagtgatccttcaggacggcactcgatacccttacgacacccttgtgctcgctacgggagcgacacatgcctactttgggcatgacgaatggtcgaagtacgctccaggcctgaagagcctggaggacgcaacaaccattcgaggcaggatcctgagcgcgttcgagcaagcggagctctgcaatgatcccgaggttcgagaagcccttcaaacctttgtgatcattggtggcgggcctacaggtgtcgagcttgccggaaccatcgcggagctggcgcgaggcacgctgcaggatgactttcggtcagttgatcccagcaaaacccgggtatttctcattgaagcgggtccgcggctgcttcctgtctttcctgaaaagctctccgagtacacgaggcgcgccctcgagaagcttggggtatccgttttgttgggggcacctgtcacagagtgcgcctctgatggggtgatgctcaatggcaagaagctggcggcatccacaatcgtctgggcagccggagttcaggcgtctccagccgcacgttggctcgacaccgaatcagatcgggcggggcgcgcaatcgtcggccctgatctaacggtgcctggttcccccaacatcttcgtgattggggacactgcttcatcagccactgcggacggaaagaccgttcctggaatcgcgccggcggccaagcaacaaggcaagtacgtcgcgggccagattgaagggctgataacaggggcgcggaggaccgctgcattcaagtaccggcaccagggcaacctcgccacgattggacgcagccttgcagtaatcgatatggggaagctaaagctgagcggaggaatcgcatggtggatctggaagctcgctcacatctacttccttatcggagtgcgaaatcgcctgagcgtcgcaatgagctgggtatggaatcatagcgttggatacagaggagctcgcatcatcctccgtgataaagcaagcaatgccacaagcggctcattggatgggaagctgaaatag

SEQ ID NO: 499260 - DNA, 1329 bp, Stenotrophomonas maltophilia
ttggcagatctattcacagcgaaaccaagggcacccctggccgaactgctacgaccgaagtctctcgacgagtttgttgggcagcagcacctgctggggccggggaagcctttgcgtcttgcctttgaagcaagaagtctgcactccttcatcatgtgggggcccccgggcgtcggtaagaccaccctggggcgcctcgcagcgatggtgactgacagtcacttcattgcgatctccgccgtactcgccggggtaaaggacatcaggcaggccattgatgatgcgcgggccgaactcgacgtacgcggtcgctccacggtacttttcgtcgacgaaattcaccggttcaacaaggcccagcaggatgcgctgctacctcacgttgaatcagggctactcacgctggtgggcggcaccacagagcatccaggactggccgttaactcggcgctgctttcgcgcgcgcaggtgtacacacttgagcctctgtctgacgcagatcttgagaagctctacgaacgcgccagacctcacttgcgaggcgttgacctctccgatcccgcattgcagctgctgaagggcttcgctgatggtgatggccgcagattcctgaatcttctcgagcaggtctcaactgcggcctctgagaagcgggtggaagaggtggatcttgagtttgccaagcgctccaccagcccgtcactgcgtcgattcgataagggtggggacgagttctattggcagctctccgcgtttcacaaatcactgcgtggctctgatcccgacgcctccctctactggctagcgcgcattctggatgggggcggggacgtgagccaggtcacacgtcgaatgattgttatggcaagcgaagatatcggaaatgctgatccgggcgctctgcacttggccatccacgctgcgcaggcgtatgagcgacttggctctcctgaaggtgaaattgtcttggcccaggctgcgacctatctggcgctctcccccaagtcgaatgcgtcctatgcggcttgggatctagcaagggccttcgtcaaggagcacggatcattaccagttcccatgcatcttcggaatgctccagcgaagcttatgaggcagatggggtatcgacaagcatatcgctacgcgcatcatgagccagacggctacgcagctggacagacgtacctgccggagggtgtggagaggccgaactggtatcggcccactgatcggggagctgagcgcgccttggctgagagacaggcatggcagcgagccttggatgaagaggcatcgcaaaccgaagccgatccctcttcgggccagtga

SEQ ID NO: 499261 - DNA, 2142 bp, Stenotrophomonas maltophilia
atggtgccggatccaaagctgagcatccgtgagcgtgccattgcttcgtggccacctgcatggcacgggcagaaccttcgcgacattctggtgacgctgggctacgacattgatagaccttggaaggaccttcccaagaaggaccgcgattggattctgtttaccgaggagtcgcccactgtgccggtctatgctgggttcacgccagcggagacgcgtgcggccctgaagcgtaagactgagccaagctacatgggaaccttcactggcgcccgtaggtatgtcctgcacacgtttgctaacacgcaaagtgccctgatgaggcgccgcgtatcgcgatacatggagggaaagctttgtcccacctgccatggcaagcgccttaaggcagagtcgctgtcagtgacatttgcgggtgtggacattggtcaattcatgcagatgcctcttgaccaactggcgtccctgctcgagcccatttctcgaggagacttcagtgctcatgctggcggggggaaggcgaacaaggaggccacccgtcgtgatcgcgccgatagggcggccagtgggcgggcggtccacgcggtgtctcctgacgtccgccgcacctcagcgctgtcggaggagaagcgcctggccgcgcagcgcctcgctagtggagtgatgagccgaatcagtcagttgcgtggccttgggcttggttatctaactttggatcgcgctacgccgacattgtccgctggcgagttgcagcgattgagactcgccacgcagttgagctcgctgctctttggcgtggtgtacgtgttggacgagccgtcggcaggccttcatccctccgacagccaggctctctatgacgccttggaccgcctccgcgacggtggtaattccgtatttgttgtggagcacgatctggagctgatgcgccgtgcccagtggttggtggatgttgggcctgaggcgggagagcggggcggcaaagtgctctacagtggagagccggatggtcttcgtgacatcgacgagtcacgtaccgcgttgtacctctttgacaaggtcccgccccctagtggccaagagcgtcaagcgagtggttggctggaacttcagggcatccagcgtcacaacctgaagcgcattgatgcaaagatacctttgggcatcctcaccgcggtgaccgggatttcgggatcgggcaagtccagcctcgtcgcccaggcgttgccggagctgatgatgcttcaacttgggcacgagcctgaggacgacgcggtggaaacgggggcagcagacgggccaaccgtcatcgagacgacagggggacacctcggcggagatgtcgatgctattcagcgtctcgtccaggttgatcagaagccaatcggacggacgccgcgatcgaatctcgcgacttacaccggccttttcgatcatgttcgaaagctttttgccgcaacaccagatgcgcggcgtcgacgttacgacgcaggtcgattctccttcaacgtggccaagggacgttgtgagacgtgcgaaggggagggattcgtgagcgtcgagctgctgtttatgcctagcgtctatgcaccgtgcccaacgtgccacggtgcgcgatacaacgaggctacgctgaaggtgctttggaacggtaagaacattgcagacgttctgcggatgactgtggaggatgcacgtgaattctttggcgatgaggacgcgatcgctcgcccacttcagttgctgaaggagatcggccttggataccttcgactgggccagccggctaccgagctatcgggtggtgaagcgcagcgaatcaagctggccacagagcttcaacggagccagcgcgggcggacactgtatgtcctggatgaacctactacgggcctccatgcctcggacgcggataggctgcttgtgcagctccagcggctcgttgattccggcaatacggtggtcatgatcgagcacgacatgcgtgccgttgctcaggcggattgggtaatcgacgtgggtccaggtgccggtgacgcgggcgggcagatcgtggcggcaggaactccaaaacaggtcgctcgcgtgaagagaagccgtaccgcccccttcttggctgaggaactcgcccgcgcgggttga

SEQ ID NO: 499262 - DNA, 960 bp, Stenotrophomonas maltophilia
atgaacagcgagctggatcttctaaagacgtttagggccgcggctgaggcgccgagctttcgtgaggccgctgttcgactgggaagctctcctcaggccatcacccgagcgatacaggcccttgaaagtcattacggggagctgttgttccaccgaagcacacgccaggttcgcatcacggcctttggggaggatctcttacatcagctgcggccggcgcttgagggcttagacaagctgtggcgcccgcgaaccaaggcgacggcctcacagattgtgggcacagtccgaattagtgcccctcacagcatgggctccagggcagttcttgccgccttggatacagtgacccaaagtcacccgggaattgtcttggacgttcgcttaagcgatcgggttgcagacgctgtcgatgaagggatcgatgtcggaatccgcgtcggcttcatgcgtgatagcagattcattgcgaagaaggcaggagagatgcgactgcacatcgttggctcccccgcacttgtagagagaatcggagcaccagcggagactagcgagctctcgcggtttccactggttgcgtcggtggacatcaatacaggcaggccctggccctggtacctggctggaggcgtacaggtggcgccgacagcaccggccttcattgcagacaatgccgacatggagatggcaggggtcattgcgggcttggggtttgcccaacttgctgattacatggctgccccactcattcagtcaggtgttctgcagcgtgtgatggaagaattcgatcctgccccgtggggcttgtacgtctatcggccacaacgcggcccagtctcacctcgcgtcagagtagttttcgatgcactccattccgccgtcggagcactaccgagccttatgcagatgacgccctcccccacctcggccctaacgccatccaaagcagggaagcgctaa

SEQ ID NO: 499263 - DNA, 408 bp, Stenotrophomonas maltophilia
atgagcaagttcaactacatcgaagagtactaccaggcattcaaccgcggtgatcgcgacgcgatgctctcgatgctcactgatgacgttgtgcacgatctaaatcaggggaatcgcgaagtagggatcgacgcattccgcgcgttcctgagccgcatggattcctgctacagcgagcagcttcacgacatcgtggtgatgtacagcagcgatggtgcgcgtgccggcgcggagtacgtggtgcacggactctaccaccacacggacgaaggtctccctgcagcggcagggcagatctatgttcttcccggtggcgcgttctttgacatccgtgatggaaagattgcgcgcgttaccaactactacaacctggaggactggatttcccaggtccacaaggcgccctga

SEQ ID NO: 499264 - DNA, 873 bp, Stenotrophomonas maltophilia
atgaagattgcagcagctaagtacgtgatcggtcgtccgaagacctttgccgagttcgctgcgcgccagcgccgaattctgaatgacgcaagggaacaaggagttgagcttgcagtacttccggaatacctgtcgctggaactgggttcgactcttccagaagctcttcagcttagcctgaggtccaccctggagtcgctccagatctatcagagcgcatggtgtgagctctatagcaccttggctgtcgaactgggaatgaccatccaggcaggaacgttcctcaccgcaacatcccatgggatgtatcgcaaccgtgcctggtggttcacagctgatggtcgcagcggatggcaggacaagcttcagcttactggcttcgagaagcaggcagttgtcatcgagcctggcgatcgcatcgcggcgtttgagcaggacggaaagcgtgtcgggattgcggtttgctatgacagcgaatttccgcttcctgttcgcctccagcaggaggcaggggtgcgcttgctgttggtgccaagttgcaccgacaccgacgccggtgccacccgtgtcgatgttgggtgccgagcgcgagcgcttgagaatcggatgtttgtggcaaaggcggtcaccgccggcgtcgccgactggagtgaagcgcttgatatcaacaccggtgaagcaatgatcctctcaccgatggaccatggcttccccagtgacggcgtgctcgcagcgacctccgacgatcaggagtgggcgattgctgacattgacttcgcagcgctcgaagcaagccgtgcacgagcgcaggtagccgtcgacaaggattgggatggtcagctccgcttccattccgttgaggtcctgaactaa

SEQ ID NO: 499265 - DNA, 1176 bp, Stenotrophomonas maltophilia
atgacgcatctgtggaagccacttcttcacgaggttgcctcaggcgcgttggatgccgcagaaagtgagctcaactatctcgcccaggctagctggaatcacttccagtttcagttggggcggatgacgggtttggatcagaagtccagaaagatcgagcttgccccactgtacgatgaggagggcaacgttattgcgccccgtcgctcgatctcctacgacaccctggtgatcagcgtgggtagcggaacgaacgactttggaactcccggtgcagcggatcattgcctgttcctggacgatcccgatgccgccattgctttccagaagcggctgctgagcgagtacatgggcgcgcaagcgcgtggcaagtcagaaacactggaggttgcgatcgtcggcgccggtgccaccggtgtcgagctggctgccgagttgcgtgatgctgcgaggcaatttagcgcttatgggctggacaagatctctcccgagaatctgaagatcacgcttatcgaggctggtccgcgagtgctgccagctctgccagagcgcgtgagcctgccggtagccgagcgacttgtacatgaaggcgttcgtgtcatgtgtggctcggctgtcaccctggtggatgaagagggcctgcaactcgccaatggcatcaaggttgctgcgaggctgaaggtatgggcggcgggcatccgtgctcccgtcttccttgcatccctcgggaacctcaagaccaatcgcatcaaccagctcgaggtatctgaaacgctgcagacaacgcaggatccgaacatcttcgcattcggggattgtgcagcctgcccgaatggacacagcggtacaaacgtgcctccaagggcacaggccgctcatcagcaggctcacttccttgcgctggcaattgcccgccgtatcgaggggcgcccgctgcccagcttcacctatcgggactatggatcgctggtgtccctgtcgagggagggcgccgttggcacgctgatgggcaacctcatggggtcattcaaggtcgagggctggctggccaggatgttctacatctcactgtatcgcatgcatcagaggagcctgttcggtacacgccgggtggttgctcgcatgctggcagacgcattgggacggagtacggagcctcgcctcaagttgcattga

SEQ ID NO: 499266 - DNA, 282 bp, Stenotrophomonas maltophilia
atggccgtctatgtagtgacctggaacttgaaccgcgaagcgaactacgaagcaaagcggacagcgtttctgaaccacctgaatcggcacgaaaacgtcgccgatcccggccttgagaccgtgcgatggatctcaacgagcctatccgccgacgctctatgcaccgatctcaggcagcgtcttgatgggaacgaccggatctttgtcacccatgtctacacaggcagccaccaaggctacctatccaacacgacctgggcatggatcaatcagcggctgtga

SEQ ID NO: 499267 - DNA, 1095 bp, Stenotrophomonas maltophilia
atgagcgacctcctgccaactctgaccaccgcggctcctgccaaaccgaccgtggcgcagctctcgcagtcctcggcggacgcggtacgcgaagtcttcgccgaagcggcctcggccaacaccacgcgcagttacgccaccgcattgcgctactgggcggcctggtaccaaggccgctacggagtggtcatcgccatgccggtcgacgcgtcttgcgtgatccagttcatcatcgatcatctggcccggcgctcaggcgacgccctgacctgggagctgccgccgacactggatgcgcttttggtagaaggcaaattcaagcagcgccaaggaccgctcaagctgtcgaccatcgtccaccgcgttgcggtgctctccagcgcccatcaattgctcaagctggccaatccctgcgaaagcagcgaggttcggcagctgttggccaagggccgtcgcgccgcacataagcgcggcgagcggccgagcaagaagacggcgatcactgcgaccgaattgatggcgatgattgcgacctgtgaggacgatcttgttgggaaacgtgatcgtgccctgctctactttgccttcgccagtggtgggcgccggcggagcgagacggcccatgccgccttgagcaagcttgcgccgatcgacggcgggtacctctaccacctggatgtcggtaaaacgcttcaggagggcgtcaaagcaggcggctcgccggacaagcccttgttaggtccaccggccgaagcgcttcgcacctggatcgaagcggctggactgcaggagggtgccctcttccgccaattaacacgcgggaaagttggggccggcttgtcaccgaagtcggtggccaccatcatccagaatcgcgcacgcgctgccgggttggtggggagctttggcggtcacagcctacgatcgggtttcgtgacggaaggtgctaggcaaggaattgccctgccagccatcatggcaatgaccgatcaccgatcggtggtgagtgtaattggctactatcaagccggtgcagccgaaacgaatccggcggcccgaatgctggaacgctcaataaagtcaacttcggattga

SEQ ID NO: 499268 - DNA, 1131 bp, Stenotrophomonas maltophilia
atgaccgcaatcgatcatcggctccagaagctgcgcgcccggcgatcgggtgctgaccgctccgccgcagttgccgcggatcaacaggtcgagatcctccgcaagcagctcttgggggaggcctatgagcggcgggccgggggcaaaccatccacccgctacgccttgggcgccatgcaggaggtcgatcccgactacacgcgcatcagcgtcgagaccgccagccgggtcgagaaccaactgcgacagcggttggcggccgaaggactcggcaccacctatcgtttgcagggttcggtgccattaaatgtgcatattcggggcgtcagcgatgtggatctgctgacgattgggctgggttcgttgtattacgcgccaggcggtgttcgggcccagcgcggagcttactccccgccggttcgcgacaccctgctgttgctgcgcgatctacgtcgcacgagcgagtctgccttgcgcgccgcctttccggcagtcgacgtagatgcgaccaatgcaaaggccgtcaagctcagcggcggctcgctagctcgtcctgtcgatgtcgtccctgcggtgtggtgggatacgttgcagtaccagcttagtggactggaatacgatcgtggcgtctctatctaccacaagttcgaccacgttacgatcgacaacttgccatttctccatattaagcgggtgtcagaccgagatattgtggcgttcggcggcctccgcaaagcgatccggctatgcaagaacgtcaaagccgacgcagaagaggagggcacgatgatcggcttatccagctttgagatcgccggcttgctctatcacgcggacctggccgcactgcgcgccggcgcgcaatgggagctggcaatcctgacggaggcgcaacggcacttggattggtgctatcacaatcccaccgaggctcaagcgctgatgacgcccgatggttcgcggcgcatcctggatacgcccgagaaagctgccgcgctgtggcgactatcaatggagatggacaagctgttgcggcaggtggcgcgggaacaggattcgaccctgtacatgcaggaatcccccagcctggagaacagtcgacgcgcggtggagcatgtgatcgtccaatag

SEQ ID NO: 499269 - DNA, 675 bp, Stenotrophomonas maltophilia
atggcgcggcacattagtgactcaagcaatggggcagaaggcatgaggagtcatgagtacgtcctgctggacgggatcagtcgagcgaagatcggccgttacttggggactgcggcagccgccatttcagcgggcattgtctacttggtcctgcgggtgatcgatctggccgcaaggtacggcctacctgcgcacctgacgccctcggtaatggcgctcatcggtgcgggggccgtgtacctgatcctctattggctattcgaccgccacctctggcgaattccttggctgtcacggctgctgaaagtccccgatctgcaggggcagtggcgctgcgaggggacttcgtatggcggggcggacgatgcgtcggcgcgagactggaccggtacggtgtctattgcccagagctgggatcgattacgaattcgcttgaccaccgagcaatccgggtccgatagcgtggtcgcggcactgatgcacgatgaagctggtggctaccggttgttttataactatcgcaatgatgcgcgtatcgatcaacctaatcttgccaatcacgtaggcttctgcgacatgactgtcagcgcggaccaacagcaggccgaaggtgactatttcaatggtcgagggcgtgcgacctacggtcgaatgcgctggaggcgccaatcatga

SEQ ID NO: 499270 - DNA, 717 bp, Stenotrophomonas maltophilia
atggcaaacatcgcaacttcgatccacatcgaaaacaatgacttgctctctctgtgcgaagatttctatagaagcctcgaccaggtagccaaagttgcaattggcagcacatacacgcaagaacttttgtcgctggtcgaactcagcgggttcgctaggctaagcgacgattttcctgatggctacacaaccatcataagcgctgatgacctcagtgcgtatcttcgaggcggagagtatggcgagatggtacgcaggcagtgcgttgtaagcatctgcgcatgcacagaggctttcgtaagctcgctgttcccaatcatggggctagaagagtcagatggagaaaggtatggcgagttcgcaaaggaatttaatgttgatgtgcaaaacggcaacaaggtgctcaggaagatctattacatctacaagcatctcaagctggcactaaagtttgaaacgtccaactgggaaactacgcagtgcccacgcatgttggacgagatgtttacgattcggcacaccatagtccatttcggcgggatggtgaaaaagccggcgcaccgcgaaagaattggcaggttatttaggcccgatggcgacgaattgtcgctcagcccgaattcaattgacgacttcattcatcgtgcgaccataaaccttcatggccttataagaaaagttgatgcatacatcactcatatcaacaagaatgaatga

SEQ ID NO: 499271 - DNA, 276 bp, Stenotrophomonas maltophilia
atgacctccgaaatcacagaaatccttgatcgcctccgtgcatgcgaggccgtgcttgagatgcaccgcggctacctaaaggcaatggagtatgcgctgcgggtttcgtttctaacacaccaagatccgggggttctgctcgacacgtggaccagattgctcccctcgatcgctcaaagtcacgagagagacggcggccaggaatttgcggccgcatttcagcaatcccttacagttctcactgagcagatcggcgccgagtgcaatatgccctag

SEQ ID NO: 499272 - DNA, 417 bp, Stenotrophomonas maltophilia
gtgaaccggggggcgcgttgggaagctggcgcagtcctcgccaaggggctactgatcctggccttttttgtcttcatcgtggtggaggtggtcagcaagctggtccacggcgtgccgccttccagcggcttgatgctggggttcggagccatcgcgctgatggccaatctggtgtgcctgacattgctgtggcggttccgcgcgctcaacatcaacatgaaaagcaccttcgagtgctcccgcaatgatgtcgcagccaacttcggtgtactagtggctgccgttgtcgttgcgctgaccggacgcggctggccggacatcgtagctggcgcggtgatcgccctgctattcatcaaatctgcactggaagtgattggagaagcatggcccgcgtgtcgtacaacgacgaaggagtga

SEQ ID NO: 499273 - DNA, 195 bp, Stenotrophomonas maltophilia
atggaccactgctgcggccacaagcgccaggaactggaagccttggctctccatagtgcgcagcgacgcgtactagtggcggtgctcgtcatcaatctggtgatgttcctcatcgagttccgcgcgggcatcgtggcgcgctccagtactctgcaggctgatgcggtggatatgctgggtgacgcaatcgtatag

SEQ ID NO: 499274 - DNA, 405 bp, Stenotrophomonas maltophilia
atgtccaaccacctaaccatcggccagctggcccgcgagaccggcagcaaggccgaaaccatccgttactacgaaaatatcggcctgctgcagccgccgctacggtccgtgggcaactaccgctactacggcgcccaggaccagaggcgcctgtcgttcgttcgccgggcgcgggaactgggcttctccatcgagcagatccgcgagttgattgcctttggtgaacagcgcgagcacgagtgcagttcagtggatgacgtggtgaaggcgcatatcgccgacatcacacgccggattcgcgacctgcaggcgctgcagggcaaactgaagcggatgatcggcaattgcccgggcggccgcgtagccgattgcagggtgctggaagcccttcagtcgcagccatga

SEQ ID NO: 499275 - DNA, 1482 bp, Stenotrophomonas maltophilia
atgaattcactgaatcgtgccgcgcttggcgcggctgccggcggctgcctgttgctggcctccccctctgtgctggccgcggctggcgataccgaagccggattgcgtgcgcaggtgcagcagcaggcaaagcaactgcgcgagcaggcatcactgctggagcagctgagcgcacgcctggctgcactggaggggaccgctcaaagtaccggcgcggcacccagcagcggtgcgggcgtcgatgcgcagctggctgcggccatcgctgacacccgccaggacgacatggccattctgcaggcacaggtggcacagctcgccgcaaccggtggaggagggggtggcaatgtgcgctggcgcaagggcggccctgagttccgcagcagtgatggccagttcaccttccacccccgcggccgggtgatggtcgatttcagcagtacccacggatccgcgttcgacgcacgcaacatcaccggcaccgacctggccagcggccgcctcggtgccgaaggccggatgggaccgctgggttacaagatcgatgcggactttgcgggcaacgatgtctcgctgaaggacacctatctgtcctgggacacgcgggtgagtggcctgccaacggaaatctacgtgggcaacaagctcaaggaccgtggcctcgatggcagcaccagcggcgtcaatacgcctttcatgcagcgcaatgcggtggcgtcggtcggagcccagcagagcgggtactacgggctgggcgtcaccacgaaggtgatcggtgatggctggcacgccagtgtggcggtgaccggcgacgatatcggcaatgacagcacggccagcgacaccgttgcgtatctgctgcgcgcacactggaacccactacgcgggcaggcaggcttcgtgcatctggggggctggtactggtacgagaatctcggccaggacgtgggcagcatcaacaagacctctccgatcgcgctgggctggaacggcaacgtgcgcgtgtcggccagctccatcgccaacgtcaccgacaaccgcgcctgggggctggagctgggcggagtgtatggtccggtctgggccttcgccgaacaaaccacccgcaccatcgagtcacgtacggtcgactcggtcgaccagcgggcgacatcgatctacgcaggctggctgatcaccggcgagcgccccggattcagcagccgctccggggtatggggcaccacacgggtattgcgcccggtgcaggaaggtggcgttggcgccttcgagctggctgcgcgttatgaccgctacgactttctcgatgcggcccggggcggcgagggcaccgcatggacgctcggggtgaactggtacctcaacaactggtcgcgcctgatgctgaactatgttcactggaagaccgacaacaaggtcggcaacgcccaggggcctgattccggcaataccatgggcgtgcgagcgcaggtttcgttctga

SEQ ID NO: 499276 - DNA, 1029 bp, Stenotrophomonas maltophilia
atgagtctgcatgcggggaagctgcgcgggctggcagtgcttctgatcctgctgaatccattgcttgccggcgcggtgccagcggcgccgcctgcactggcacccgaggtggttccgctgtggccgcaggaccactggcagcaacgcgcgcgtggaccggaacggaccggcgtcgaaggcagcgcgaagggcgcggtctcgggaatcagcgacgcgcgcatggagatctaccgaccgctgaaaccgaacggaacagccgtggtgatcttcggcggcgggggttacttccgcatccagatcggcagcgccgccaagccgaccgcgcagtggctgcaatcgctgggtgtcaccgcagccgtggtgtactaccggctgcctgccgatggatgggcaccggtttcgccgttccaggatggccagcgcgccatgcggctgctgcgcgcgcaggccgcaagcctgcgggttgatccggagcgcatcggcgcattgggcttttccgccggcggcaatctcgccgggatcgttgccacgcgcttcgatgcgccgttgtatccgccggtggatgcagccgaccagctgtccgcgcgtccggacttccttggcatgatctatccggtcgtttcaatgcgcgcgccgctggaccacacccggtcgaagcgggaactggccagccaaggcgacgcgcagcaggcctattcggtcgaacaacacgtccgcaaggacatgccgccggtgttcctggcccaggccgtggacgatcgcaccgtcgatgtcggccacagcgtggcgatgtaccaggccacgcatgcggcaggcattccggtggagctgcatctgttcgaagccggaggccatagctgggggctgggcaagcccggaacattggtggcgcagtggccgcggctttttgccaactgggcgcgcagccacggctacctcgggccgccgcttgcgcggctgcagccgcacgatgccagcgcgatacccgccgctgcagctcagcttgacgatgatggcgcgggcgactga

SEQ ID NO: 499277 - DNA, 1488 bp, Stenotrophomonas maltophilia
atgctagcgatgctgatcgtcgcccaggccgttctttacgtggaggacagcgagtccacagagaccattgctgaagccgtcgtggtccgggcagagactgtctcgcaggcaagaagggtcgcttcagacgcggcgctaaggtctaccttcgcgttgtgttccgacgccgacattcgagcactcaaggaagtcgctttcgattccagttatatgagtgacgtgggccggatccaggatgatcacctgctgtgcagtgcgctttggggaaggatcgttccgttcaagcttcctgcgccgcactattcatcgggcgataccaagctatggaatacgtccgatctcgttggctcgccttacggaggcaccaacctgatcgcccagggccggacattcacggtgtcatcgccctcgtccttcgatggcttggacccggcgagaaccagcacattcactgtcgaaacgcgtgatcgctcctatgtgttccggagtgtggagcctgcagcggacgccagtgaagccacatcatcccgcatacggctgagccgatgcagcaacaaggcaaacgtctgtgcattcgtatcacggccccggcggggcatctgggaccttgccccctctctgctctacaccatcatcggcataggtgccgcgcttggcattaccttctcgtacctcctaattcgtcgaaacaggaccgcaaggcagacgctccagcagcgcttcagccttgccatgcgccgaaacgagatcgagttggtgtatcagcctctatacaccgttgtggataggcaccttgtcgggttcgaagtgctaagccgctggagcccagttggcgaaggcgaaatatctcctggcatcttcgtaccaatggcccgccaacttggcctgagttcagatcttttccggtacgtactgtcgaaggcgctgagagagatggcaccggccctcgccggcgagaatgcaccatacctgagcataaacgctgagcccgttgacatggcttcggaggacactgttcgtttcgtcgtaagcgtcacgcagcaggccggtgttctaccggatcaggtcaggatcgagatcaccgaacgtgaggaactggtctgccctggcgtaaccgcacacatggcagcgttggcagcattgggattccgattcctcattgatgacttcggaactggcagctccaacttctcacactttgcccagtcccccttcatcggtatcaagattgaccgcatgttcgtatcggccatcaccgaggaatcacccttgcgcccggtgttgccgggcatataccagatcgctcgccagctcggcctggaggtgatcgtggaaggagtggagactgcagagcaggatgcattgctgcagcagatcgcgccttctgcagtaggccaaggatggctatacggcatgcctgtcccggctgaagccgccgctgtcctggccaaatcacacaatggcgacgagccattcactgacccgtga

SEQ ID NO: 499278 - DNA, 459 bp, Stenotrophomonas maltophilia
atgtggccctctttcaaggcaaagaccatgcccattcgggccgttgtatacgcaagcgaagcagttgaaggtctttcgattgatcagctggaagcgctcgtagccgatgctgcgaggttcaacaaagttgcaggcgtgacgggagttctgctgtacgacggagctagattcgtgcagtactttgaaggcccggaagatggggtcgccagcgtctatgagcgcgtgctgcaatcgacgagccacacgggcgtcgtagaactggcgagaggccgcgtatctacgaggcagttcccctactggtcaatgcatcggcttcccgccgatcagctgctcgtgggcaagctggcaagggccgattggtcgcgcttcaagaagagtgagcctgaggaaattgctggatcggtgtggggaattgatgtgctggccgcagctgtagccccctacgtgcaggccgcatag

SEQ ID NO: 499279 - DNA, 312 bp, Stenotrophomonas maltophilia
atgttcaagcgaggggaagacgcgttcctggtgctggagctgcgtgtaagggagtgcgagcgccgtattgcaaagtccgatggccgaaccagggcattggaatgcgccatgcgggcggttgtctccagcgcttccaatcccgcggccttgcgcgccgcgtgggcgcaactgattccgatggtcgtggagagccatgccgacgagcgtagagaagcgaccaacgactacctcgatggactacgccaaggcctcaagttcgttgctgagcagattgacgcggccgcagaacgaccctgccctcctcggagatag

SEQ ID NO: 499280 - DNA, 1578 bp, Stenotrophomonas maltophilia
atgaaaatccgcaacgacatcatcaaggtctacaaggacgtgcacatctgggtcggcatccttgctggcctgatgctgttcgttgccttctatgccggctcgatcaccatgttcgagaagccgctggagcgatgggccacaccgccttcaacactgtctgcacccgtgccgatggcacgcgcgccggacctgttggtggccgtgctgaaggcgcaccccgaggcggcgaagaactacagcgtgatggtgcagacctcgccggaggcacctgcccgggtgatctggcgagtacgtggcgacaagccgcggcagttcaccgaatttggcgcaagcttcgacgcgaaggggcggcttcaggtggagcagctgcgcaaggcgcccgtggcgcagcttgttgatacgctgcaccagtttgtcggcctgccgttcccggatgcggtttcgcgccccatcatgggcatcattgcgctgatgtatgccgtggcattgatctccggcgtcatcgtgctgctgccaacgctggtgaaagacttcttcgccgtaagggtaggcaggaacatcaagcgcatgtggctggatgtgcacaacgcgctgggcattgtcagcctgccgttccacctgatcatggctgtgacctgcgtggtattcgcgttccacgatcagatctacgacatccaggacaaggtggtttaccccaacggcatccaatggggcgaggagcatgacgccgggcccgctccgggcgcccagcctctgcctgcgccggcactgctggaaaaggtagaggcacagctgccaggtttcgaggtctacagcctgggcttccagcagaagggcagtgtggtcgaggggcgggtcaccggcctggatatccgctacggcacccgcgcccgcacctacatgagcactcatctggatccttacaccggcgaggtggatgcgcatgatctccccggccacatgggcggttgggatacggcggtcaatgccttcttcatgcttcacttcggcagctttggcggaaacccagtgcgctggatgtacctgctgcttgggcttggcggcgcgatcgtgttctacaccggcaacctgctatggatcgagtcacggcgcaagaagcagcgcgatgccaacctgccggagcagaagcgatccacccgggtgctgggatctctgaccatcggagtgtccctaggctgtgtcatcggcgtctcggcaacactggccgctaccaagtggctccctgggctggttgccaatgtcccggcatggcacgaaggcatctactatgtggccttcctgctggcagtggcctgggcattcctgcgtggggccgcgcgctccgcttatgagctgctgtacgttggcgcgatagtgacggcactgatcccggtcggcagccttgcggctttggccggcgtccccggcacctggaaccattcaagtgcgggggtggcggtggacgcgaccgcgtttgtcgctgctgccattctctggcaactggcgaggcaatccaggaagcgcgcaaaggtcggccacaaggacagcgtttgggccatcgaagggaattcgccctag

SEQ ID NO: 499281 - DNA, 300 bp, Stenotrophomonas maltophilia
atggccagccctgacaagctgcagagccggcactggttcggaaagacctgcgccggcgtactgctgggcttcgggctctccctggccttgtccggcctctttgcctggttcgggcccggcggcattgatggcggcggtggcaaagcccagttcaacatgtggctggttgcgctgctgtgggcacccatcctgtcattcgttttccttttccgtagcagcgcacgcgcctggctgtggctgggcgctgccaacgctgtggcctttggcgcgctctggctggcgcgaagccatctgggctga

SEQ ID NO: 499282 - DNA, 294 bp, Stenotrophomonas maltophilia
atgtcagtcgtgatagcgttgctggcttcagccacgggtgtggctggggcatggctgttctatctggcgtcaccgaagcagcagtggcggcgcgccggaccttggcctgtccgcgggaaatggattcccggcagcaccttgtcgctggtctcgctggcgttgttcctgtctttgatgggaagcggtgcggccttcttcacctggttgacgatcctgatgctggtctggtcggccgcgcccttcctgggtgtctggcgcgcacgaaagcgtggaggtgcccatggccagccctga

SEQ ID NO: 499283 - DNA, 2229 bp, Stenotrophomonas maltophilia
atgtccaagatcacccttacctcccgagtgcccatgcgcaccctgttgtccacttccgttgccctgatgctggcgttgccgctggtggggcacgctgaagattcatcaccgcagacacccgatggcagtgccaccacgctggatgccgtgcgggtcaacgcttatcgaacgaccacccacacctccggcgcgaccaagaccgatacccctgttgccgaaatggccaaatcggtttcggtcattgcccgcgaggagctcgacgcccgcggcgtgcagaacctcaacgaggcaatgcgctacgtggccggcgttgtcctggaaagcggcggcatcgacaaccgggtcgacgacttccgcatccgtggcttcgatgccggcagctggagcaacaacgtcaccatcgacggcatgcgggcgccgcagggtggccagtggaaccggaccatggtggacagctggaacctggagcgcgtcgaggtgctgaaggggccgtcggccgtgatgtatggccaggtggctccgggtggcatggtcaaccaagtcagcaagaccccgacccccgaccagcagcaggtgctgcagttgggcctggacgggaacggtcagtacagcagcgcgttcgatgtgggcgcagcgtcggacgacaagcgccatctgggtcgtctggtgggcctgtatcgcgacggtgatacgcagatcaagcacacccagcaggagcattggttcctggctcccagctataccttccagatcgccgagcgcacccgtctgacggtgttgggcctctatcagcgcgacgacggcggctcgacctaccagttcctgccgatggacggaacgctcaaggccaccccctatgggcgcatgaagaacaggaccttcattggcgaaccgaactggaacacctacgaccgcacgatctggacggccggctggctgttcgagcatgccttcaatgagaactggaccctgagccagggcgctcgccacaccaacgttgaatcgaccttccgcaccgtagtgaccaatggcggcctgaacccggacggacgcacccagaagcggcgcgccacctggggcgagggcgactcccaaggcgacacgatcgacacccgcattaccggcaagttccagaccggctcggccgaacacacgctgctggtgggtgtggactggcagaaggccgattgggatgcggcgcgcggtgcgatgcgtgatccggcgccgatcgacatcttcaatcccatctacaccggctatgttccggtcaccaacagcatcagttattccggtggcgtgaaccgccagaccggcgcctatctgcaggaccagatcgcgctggacaagtggcgcttcaccgtgggtggccgttatgactggaccaaggacgatacctggacgcagtcgtacaccgtcgccacggaccgctacggcgcacgcacgcccagccgcatcaagaacgaagccttcagcggcaacgcgggcatcctgttcgtggctgacaacggcctgaccccgtatctgagctacgccgagtcgttccagccggccggcagcacggctacccagtccttcgaccgggcgcccttcgacccgatcaccggcaagcagtgggaagtgggcgtgaaatatcagccgtctggattcgatggcctgatcacgctttcggcctacgatctgcgccagcagaacatcctgaccaacgatccggatcctagccacaacacctgtggcaccaccgggtccagccagtgccaggtgcaggatggcgaaggtcgcgtgcgcggcgttgaactggaaggccgcatcaccccgctggatggattcagcgtgatcggcgccgcatcctggatggactcggaagtcaccaagagcaacaacggctatcagggcaagcagttggcgatggtcccggactggactgccgcgctgtggggcgactacaccttccagggcggggcactcgcaggcctgagccttgccgcaggcgtccgctataacggcgaaagctacggtgacagcgccaacgtctacctgattccgtcctacacgatgtgggatgcggccatccgttacgacgtgggcgcgatcggaagcgtcggcacgcagttcgcgctcaacgtcagcaacctgaccgacaagcgtttcgtgaccacgtgcagcggtgtctcctcgtgcttcttcggcacgggacgtaccgtcacggccaccgcccggttcacctggtaa

SEQ ID NO: 499284 - DNA, 303 bp, Stenotrophomonas maltophilia
atgaccactacgtcccctcctcgcttgctgacagccacagaagttggcgtctgcatccgccagctccgtgagcagcgccgctggtcacaggagcaactggctgtgatagcaggactgaatgtgcgcgccattcagcgggttgaacagggcaaatcggccagtttcgacattcgacgcgcgttagctcacgcccctgaactcagcgacatcgacgcaatcagtaagcccttccggctgcccacgaccgaggaactgcaggcgatgcaggcacaggtcgaggaccgagttcgccactctgattga

SEQ ID NO: 499285 - DNA, 618 bp, Stenotrophomonas maltophilia
atgatactaatcactaagctcgtcgtagtcatcgtcgcgcttgccgctgggatcaaggtgattgattgctgtgtcgtgtgggcagcgcgacgaaggctggagaaacttcagaagctaaaggcgccggccccatcgagatctcctttacccgatgccctggtggtctactactctcgctctgggcacaccgccttagcctctagttatctggcggaccagttacacgccgatctgcgtgctgtcgaagcatttgactactcattaggcttggccgggtgggtgaatgctatggctgatggggggcttgatgacgcgtggataaatcccgcgtggatggatctagctccctatgacgctatctatttgggaacacccatctggcgtggttgcccagcgccgccggcttgggagtttgttaggagcaacatgttccctgggaaaaaggtcgtactagtcactacatccagaggatcatggaagcagtcagctattgagctccttgggcgagagatagttcgacgaggtgcgcgatcattcgagcatcggcctttggcgcgcaagcgtgcctggttcagaagatcggacccagatgatctcagaattacggatctgatgtga

SEQ ID NO: 499286 - DNA, 966 bp, Stenotrophomonas maltophilia
atgcgcgaccacccgccgcagatcagcttccgcgtcgacaacgacctgttcggtggccgccaccaagaccagggctataccaacggcgcgcagctgaccctggtctcgccgaacctggtcgactacaccgccgacccgtgcctgccgcgcatggcgcgctgggtgaaccagtacctggaaggcctgcaccccggcaggttcgagcagcagaacatgatcttcagcatcggccaggccatcttcacccccaccgacccgacccgccgcgacctgatcgaggatgaccggccgtatgccggcgtgctgctggccagcttcggcttcaacgcacgcagcggcgaccgcctgcagaccatccagctggccgtgggcgtggtcgggccctgggcccagggcaggcaggtgcagaacgccgtgcacgacgcgctgggggacgagaagttcaagggttgggacaaccagctgcacaacgagccggtgttcatgctgacccacgagcgcatgcgccgctggcctgccgatgccagcgtcaatgccagtggttggggctgggatgcgatcagccactatggtggtgcgatcggcaacctggaaaccaaggccaatgccggtggcgaagtgcgcttcggctggaagctgccggacgatttcggcagcactccgctgcgcccggccggcgagaacaccgcgcccacccgtggcggccgcctcagcgcctggtcctggcacctgtttgcgaccaccgacgcggcatgggtgatccgcgacatcaccctggatggcaacaccttccgcaacagccacagcgtggacaagcgccacgtggtcgcccaaggcggctacggcatcgcggtgatgcgcgggcgctggaaattcgcaatggcgcgttaccacagcacccgcgagttctatggccagcgccagtcgccggtgttcggaagcttcactattagccgctcgctatag

SEQ ID NO: 499287 - DNA, 708 bp, Stenotrophomonas maltophilia
atgtcgcgtgcgctgcgcctgacccagttgctgcagctgctgcgccgccatcggcggccggtggccgggcagacgctggccgaagcgctgggcatcagcctgcgcacgctgtaccgcgatatcgagaccctgcgtgagcagggcgctgacctgcgtggcgaggccggcgttggctaccagctggcgccgagcgacaccctgccaccgatgaccctgccgccggccgagatcgatgcgctggtgctgggcctgcgctgggttgcggcccgtaccgaacccgcgttggccgaagccgcacgcgatgccctggcgcgtatcgcgcatgtgttgcccgcagcgcggcgcgaggccttgcgtgacagtggcctgcgggtgggcccttcgcgtgcggcggccaaggttcccccagctcgtctgcaggccgtgcgggaggctgtcggttcacagcagcgcctgaagttcggctacgaggacgcgcacggccagcgcagcgagcgcatcgtctggccgttcgcgctgggctacttcgatgaggtgccgatgctggcggcgtggtgcgagcgccgcgaggatttccggcatttcaggctggaccgcatccgtcaggtgcgtgtgctggaggatcactacctcgtgccacgcgccacgctgctgcggcgctggcagaaggcgcagggcatcgcgccggactggctggatcgctcataa

SEQ ID NO: 499288 - DNA, 636 bp, Stenotrophomonas maltophilia
atgcgcgtgatgttgctgggggcgaccggcctggttggcgggctggccctgccgcggctgctggacgacccgcgctgcagtggtgtggtggcgcccacccgccgcccgttgggcatgacccacgggaagctggagaacccggtattggccttcgacgcgttgcccacttcgccagcatgggcgcgcgtggacgcggtcatctgcgcgctgggcagcaccattgcccaggccggcagccgcgaggctttccaccgcatcgatcatgactacccgctggcgttcgcgcggctcgcacaggcacaaggtgcgcagacttatgtgctgaattccgcggccggtgccgacccgcagtcgtcgatcttctacagccgggtgaagggcgagctggagcgtgacctgcgcgcgctgggcttcaacgcgttgaccctggttcgcccagggctgatcgggggcgagcgcaacgaggtgcgtcgtggcgagcgcctggcgctgatggtgctgggtgctttggggccgatgttgccacgggcgtggcggatcaacccggcgagcgagatcgccaaggcactggtcgagtccgcgctggccccgcagccgggtgagcacgtggttgcatcgagcgcactggtcggctga

SEQ ID NO: 499289 - DNA, 2421 bp, Stenotrophomonas maltophilia
gtgtcttctttcctgcgatcgatccgtgcacgggggccttggctggccctgctgctgtgcactgccttcctgctgtccgcaccggtgctggcccaggatgaggaccccacgccgaagcagcaactggcggacatcgattccaggctgaaggaggtcgagcgcaagcggggcgatgcagaggccatcgagacactggcgatgctgtccgagaatgcctcgcaggcccggcgcgatgccgaagcgctggagaaggcgttgcagccgcagctggatcggatcagcgaacagctggcgcagctgggcacgcctgcggaaggcactaccgaaccgccggaactggccgcgcaacgacgcaccatcaccaaacagcgcgacggcctggccgcgtcggtagcgcaggccaaggccagtgccgtgcgtgcccagcagctggcagccgacatcgaccagcagcgcactgcgcaacgcgccgaagacatggggaagaaggtcgcctcgccgttgtctccggcgctgtggagcaaggtggccgagcgcttgccgatcgatatcgcacgcgtcgcgccgttggccgagcaggggcgcgatacgtttgttgctggtgtccgggccaatggctggggcacgccgttgctgggcctgctggcctctcttgtgatgatgttcccgctgcggctgtggctgcgcaggctggggcggcgctttgcggcgtccgagcgtgcgccggatggtcgcctgcgccgctccggcctggccatgtggttgttgctggtcggtacgctgctgcccggctatgccgtggtggtgctgatggcagcgctcgatgcgatcgatgccatcgcgccgcgcctgcaggtggtggccgacggcctggagacggccaccttccgcgccgccttcatcgcggcgctcagcgcgtgcatgctggtacccaagcgtccgtcgtggcgtttgctgaatctggatgacaccgccgcactcaagctgcgcaagtacgcgtggggcgcggcggcgctggcctggctgagcacggtgctagtcgccctcgatcaggccacgcgtaccagcgacgtcaccacggtggcgctggacggcctgattgcgctgacctacctcggcctgatcatggccatgctggtgaccctggcacgcctgcatcgccggcagaccgccgaggccgaggccaagctggaggcacaggccgatggcgtgggcgcggccacgccggtgcgtcgcagcagctggctggtactggcccgggtagcgggcaacatcgcggtggtggcggccatcatcgccacattgctgggctacctgaacttcgccaagttcgtgaaccaacagctgatcggcggcagcatcgtagtgctggccgcgaccctgctgttcaagttcgtcgatgacctgagcacctggatgctcaacgccgacagcaaggttggccagaccatcctgctcagcaccggcctgagcgtatcgcggctggagcaggccggcgtgctgctgtcggcggcgttgcgtaccatcgtcgtactgatcgcgctgctggccctggtggcaccgttcggcaacatcggcgcggtggtggagcgcttcacttcactgttcacgaccggattcgatatcggtggcaccaagctggcaccggcggggatcgtgttggcggtactggcgctgctggccggcctggcgatcacccagctggtgcagcgctggctgaccgacacctacctgcccaagaccgaactggatctgggcgcacgcaattcggtcagtacggttgcccgttacgtgggcatcatcatcgcggtgatctgggcgctgagcgcgatgggcctgcagctgagcaagctggcgttgctggtcagtgcgctgtcagtgggtatcggtttcggcctgcaggtgatcacccagaacttcgtctccggcctgatcctgctggccgagcgcccggtgaagatcggcgactgggtgaagctgggcgaccaggagggcgacatccgccgcatcagcctgcgttcgaccgagatccaggtgggcgacaagtcgacgctgatcgtgcccaactccgagctggtcaccaagaccgtgcgcaacatgacgatgggcaacaaccagggccgcatccagatccagttcgcggtgccgcccagcaccgatgtcggcaacctgcggcaggcgttgctggatgcgtacaccgcgcataccaacgtgctgaagcagccggcgccgacggtctacatcgacagcattgccggtggccagatcaccatcaacagcttcgcgtacgtggccagcccgcggcaggtctacgccacccgcagcgatctgtacttcagcctgctgcagatactggcggagcggaacattccgctgtcgaccccgaccgatatccacatcacccgcgatccgcaggagtag

SEQ ID NO: 499290 - DNA, 249 bp, Stenotrophomonas maltophilia
atgtaccaggtaatcctgttgaagagtgaatccgcgttcgcacgcgagcagtggccgcagattgatgacctggtcgactacgagggcgtcagctacagcctgcgtgccggcccgcgccagccgctgcccaccgaccacgactggcacccggtggcggtgtacgcgcccgatgagatcaccgaggaagagttccaggactggtacgcgctgcagcagccggccgtcgaagagctgcgcctgaagtactga

SEQ ID NO: 499291 - DNA, 495 bp, Stenotrophomonas maltophilia
atgaccgaccacccgccgctgaagaccgtcgccgacctcaagctgccccgctacctgggcacctggtacgaaatcgcacgcctgccgatgcgccacgagccggaaggctgcaccgatgtgtcggcgcactacaccctgctcgacaacggcaacgtcggcgtcaccaaccgctgccgcatggacggcgacgtcgaggaagccaccggcgaggcctgtgccgtcgacaacgacagcgcgcgcctggaggtgagcttcctgcccaagggcctgcgctggttgccgttcgccaagggcgactactgggtgatccaggtcgctccggactacagcgtggcgctggtcggcagcccggaccgcaagtacctgtggctgctggcccgcgaaccgcagctggacgccaccgtgcaggaccattatctggccaccgcccgcctgcagggcttcgatctgtccgaactgatccacaccccgcacaccggtcgccccacagcctga

SEQ ID NO: 499292 - DNA, 1209 bp, Stenotrophomonas maltophilia
atggacctgaagagtggctacccctggtgggcggttcgcaacggcctgatccacgccttcccaccgctggagcgggatctgcgctgcgacgtgctggtggtcggcggcggcatcaccggtgcgctgattgccgacgagttgtccgggcatggccacgacgtggcggtgatcgagcagcgtgacatcggctggggcagcaccgctgccagcaccgcgctgctgcagtacgagatcgacacccacctgctggaactggcccagcgctatggccaggacgccgcggcgcttgcctatcgggcgtgtgcggaagcaatcccggcgctgggcgacgtggcacgcgggttgaaggacgtggatttccagcgcatggacagcctgtacctggccagccgccatcgtgacgttccgcgcttgatggccgaaggagaagcgcggcgaagcatcggcctggatgcccgctggctgggcccggaggcactgcaggaacgcttcgacgtggacgccggtggtgccctgctcacgcgccaggcggcgcgagtcgatccgtatcggctgacctatgcactgctgcagcgcctgcgtcggcgcggcggccacgtgcatgaccgcacggtgctgcacagcctcgacgccactgcgcgcggggtgaccgcccgtaccgaagacggtgccaccatccgcacacgccacgtggtgctggccatgggctatgccaaccagcgctggctcaagcaacgggttgcacgcaaccgcagcagctacgccttcatcaccgatcccatcgatgcggacgtgctcggccggctgcgcaccaccatggtgtgggagagcgcccgcccctacctgtacctgcgcgccaccggcgaccgtcgcctgctggtgggcgggctggacgacgccatcgacatccccgcccgccgcgaccggcgcgttcagagcaaggccgacaagctgatgaagcagctgctgcattggttcccacggctggacccggtgccggtgttttcctgggccggcaccttcgccgaaacggcggacggcctgccgttcttcggcccgcacgatcagtgggggccgcgggtgcacttcgccatggcctacggcggcaacggcatcacctattcgatgatcggcgcgcagctgctgcgggccgggatcgagcggcgggcgcatccgctggcggggctgttcgggttcgggcggttgtag

SEQ ID NO: 499293 - DNA, 483 bp, Stenotrophomonas maltophilia
atgatccgccccctgaccctgctgctgtgcctggccctgccgggaaccgtgctggcccagtccgccgccggcgccaccgcgccgcaggctgccggcctggacctgacgctgccgcaggcgccgatgcgctacctcaacgacccggccctgcagcaggacccgccgggcacgtactacggtgacaagagcggcccgcgcgtacacgacgacgcgaagatcgccgacgtcaccgatgacaaggtcaaggtatccggcagcttcaccaccggtatcggctattctaagaacggtggcaacagccactacaacgccgccacgctgaacctgagcaagaactacaccaccgatgagggcaagacccacggggtcaacgtcaacatccacgtgagcgaaggcaagggcccgggcttcttcggcccgtacggcggctactacggccgcggcccgggctattgggattacccgccgccgtttggctggtaa

SEQ ID NO: 499294 - DNA, 357 bp, Stenotrophomonas maltophilia
atgaagtcgatggaggcccgccgcaacgagctcttggccaatgccgcttcggcggcggctacggctgcgcgtgcgctcggcctcggcgacgacttcgcagagcagatcggcgcggcggtggcggacaccttggccgaagactggggcggccagaccatctactttccccaggacgcctcattcaagctcagcccacgcgagcgtgagatactggacgcccaccgcaatggggctacagttccgggcttggcgaagcgatacagaatgtctgagcaagggatccgcaagctgctcgccagggcgaacttccgggatcgtaacctcaatcagatgagtctgttccgcacagcaccctga

SEQ ID NO: 499295 - DNA, 927 bp, Stenotrophomonas maltophilia
atgagcctgacgccgagcgtccttgccgtgcagtgcgacgacggccatcgcttcgaggtgatcgcctgcgtgcccgcacagcccatcgcacgcctgctgtggctgccggcactgggtgtggccgcgcgccactacctgccactggcgttggcgctggcggcgaagggcgtggcggtctacctgcacgagtggcgcggcaacggcagcagttcgctgcgcccatcgcgcacgcaggactggggctatcgcgaggtactcgaacaggatctgccgagcagccaggccgtcctggccgcagcggatgacgaaggcgacgccctgccctggatcatcggcggccatagcctgggcgggcagctggcctgcgtgcatgccggccgcaacccgcagcacttcaaccggctgtggctggccgccagcggctcaccgttctggcgcggattcccaccaccgcgtggctggctgctgccgctggtctaccgcttcctgccgtggatcgcacagcgccagggcgtgctgcatggccgtcgcctcggcttcggtggcaccgaagcgcgcgggctgattgccgactgggcgcgcgttggcctgaacaaccattacgccgccgtcggcatggacgaagacctcgatgcgcagatggcgcgtgtgcatggcagcgcacaggcggtgctgatggagcacgactggttggcccccaccggatcgatgcagacgctgctggcgaagctgccgaatgtggacgcgcagctgcgcgtgctgtccgcgcaggaactgggcacgcgcgccgatcatttcgcgtggctgaaggcccctgatgccgtggctgacagctttttcattcagttggatgaaaattttcacaaaactgttgacggtacgcgccgacatccgcataattccgctcctgtcgcagggcgcccgtag

SEQ ID NO: 499296 - DNA, 930 bp, Stenotrophomonas maltophilia
atggaccgactgaccgccatgaccgtattcgtcgaggtggccgagcgcggcagcctcaccgccgccgccgaggtgctggacatgtcgcgggcgatggtcagccgctacctggccgaggtcgaggcttggctgggcgcgcgcctgctgcaccggaccacgcgccgggtcagcctgaccggccccggcgaggcggcgctggcgcgcttccggcagatgctggccatcggcgaggaactgcagggtgagctggccagcgatgatccggagccgcatggcacgctgcgggtgaccgccagcgtgtcgttcgggcagagccacctggcgcgggcggtggccggctttgttgcgcgccatccggcggcacgcatcgagctgctgctggtcgaccgcatggtgaacctggtggaagagcgggtggaccttgcggtgcgcatcgcccgccagatcgatcccagcctgatcgcacgacggctggccacctgccgctcggtgctgtgcgcgacgccgtcgtacctgcaggcgcgcggtacgcctaccgccccggaacacctggccgggcacaactgcctgacccatcactacgtgggcaagagcctgtggcagctgcaccgcgatggccgttcgctgtcggtggcggtgggcggcaacatcagcgccaatgaagcgtcgctgttgctggaggcggtgcgtgcgggcgccggcatcgcgatgctgccgacctaccaggtggcgccactgctgcgcagtggcgagctgatcgagttgttgcccgagttcagtctggacgaactcggcattcatgccgtgtacgcatcacggcgccagcagcccgctatcatgcggcgattcctggacttcctggccgagtgtttcgccagcccggccttccaggatctggattggcgcccaccgggcaaggagaacacatga

SEQ ID NO: 499297 - DNA, 2064 bp, Stenotrophomonas maltophilia
atgccatcgcacctgctgtgccgcccggccctgcttgccatttccctgtccgtggcatgtgccgcgcatgctcaatccgcaccggaccgcggtaaccgcagtgccaccgaactggatgcggtcaaggtcaccgccgaacgcacgcacgccgacgctggcgccctgggcgaccgcgccctgcgcgataccccgtttgcgatcaccgccgtgggccgcgagcagatcgagcagcgccaggtggtctcgctgggcgaagccttcctgctcgacccttcggtcaccacgcaggtcagcgcctatgccagtggctggagctcgcccatccgcaatcgcggtatcgaactgaatttcgacagctatcgggtcaatggcctgcaggtctcttcctggggcaccgaatggccgctggaagtgatggaacaggtcgatctgctgaaaggcccgggcggattcctgtacgggttcggtgcgcccggcggcatcgtcaactacatcaccaagaagccgaccgacacgcccaccttctccgcccagctgggctggcgcgagcagggcatcgtcagtggcggcatcgatgccggcggccgcttcggcaacgaacagatgttcggctaccgtttcaacgcctaccgggaaaagggcgagaccttcaacgggggccgcgcggaccgcaaggtcggcgcactcgctttggacgcacggctgactgatcgcctgacctggaccctggatggcgtcttccagtcgcgcgatctcagcggcgaagcgccgcagtactacttccgcggcctgacctcggcgccgcgcccgattgccggcgacgtcgacaatggcgtgcccggcacctactacgacacccgatcgagcctgctgtcgacggcactgaactggcagatcaacggcaactggaaggccaatctgagctacggcgtcacgacttcgtggaacgacgtcaacaagatcttcgcctacatcgatgatctcaacggcgactatgacgtcaacgtctacgaactgggcggcaagagcgagtggaagctggcccaggcgatgctgcagggcagcttccgcaccggtccgctgcagcatcaggtggtggcaggcatcagccaccagaccgggctgggatgggaccgcccctacgagtggaaccccatcggccgcgccaacctgtaccagcgccacgccatccgccacgacgccgtcggttcacgagtgatgacccgtggcgacgagaccgtgcagcaggcggtgttcgcaagcgatacagtgaacctcggtggcggctggtcggtgctggcgggctggcgctacaacgacttcgaaaccaaggggcgttaccacacctacccggtcacgccgacctacgccgtgatgttcaagcccagcgaggcggtcacgctgtatgccagctacatcgaatcgctggaagccggcagccgcgtaggcaacagctacatcaacgcgggcgacgtgctcgacccgaccatcagcaagcagtacgagatcggcgcgaaggtcgaggcggcgcgctggaacgcgaacctggcggcgttccggctggagcgtggcgccaacatcgatgagctcacgcctgccggcaggcgcctggtgcaggacggcatcacgctgtacgaaggcatcgaagccagtgccgacctgcacctcaacgatgccctgacggtcggcggtggcgtcacctggctggacccgacctacgacaggctgtcgccggccagcgccgcacaggaaggcaaccgtaccgccggtgccgcgcgctggagcggggtcgtgcacgccacctaccagctgccgtgggtggacggcctggaaacgtatgcagccgtgcgctactacggcgatgtctggtacgacgccgacaataccctgaagctgcccgactacacgctggtgaatgccggcgtcggctatcgcctgcttgcttcgggccacccggtgaccctgcgtgccagcgtcgagaacctggccaaccggaagtactggtccaacgccggcgccggcctcccacgcaccctggctctgagcgtgcgctgggagatgtaa

SEQ ID NO: 499298 - DNA, 522 bp, Stenotrophomonas maltophilia
atgaacagatacgacgcacgtttcaaactgcaggtcgccaaagaggcctgcaagacctccacatcggtcaaagccattgcccgtcgccacggccttgagttctccacggtcaggcgctgggtggcgacctatcggctgcatggttggcgcggatttcatcgccaggcccggttctatgacctcccgttcaagctggctgtcctggaaaagatgagccaggacggcatgtccgggcgggaggccaccacctacttccagattggtgatgccggcgcggtggggcgatggcagcgcctgtatgctcaaggcggtgcccaagcgttggcaccgcctccgccgctgccccgaaagccgatgaaaaagacccgttcgtccaagccacctgaggaaatgagtcgcgatgagctgctcaaggaagtcgcctatctgcgtgcggagaccgactacctaaaaaaactcgatgccttgatccgggaagagcaggcggcgcaagacgcaaagcgcaagccatccaaggattga

SEQ ID NO: 499299 - DNA, 834 bp, Stenotrophomonas maltophilia
ttgaggcaggttcatacgctgtcgcttctgctcgaagcggcggagctgtcacgcagtacgttctattaccagaaccatgtcctggcccatccggatcaggacgaggcagccctgtgcgagcgcatccgtgcaatctacgatcaaagccaagggcgctatggctatcgcacggtgacgctggaattggccaatcagggtcatcggaccaatcacaagcgggtacagcgcctgatgggagagatgggcctgaaatcacgggtacgggtgaagcgctaccggtccttcaagggggccgccaatgttgtggttggcaatgacctcaatcgccaattccacgtcgagcgccccaaccagaagtgggtgaccgacgtgaccgagttcaaggtacaaggcatgaagctgtacctgtccccgatcatggacctctacaacggcgaaatcgtggcttatcagatcaagcgccagcccgtgttcgacctggtgggtcagatgctggaggaggccatcaagaagctttcgccggatgagtgccccatgatccactccgaccagggctggcagtaccagcatgaaaactaccggcacatgctggaaaaacattcgttgaaacaaagcatgtcccggcgtggcaactgcctggacaatgcggcgatggagagcttcttcgggacgctgaagtcggagttcttctacctgaacagctttgacagcatcgagagtctggaggctgggctggtggaatacatccagtactacaaccaggagcgcatcaaactgaaactgaaaggtctgagcccggtagagtaccgggagcgggcccaatcggccgcctga

SEQ ID NO: 499300 - DNA, 939 bp, Stenotrophomonas maltophilia
atgcagcgtgtgcgtggatggagtgtggcggcctgcctggccgtgagtggctgtgcgatgtcggtggcgccgcccgcaatgcagagtgaagcgaaggacagtgcgccgactgccacgccgggtgtggtgctgctggacaccgaagcgctgcgcgtgcacgacccggtcggccgcgactatccggtctgggtggcgctgccggccgactatgcggcgcatccggaaaagcactacccggtgctgtacgtgaccgatgcgctgtacagcttcccgctggtgcgcagcgtgcgcaacatggtcgggcagaagggcgtcaacatcgaggatttcatcctggtcgggctgccgccgcaggaaggcctgacctccaagcagagccgctcgcgcgattacacgcccagcgacccggcgcgtaccgatccgcgtgattacagcgatgacgtcagctacggcggcgcggcgcactaccgcgatttcctcgctgggcaggtactgccgatgatcgatgcgcgctaccgcaccgatccggcgcggcgtgcctatgcgggtcattcctatggtggcctgttcggcgcctatgtgctgaccacgcgcccggacatgttccgcacctacatcctgtccagcccatcgctgtggttcgacgaccatcgggtgccgcgcatgcaggccgaagccaaggcgccggcgcagccgaccacggtggtgctgtcggtgggcagctttgaaacggtcaagcccgaaccgcgctacttcacccgcaacgacatgctgcgccacaacgccgaattcgccgagcagctgcgcagcagcgggcgatcgttgaaggtggagaacatggtgatcgatgacgaggatcacttcaccgtctacccggacatgatcacccgcgcactgctgaaggtgttcccgggtaccggaccgtacagcagcggttga

SEQ ID NO: 499301 - DNA, 504 bp, Stenotrophomonas maltophilia
atgcagtcttcccacggcttccgcaccgccccgatccccgctggctgggtccagaccggtgagcgctgggcgctttggtacaacggccgcgagacagccagcgtcacgcccgacggtggtcccggggtccggctatggatggaaggccagaagatgtggcaggtgaaggaagtgcgcgcggccaacgtccggcaggcgaagcggtacgccgagcgctggtgtgcggccaggctctatcccgatctacccctgcgccaggcagtcgcccggctgaccgacagcaccccgacacagccgccgccgccactgccaggcctgccgccaacccgcgagcagcagcaacaggcccggcgcctggccgaggctggggcgaaggaggtcgagcggatcaaggccgcactcgaaccgcgtaagccgccggcagagaccaagccccgagcgagagacgtccgcagcaaggcgtgggtgagggcagggctgcagcagctagggcggggtgtttga

SEQ ID NO: 499302 - DNA, 666 bp, Stenotrophomonas maltophilia
atgtgcggccgattcgtccagctccccgtgatcgacttcggcaagccggggctggctgaccttgcccccggcctggccgagatccagccgagctacaacctcgcgccgacacagcgcgcatcggtgatcttggaccgtggcgaaggccggcaggttacccgcctggcctggggcttgctgcccttctgggctaaggcgaaggacctgcagggttcgaccatcaacgcccggatcgagacggtggccaccaagcccaccttccggtcggcgttcaagaagcgccggtgcgtggtcccaatggccggctactacgagtggtccgtaagccccgaggacgggaagaaggacccgtggttcatccacgccaccgggccgctcctggccgccggcctgtgggaggacaccagccccctgctgcccaacggcaacctgggcaccttcaccatcatcaccggcgatagcagcggcgtatccgccgatatccacgaccgcatgccggtatggctgcaggccggccaaatcgatgagtggatgacggccagccccgacgacgcgatggcgatgctgctggccagcgagccgtcggcgatggaggcataccgggtcagccgcgcggtgaacacgccccggaacaaccgcgaggatctgctgcaacaggtgttgtag

SEQ ID NO: 499303 - DNA, 372 bp, Stenotrophomonas maltophilia
gtgttcgatcgccccgccaacgaagatgcgcagtacctcgcgttgtgggatgcgaacgggcggctgacgtacgcgctgggtgcaaagcccatgcggatcatcggtataggcggcgtctttcccaatggcggtatggaagaggacaggttccctgacttcaccggcaagacggtcgccggggtgatctgcgcgccggccaccagcacgttccagaacagcttcaccgtgatggggatcggcaacgggcagggcgttagcgggaagcacggcctgttcggtaacgccatcaccattccgaagatcggaaccggcggctcgccaaaccaggccgtggttggcatcgttatggcggtggacgtgaccaactactga

SEQ ID NO: 499304 - DNA, 888 bp, Stenotrophomonas maltophilia
atgatgcgtccccccctgtttctcgctctcgcgttggccgttggtgccggcaccccactgttcgccggcgatgccagcgcacagaccacgcgcgcggttcgtgccaccaccgaattgagcatgacactgaccggaaagatcgaggtcacggcagaaggcgcagtcagcgctctggtgctcgatcagaaggcaaacatcagcccgggtgttgccgcgtttgttgaacgcaccattcgcccttggcgtttcgagccgacgcgggtcgatggcaaggccgtcgccgcacaggcaccgtttcgggtgcgtctgcgtggcaagtccacgggcaagggcgactacgaagtcagcatgaccagcgtggatttcagcgagtacgatccaaaggccaccgattcggtgaccgcagagcgcctggcgccgccgcgctatccggacgaggcaatgaggatcggtggtcagggcgatgtgatcctgatcatcaaggtcgcccgtgatggcacggtggccgacgtcatcgccgagcaggtcaacatgaccgtggcggggccggagcggaccatggccaagctgcgcgatgtgctggccaaggccagcatcaataccgcccgcaagtggaccttcattcctccaagcagcgggaaggacgtcacacgggaattctggtcggtacgcgtgccggtcaactatgcgttctcggatgatcgcaatgccgctgccgagcgctatggccgctggcgcgccttcattccaggaccgaagcagcgcgcaccgtgggtgaccggtgacgcggcggaaaacggcagcgacctgctgcccgagggcggcatctacatggtggacggcgccaagcgcggcctgcgcctgctgacgccgctggagcagggctga

SEQ ID NO: 499305 - DNA, 249 bp, Stenotrophomonas maltophilia
atgatcgccgctggctttcccctagcccgacacaggctgctgatcttcatgcggcagcacttggcactcgctcggcgcgtgcgcctgcttggccccggcgatgggggtctgatggatccgccgttctggcactgcatggacttggccgccgcgaatcgcacgcacctgctgcacctgattgccactgaacgatcagcagtgcccaccctgccgccggcacagccggcccaactggacctgttcgcatga

SEQ ID NO: 499306 - DNA, 843 bp, Stenotrophomonas maltophilia
atggctgaccagctgctctccgctgcttctaccagagcgccttcagcgcttggaggcgaggcccgccacgtggcgctcaaccgcagccatgccgagctgcatagcgtcgcccttgctgcggatcagcccttcgggtcgcaactcaacttcggctccgtcaacggcagccgtgtaggagaaaacatcgtggtcgctgctggtgatggtcagcacgaaatggtagccatcgtgataaccgcgcagggttcgatgaaagccacgagtggtcatgggcctggcgcggtaggggacgtagtgcactgtacagctgaatgcggcaagtcgtcagcatcgagtgtggcgtctgaccagctgctcaccgctgcaatcgatcaccgcgaggtaggccggcagctggccagcatgtcgggggtcgagctcgactcgatcacttcccaggatgcccgcctgtgggaggcccgtggccaagcgcttcaggcgctcgctgccggcgacatggacgccgcgctgcgcaccatgggcatggcgtcctcgcggatgatggaccgagacgaagcatgggagatcgcatcgaacgcggtagccgtccggatcgccgccggctggacgcgcgacatgctggatagcagcaccgaggccggccgcgcgccgtgtggtcgcggctactacctgttctgctccggcgccatcgcggtctgctacttcccgatggtctgcatcaccgacatgaacggtcgcggctaccacttccatatcgcccaagatctgctcaacgagcgagatcccagcccctacgcaattcgtcgcccgactgtgccgcaacagctggagatgttccgatga

SEQ ID NO: 499307 - DNA, 243 bp, Stenotrophomonas maltophilia
atggcaactgaaaccaccgtcatcaacatctgtgatcgcagcggctcccgccacgatgccgctgcgtacatggcaggcagcacgtgggcccaactcaatgtgacgtggagtggcgaaaagggcggccgcacctggcagggcgacgccggtggcgtcaacctcaagggcaaggcgtggctgtgcgagccgtgcaccgatgccttcctggccttcctgaagccgagcgaggcgtcccatggctga

SEQ ID NO: 499308 - DNA, 681 bp, Stenotrophomonas maltophilia
atgagcaacgacaacaagaccctggcggacgtgcagcccggtgggagggtgaagccgggggatgccccttggccagagatcgacgccatcctggctgatgcatattccgcaggcgcagtgggtctgccattcgaaggcatcgcgcgacgccatgccgtgcgtgcagccgtcgccgccctctccgcccagccctccccgggtggtcagggggatgcgctggaagctctggcgaaggaaatggacgagttccgcaccacgtggggaaccattggcatgcgtgagttcggatacttcgtggacacgctgaaagcagcactcgccgcccgccagccggttcgtatctacggatgctgcgcccagcgggaaggtgagctgcacaccgccgaatgcccgaacctgcggcacctcgccgcccgccagccggtgggggagccggtggcgtggatgacccaccacgacgagccgatgctgttcccaaccgccgctgaggcttccgcatactgtgatgatgacgaacagccggtgccgctgttccgctcgcccgcgcaggccgtggacctggggcagttccggcccgccgtacgtgcgatgggcctgtatgcagaggaaccggaggatgttgacgaagccaagcgcctgatggccctgatcgacagccaggcggtgggcaatggcaactga

SEQ ID NO: 499309 - DNA, 210 bp, Stenotrophomonas maltophilia
gtgcgtaaccagctcgacatcttcgatcacgacccagcccgcatggcagcggcaaaccgcgccgccgccgagcgcgcactgaccgacgtgcagttcaccgccaccgtccgccaggaacgccacgagtactacgtgggcgaagccgagcgctgggaacacctcgcctcgcacagcgcgcgctccaccaacagcacggacatgcgggcatga

SEQ ID NO: 499310 - DNA, 243 bp, Stenotrophomonas maltophilia
atgcgccacctggccctgcccttcttctgcgccgtcgtcgtcggcctgctgctcgccgtgctcgtttgggccctgcgcaaccacgtcgacgccgtcgccctggcctgcgccatcggcgccgtgttcttcgcatggcgctgctgggaagacctccagaccagctggccagcgttcaaggccgagatgcagcgccgcagcgatcaacggcagcgcgcgccgctgatcgctgacgaaacccactga

SEQ ID NO: 499311 - DNA, 384 bp, Stenotrophomonas maltophilia
atggataagcccacctacagctggtcgcaagacgaagaaatctggcatggcccgttcgggtccatcgacgaagccatcaaagacgcattcgatacctgcgcccaggacgtgaccgaagtgtctatcggcgaaaccgaggtcatcgacacgggaacgctgctcacggcggatcagttctgcgatctggtccaggaacgcctgagcgacgaaatcggcgaatccggcgacgacttcctcagcggcgctaccgtcgagcagcgcgccgaactggacgctttgctcgcagcttgggtggccaaggtcgagccgggcccgtactaccgcgtggacggctggaaggcacatcgcttcgccgactaccgcctgagccgggaagccgagtga

SEQ ID NO: 499312 - DNA, 177 bp, Stenotrophomonas maltophilia
gtgaccgaccacgacttcgtcgccgccatggccgtcggcatcccgcccatcaccccgccaacccgtatcggcctcgacctggccaccggcagcgacacaaccgtcgtggccgaggtcgccgcggacggaacgatcacccgcatggcaaccatcccgcaggagcagagcaatggataa

SEQ ID NO: 499313 - DNA, 237 bp, Stenotrophomonas maltophilia
atgagcttctttgtagacgcacaacaggcgatccgggccgcgatttcagacctggaagaggaaggcttcggcactgaggagctgcgggaggtcgcagacgcgcttgccgatctgatcgaggcggctcaggcaacacgcacgtccctgcaacacatgcgtggaccggattcgatcatccacgcacgttctgccgaacttgatgctgcgctcctccgcatcaaaggcggttccgcgtga

SEQ ID NO: 499314 - DNA, 300 bp, Stenotrophomonas maltophilia
atgagcgcacctaccgccccgagcttcgccatcatcgaagtgcctggctgcggcatgcgcgtgcgcgccatgaaggatgaaggcggctggagtgtctctggctggcgccgcacccacggcgccaaggccatggtcatgttcgcggctgcggatgccgcgccgaccttcagcgagaccgcaggccagcaccacgtcatcgccggtcgcacctacatcgcagtaccgcctgcaagccggaagaagctgcaggcgtttattgcctccaccgagggcgcaagcgcccgaggcggtgctgcatga

SEQ ID NO: 499315 - DNA, 216 bp, Stenotrophomonas maltophilia
atgagcgccgccctcgcccaccactccaacgctcagcgcgccgctgcagccgccggcatcgtcgcccgcgccgggcgccgctggggcctcctcccctaccaggtcgtcgctgccgccagcatcgccgccaatgccgtcctgcggcagggcaagagtgctgcaggtgctgtcgccgccgctcgccgcgcagcgcgcgtgcaggcaggtgctgcatga

SEQ ID NO: 499316 - DNA, 189 bp, Stenotrophomonas maltophilia
atggccaccctttccctgggcgtcagcaaggcgccaccctccgtagtagccatgcccgcagtgggcatggtcgccatcaaggtcggcgccgcttgcctgtacgttgagcaggaggaggcggatcgcctcgccctggaaattcagcaggcagcgctgcaactgcgcagcaatacggctgccgcagcatga

SEQ ID NO: 499317 - DNA, 741 bp, Stenotrophomonas maltophilia
atgacgaccaacgttctggacttcaaagcaaagcgcattacgagtgactcacgctggtcactgaccatcaatcactatctgtgcttcattgatgattctggcttcgacaagatctcgaatcgccctactgccgcaatgatttgcgctggtgacgcgatcttgatcgatgcttggaagcagtggtttggaagcagtgaccccgacatcgatctgccgagcacgattcgctatgaccgtaacggcaagatggcgggcgtgtgcatttcaattgttgacaagccgtccttcacggtggattgcaaagctggcacttatcatccactcgacgatttggcttcgttctgtggtagcggcggggccgcagcgctgtcctgctatgcggcgaatggttgttccacacgctgtatcgaaagcgcaagcttggtggattttcagactggcggaagcgtgaagttcgtcgagattgaaacggagttgaacaatctcgccccggcaactaccacctatgaggacttgaaagagtcccttctcaagagaggaaaaattatgaacttgctcaccggcgcaatcaccttggttcagcccattgatgagggcattcttcgcgacgcgctgagtgcaggcacggtgtctctgactgccccgaccggcatggttccgcgcgagtggactgaagaggaaaagcaagcggcgcgtgctgcaaggcgtcgaatcatcgagcgggaacaagcttcggcctga

SEQ ID NO: 499318 - DNA, 705 bp, Stenotrophomonas maltophilia
atgcgaccgattgacgatatccgccacgagaacctgcttgccctcattgcgtccaagggcggccagcgccactttgccgacgcagccggcatcaagaatccagcccaggtaagccagtgggtcaacaggagccgcaacgcgaccacaggcaagccgcgggtcatgtctggccgtactgcacgtgcaatcgaaacagccctctccctaccagagggctggttggacacccaacacgacggcgcggatgcgtcagtcgcaaagatcgcagagactgagacgccacccggctatgttcgcttcgacttgtttgaagggggtgcagggatgggcgcagggatggtcaaccaggactacccggaggtagtgaagaccatcgaggtcgccgaatgggaggtccgcaggaagctcggttacctgcccaagcccggacgcatccagatcatcaccggccgcgggccgtcgatgcgccccaagctcgaggacggcgacattgtctggatcgacaccagctgcgactacttcgacggtgacgactactacctgatcaacatcgggggcgagacgcagatcaagatgctgcagaagcgcggcgacggtctctatgtcgtaagcgtcaacactgactttccggcctataggccagatcctggcgatgtgagcatcctgggtaaggcactaatccacgcaggtctgcggaaattctaa

SEQ ID NO: 499319 - DNA, 477 bp, Stenotrophomonas maltophilia
atggacctactcacctacatctccgatatgagtcgccgcgtcgcgcttgccgacgcgtgtggaaccagtcccgagtacctgtggcagatcgcgaccggctggcgcggtaagcgccctagcgcaaggctcgcctgcgcaattgagagggagtcggcccgccttggtccggaggtcgtgcgtaaagagccgatgatcttcgggcgaccgagcccggtttcgggccaggtcatcgcggcagctgtagatctccgcatgagcaagcgcgcgctgcgcgcccgtctgggtattgccaacgacaagcacctggccactttgctgcagctcccggccgaacaggtggaggcgtggccggaagagggtgcgttgcccgcgctgccgcagatccagcgcctcctcggcggagagcccaaaccgcctgatcccgtagcacccacggatttcgaccatgaccgaatcgtcccggtcgatgcggcctga

SEQ ID NO: 499320 - DNA, 186 bp, Stenotrophomonas maltophilia
atgtacgcagatccttcgaaccttcgtgacaacccgatcaaggtccggttcaacgatacggaaaaggccttgatcgatgcggcagcgaacttcaacgggcgtcagcccgcggtgttcgttcgtgacctggtgctggccggccttgccgcgttggaacagcgtagccccgaccgtgatgtggcctga

SEQ ID NO: 499321 - DNA, 192 bp, Stenotrophomonas maltophilia
atggaaattcagctgtcgcgcgaccagcgaaagcagcttgatcaatacgcggcctcgcgggggatcactcccgaggaggctgcaacagagctggcacgcggcgaacttgggcgccgctaccggctgccgcgaagcaacggcgaagtggtcccttttcagggcctgaaacgacccgaagaccctacgaggtag

SEQ ID NO: 499322 - DNA, 657 bp, Stenotrophomonas maltophilia
atggggcgcatcccctcctgcagcgggcgcaccccctgcatggggcgcagcccctgcgcccggtgcagtacctgcttttccagacttacggccagccttcgacggcgcagcggccttgtcgaagttggccggagtgaccttgtagaccgtgctgctgttgaaccggcggtcacgggtcagcaggccaacggcctccagatgatccattgccgtgcgcacagcgcgcgccgacatgcagcagcgagcggcgatggtgcccaccgccggccagcacacaccgtcgtcgttggcctgatcagccagcgagatcaagacagccttctgcgtgacgctcaggccttgcagcggccagcactgcgacatgatgatggtcgacacgtcagagccccagcgtcatgttctcgcccggcgcgacaggccaccaggtgcacgcaggtttgtgggatgtgccgcacggcgccgtggggccgcgccagatgcgtccctctcgggccaactcgggcagtcgacggcccagcatgtggcggtcaaggccagtcagcgtcgacaggtgcagactgctgtggcctggatggcgaattaccgcagcctcagccttggcgtgctggacacgaagcgtgccgctggcgacgaggtcggcagcagcaacgtggctag

SEQ ID NO: 499323 - DNA, 1212 bp, Stenotrophomonas maltophilia
atgaaactgcatcaccaactcctgacggtggccgtggctgctgcgctgtatgtgccggctgcacacgccgaagtcgccatcgacgtgatcggcggttcggaaatcaccttcgaaggcctggtccaggccgatggcaactggttccacaacgatgtggtcgacctcaacggtggcgacgccggcaacggcaagaacagcgaattcgaactgcgtcgcgccgagctggtgctgaagggcaagggcccgggcaacgtggagtgggtggtcggctatgacgccaaggccgacaagttcctcgacaccaacgtgaagtacaagctgctgggcaacgccaaccacttcctgcagctgggccagttcaagcagcccaacagcctggaagaactgtccagcaccaagaacaacgatttcatttccaaggcagcggtcaccaacacctatgccatcgcccgccgcctgggcggcgcgtacagctacggccaggacaactggtcggtgactgccagcgccttcggccgcgagctgacccgcaacctggcccacggcagcggctacggcgcgcgtggcacctgggccccgatcaatgaaaagggccaggtcctgcacttcggcctgagctacgtcaactacgacaccgacgccgacaccctgcgcgtgcgtgcacgtccgaatgccgacctcgctacggcccgcctggtcgacagcggcaacctgaccgacaccgaccgcgtcagcaccatcggtgccgaagcgatgtacttccagggcccgttcaaggcccaggccgagtactacaccagcaaggccaagcgctacgaccacgacaactacaccagcgacggctattacatcagcggcgtgtggaacgtcaccggcgagacctggagctacaagggcggcaccccgggcaccggcctgccgaacaacccggccggcggccagtggcagctgggcgtgcgctacgaccacatggacctcaatgacggcaacctcgccgccaacccggttgccggtcgcccgccgatcgtcgatggcgtgctgggtggcaagatggacatctggaccgtgggcgccaactggtacctgcgttccaacttcaagctgatgctcaactacgtgatggtcgacagcaagaagtacagctccacggcgcgcggtttcgtcaacgacgatcccaacatcctggaagcccgcgcgcagttcttctggtaa

SEQ ID NO: 499324 - DNA, 822 bp, Stenotrophomonas maltophilia
atgctccttctacacgttggcgggctggtggtcaggcgtatcacttcagtggcagtgcccaggacagggcgcggactctccctgcaggcagtgctgcgccccggtgcgttgttggcaaccctggccctggccggctgcatgtcggtgcccgtcccggacctgcctgatcgcacacccagcgcctggacccaggtaccgcagggccagggcgtggcggtggacgccaggcagtggtggaaggtgctgtccgacccggcgctggacggcctggtcgaccaggccatcgcaggcaatgtcgacctgcagcaggccacgttgcgcctgcaggccgttcggatcgtcgctggcacgtccgactcgcgtttcctgccggaaatctccgccagcgccaagcaggtgcaggacgccgccgctgtcgatacctacttccatgccggcattgaagcgatctgggacctgggcctgttcggcgccgccgagagcgcgcagttgagcgcgcaggcctcggccggcaatgccgaggcgctgcgcaatgccgcgcaggtagcggtgattgccgacgtggtgcgcagctatctggacctgaccgtggcgcaggcccagcaggatctgctgatgcgccagcaggccgtggacgaccgcggcgaacaactggcgcgggtccgccagcgcctgcgtctggatgagccgggcgaactggatcgcctgcgtgcacgccaggccgccacccgcgcggccacggcacaggcccgggaaaacgctgacaacgcggcccgcgcgctggcagtgttgctggggcgagatggcccggatccggcctag

SEQ ID NO: 499325 - DNA, 726 bp, Stenotrophomonas maltophilia
atgactaaccagctgctcgccgctgcaccaggcaaaggcgtcatcgatcaagatctggcgttcaaggtcgccgacggtatcgtttcgcggagactggtcaagggatggtcgcgtcaagccatcctatccagcatcgagggaggtccgtcgccatgcgggcgtgcgttctatctgatgcggggtggcgtcatcgtcgtcgccctcttcccgatgacgcagctaagcgatatgaacggtcgcgggtactggtactcaatccgcgacctgttcccgccgcttccatatcgcacccatgcaggtactgaagatctgcagccgttccaggtcggtgacaaggtctgggcttggtacaaggacgagcccagggctgattatggccaacccgatcagccgggcgacgacacaaactggagtcggtgctttccgctgttcaccgtcaagagcgtgacgggtccacacctcgaaccggcaaagttcgccggtcggtcgcactaccaagtgcagctcaggtatcgcgaagggccgcccgccacccactacgacgcgggctaccacgacgtttgcccgatcaaggggcgtccctggcagatgcgcggagacggcgactacctgcagttggtgcaccgtgcaccgcctgcggcaaagccacgccgtgctgctgcggtgccaccgcccacccccaccctgccgccgccgctgccggcccaactggacctgttcgcatga

SEQ ID NO: 499326 - DNA, 228 bp, Stenotrophomonas maltophilia
gtggtcgagcgagcgcggtggcacgaggactggaacttcaagatcaggggaagagacgtgacggtccgtgtcgctaccgatggccctggcaggggcgaggtgactgctatccacgtgatctacggtcccagccagaccggcctggccattccggtgacttcgcagaaggacgccatggagaaagccgaagctctgcttagcgatctgatgggctcgagctggtactga

SEQ ID NO: 499327 - DNA, 213 bp, Stenotrophomonas maltophilia
atggccaagccggttcagatggacattttcgatgacgacccagcgcgcgaggcagccgcctggcgcgtgcaggcggaagagtcgctgaaacacttccagttccccgattcgatccgtctggaacggcacgcctactacctcggcgttgccgaacaacttgaagccagggcgcgcggcgcgtgctccaccaatagcaaggacatgcaggcatga

SEQ ID NO: 499328 - DNA, 384 bp, Stenotrophomonas maltophilia
atgaccacttctgtcgttgtcgatttccacaccgaaccagagttccccaagctggacaacggcgagcgcccgaggatcgaactgatccgcgaacaggtcgccagctacgtcgagggctacaccgtagccaaggggcacaagcccgcacgcatcgttctgcaggcccaggacctcatgcactgccagcggcgggtccgggctcgcatgcagaagccccaccgcgaccaggccaaggccgagtggcaggagcgccgcaaagccgggtcgaaggagcgttggcgagacgccaagcccgagcccgttgcactggacggcatgacctggtgcggcatccccattgaaggcgtcggctacagccgccaccgcgccgtcgacaagcactga

SEQ ID NO: 499329 - DNA, 165 bp, Stenotrophomonas maltophilia
atgcgccacctggccctgcccttcttctgcgccgtcgtcgtcggcctgctcctcgccgtgctcgtttgggccctacgcaaccacgtcgacgccgtcgccctggcctgcgccatcggcaccgtgttcttcgcatggcgctgctgggaagacctccagaccagctag

SEQ ID NO: 499330 - DNA, 336 bp, Stenotrophomonas maltophilia
atgagccgtcagtatcgcgacgatcacccggctctggacactcacctctcgctgctggaaggcgcggcaatggatgcgtttgacgccggctgggatgcatacccgccaggtgctcgctgcatcgtccgctcacagcgctatggccacccgccggtcgaacgggaggcgttgatcgttagcaccactgtccacctgcacatgagcgtcaacggaaggccatgggcttcgatcaatgtgcgcacgaagaacctgaaaaccgggaagtaccgcgtgttctacccgtccgtcgaagtcgccggcaagccgagcgttcgcgttataggcggccaaccgtga

SEQ ID NO: 499331 - DNA, 300 bp, Stenotrophomonas maltophilia
atgagcgcgcctaccgccccgagcttcgccatcatcgaagtgcctggctgcggcatgcgcctgcgcgccatgaaggatgaaggcggttggagtgtctccggctggcgccgcacccacggcgccaaggccatggtcatgttcgcagctgcggatgccgcgccgaccttcagcgagaccgcaggccagcaccacgttattgccggccgcacctacatcgcagtcccgcctgcaagccggaagaagctgcaggcgttcattgcctccaccgagggcgcaagcgcccaaggcggtgccgaatga

SEQ ID NO: 499332 - DNA, 216 bp, Stenotrophomonas maltophilia
atgagcgccgccctggcccaccactccaacgctcagcgcgccgctgcagccgcaggcatcgtcgcccgcgccgggcgccgctggggcctcctcccctaccaggtcgtcgtcgccgccagcatcgccgccaatgccgtcctgcggcagggcaagagcgctgcaggcgccgtcgccgctgtccgaagcgcagcgcgcgccaaaggcggtgctgcatga

SEQ ID NO: 499333 - DNA, 192 bp, Stenotrophomonas maltophilia
atggccaccctttccctcggcgtccgccagtcgacgccaaccgtcgccgccgacagcctcaacgcgaaggtggtttccgacttgggcgctgcccgcctcctccagtccgctgacgaagccgagcgctatgccggccagctgctggaagccgccaagcagctgcgcgccgcgcagcagggcgccgccgcatga

SEQ ID NO: 499334 - DNA, 342 bp, Stenotrophomonas maltophilia
atgagcaaaacggacgcgctgctgcacaagctggtcgaacggataagcgccgcgcctgataggaagcccgcgctccgcgcggttgtgggcaagaagtcgacgcacttcgatgcggtggcgcgagagagtcatctgcggatgatccgcagccttgccaagacatatcgcccctttggggtccaactgatcatcgatcaggcaacccttgggcacgcctctattgatgacctcggcgacgaggatctgatcgaactgcaccgcgcgctcgaccgcgctcgggaatgcataagggacgatgtttcttttgaagatgctggcttgatccggcacacgtttgactag

SEQ ID NO: 499335 - DNA, 1053 bp, Stenotrophomonas maltophilia
atggagatcaacaagtcagggacgacggccagggacggcctttcaggcggtgtcgactggggcaatgcgacccacgtcggggtccgcttcgacgcaggacgaaggcgcgacaacttccgtgccgaggacggcgagaacgcttgggaaggcaggcacagcggcatcgagttcccacgcggcgacacgttccacgggaagcgccaaaacgacagcgagatgtgcgtcgttggacagaccgagcttggccagaagatcccgtttggtaacgggggcgagtccagcgatggggccgaagatttccggacagaggtcatggcgcgaaacgcccgtgaccgattcgatggggattgccattgctgggggcacgcgcccccgcgagcgccaattgctgacagcgctctggcgaacaccaagatgggaggcaagggatgtgaccccgccggcggctttcacggctctgtcgagtgcgtccattcgcggagaatcacatatcgtgatcctcttagcaacacatttcgtgttagcgacttatcacataccgtgaagaatcccggtatggccttctccgacaacctccgcgccgcccggctcaaggcaggcatgacccaagaagccttggcactcgcgtgcggctggtcggggcagagtcgtattgccaactacgagtcgtcggccgccagcgcgcgcgagcccaaggtttcggaagtgcccctgttagctgccgcgcttggggtcagcatcgcgtccctttttggggaggccccggcgtctcagtccccgcgaccggatcctgcaatccttgccgaaacccaccggttcctggacaaggcgttcggtacgcttggaaaagctttcgacatcgaggccgaggcagatctgtttgccgacgtgtacgagtggatcctgtcggatgagcgacccgcagatcagcgcaacctggtggattttgctgcatggcgcgaaaagcgcgattcacaaaggggagctgtaagaaatgagcaaaacggacgcgctgctgcacaagctggtcgaacggataagcgccgcgcctga

SEQ ID NO: 499336 - DNA, 531 bp, Stenotrophomonas maltophilia
atgacctgccgcacatccgctctcaactggctcgacgttctctacaactccgtgcgcaaaacgccgggtggtgtagtggacgcggccgctttcctggccgaccgccgcggcaaatccatgcacccggaaacgctgcgcgcaaagctgcgcgggctggaaggtgagtctgtgacgatggaaatcgccgaactgctgaccgagtggatgcaggagaaggcaggcggcaacgactacgccctggactggatgcaggcgttggccgggcagttcggcatggccgtcgccacggtcccgccgccgccggagggtggttggtcggacgagattggtgccatccagacgaagctgctggagatcaccacgcgggtggggcgcctgtcgggcactgcggtggatgcgatggctgatcgccagatcgacagcgatgaagcccgcctgatggtggaagaggccaactcgctgatcacgatggcgcaccggctgatccgcaacgtgtcgcgcgctgcagcgaaggggagggcgcgtcgatga

SEQ ID NO: 499337 - DNA, 312 bp, Stenotrophomonas maltophilia
atgaaccatccggcccgagcaaccgacctcagcaccagtcacgaggcagcccactacgtcgttcaatccggcttgcagggtgaccagcaggcggcagcggcgtccgcagtgaagcgccatcccggcctcaccagcaatgaactggcccaagagacccgcatgtgccgctacgtgctggcacgccgtctccccgagctggcagaaaccggccgtgtttggcgtggcccgaagaagccctgctccgtctcgggccgcagcgcctgcacctggtggccggtggccccgggccagaacatgccgctggggctctga

SEQ ID NO: 499338 - DNA, 279 bp, Stenotrophomonas maltophilia
atggacgagaccacccagcagaacgccgcgctggtggaggaagcgactgctgcggcacgcgccatggaagaccaggccgtgcagctgggcgaagccgtcgcgcgcttccggctggcatcgcagggcgtcgccgctgcgccggcacggttggccaatgcaccgcagccacgtcaggtcgcggccgccctgcccgtcaccaaggcagcaccgacacggccgctgcgggcgtcggccgcccagccggcgctggctgccgagggtgattggcaggagttctga

SEQ ID NO: 499339 - DNA, 774 bp, Stenotrophomonas maltophilia
atgtccgacggccacgacactgaactgcatgatgtccacgcggccgacgccgcggacgaacgcttcctggtccgcaacccccgccagctgcggcagctgctgcgctcgctgatcgaccagcgatcactgatcaacgcgcatatcgacggccgggatcgttccttcccgaccgccctgcttgatctcgacgaggacgaagactacctgctgctcgacggcagcccgcaggaggcatcgaaccgtgccgccgagcaggccgaccacctgctctgcttcgcccagcttgaacgtgtccttgtgcggttccgcctgcacgaactgcagcgcgtggacaacgatggccacgtcgccttccgcgccccgttgccggacgaactggtgcatctgcagcgccgcgagctgtaccggctggagaccccggtcaccgactcgccgcatctgctgctgccacccggcgaagcacgtgccgaagcgctgtcgatgcgggtggtggacatcagcggtggcggcctggccgtagtggttcccaacgactgcgccgtattcggcctgcagaagcgctacccggcgcagctgttgctgcccgatggcccggacctggacatcgaactggtggtctgcaatctgctgccacagcgacagcccaatggcatcgaggtcaagcgcgtgggaatgcgctttgacagcctgccgcgcggcggcgacagcgccatccagcgctacatcttccgcatcgaccgccagcgcaaggcgcgccgcaacggcgagctctga

SEQ ID NO: 499340 - DNA, 492 bp, Stenotrophomonas maltophilia
atgaacgacaagaccagctccgccgccagcgccggtggcgaattcctcagcttcaccctcggcgccgagcactacggcgtggacatcctcaaggtgcaggagatccgtggctacgatgcggtcacccgcgtgccggacgccccggactacatcaagggtgtgatcaacctgcgcggcaccatcgtgccggtcatcgacctgcgcttgaagctgcgcctggacaacgcccgctacgacgccttcaccgtgatgatcgtgctcaacgtcgaagaccgcgtggtcggcatcgtggtcgacagcgtgtcggacgtgatcccgctgtcggccgagcagatccgcccgaccccggagttcggcgctgcagtcgacacccgcttcatctccggcatcggcacccacgacgaccgcatgctgatcctgctggacatcgagaccctgctcgacagcgccgacatgggccaggcctccctcgccgaagacgctgccgcctga

SEQ ID NO: 499341 - DNA, 384 bp, Stenotrophomonas maltophilia
atgaagtccctgcttgcgttcgtttcggccgctgtcctggccaccaccgcttcctccgcgttcgcccaggcggccgacatgatcccgccggaactggccccgcgttcggtcggcaaggacggcatggtctgtggcaaggtcgaaaaggcccgctacgcagaaggttccgaaggccagccgaccttcctgtacatgggcggtgccttcccgcgccacaccttctcggcccgcatcgccggcgagaaccgcggcaagttctccttcccgctggaaaccctggaaggcaagaccgtgtgcgtgatcggcaagatccagcgcgacgcctcgcgcgcggaaatcgaagtcagctcgccggcgggcctgaagctggccaacatcaagtaa

SEQ ID NO: 499342 - DNA, 2361 bp, Stenotrophomonas maltophilia
atgccgtggatcaacaacctgaaactgatgccgaagctgctgttgaccttcggcgtcctcctgctggtgatgctgctgcagggcatcgtcgcctatcgcggactgcattcgctgaacaacgtcaccaccgagttggcgggttcgcgcatggaaagcatccgcatggccggcgagatgcgcggcatgctgggcgagtaccgcaatgccgcctaccagcagctgatccgcgccagcgatgacgtcaagtccgacgcgcgcaagcaggccgtcgacctgcgcaccagcatggacacgtcgatcaaggaatacccgaagctggtcgacaacgcgcagcagaagaagctgttcgataccttcgccaaggaatggaaggacgccctggcctcctacgacagcgtcaccgagatgctggagctggaccttccggacgatgccatcgataccttcgtgggcgagacccgcaccaagcaccgcaaggctgcatccgcgctggaagcgctgatcgccgaagacaaccgcctcgcccgcgcctcgcgcgaagaggccgcgtccacctattccgcctccgccgtgctgaccgtgatcgccctgctgggcggcgccgcgctcggcctggtgctggtctggctgttcgcgcgcgccctggtcggcagcgtgcgtggcgccgtgtcggttgccaacgacgtggccggcggcaagctcgatggccacatcgacgtcagccgccaggatgaagtgggcgaactgatgcaggccatgcagcggatgcagcgcgacctgcgcgaacgcatcgaaaccgaccaggccgttgcccgcgagaacctgcgcatccgcaccgcgctggactacagctcgaccggtgtctacctgaccgataccagcaacaccatcgtctacagcaaccgcgccctgcagcagaccctcagccagtaccaggatgaagtacgccgcgacctgccggacttcgacgcccaggcctcgttgatcggcaagccggtcaccgtgctggaacaccgcggcgagatggaccagacgctgttgggcaacctgaaggcccacggcgtcgcccgtcgcccgatgcagtacggcgatgcccagttcgcgcaggtggtgtcgaccatccgcaacgaaggcggcgacaccgtcggctacgtggtggaatggcgcgaccgcacccaggaagcactggtcgaagccgaagtggcgcgcgtgatcgcccaggccgccgccggcgacctgtccggccgcatcgacgccagcgacaaggaaggcttcttcctgcagctggcccagcagatcaacggcctgctggacgccaatgccggcagcatcgaacagatctccggcctgcttgccgcgctgtcgcagggtgacctgaccgtgcgcatgcacggcgactaccagggcgtgttcgcccgcatgcgcgacgacgccaacgccaccgccgcgcagctgagtgaaatcgtcacccgcatcaagcagtccagccgcgcgatcagctcggccgccggcgagatcgcctcgggcaacagtgacctgtcgcgccgtaccgagcagcaggccgccaacctggaagaaaccgctgcctcgatggaggaactgacctccaccgtgcgccagaacgccgagcacgcccgccaggccaaccagctcgccatcggcgcgcacggtgtcgcttcgcagggcggcgaggtggtcggccaggtggtcaccaccatgtcggccatcgaagcctcgtcgaagaagatcgccgagatcatctctgtcatcgacggcatcgctttccagaccaacatcctggcgctgaacgctgcggtggaagccgcgcgtgccggcgagcagggccgcggcttcgccgtggtcgccagcgaagtgcgtaccctcgcccagcgttcggccgctgccgccaaggagatcaagggcctgatcgacgattcggtcggcaaggtcaacgacggctcggcgctggtgcacaaggccggcgcgaccatgggcgagatcgtcgcctcggtgcagcgcgtgaccgacatcatggccgagatctccgccgcctcgcaggaacagagcgccggcatcgagcaggtcaaccagaccgtggtgcagatggacgaaaccacccagcagaatgccgcgctggtggaagaagccactgctgccgcgcgtgcgatggaagaacaggctggtcagctcagcgaagcggtgtcgatcttcgtggtggacgaagcagaggtcgtcgccgccccgcgcgtcaccgccccggcgccgcgcgccgctgcaccggctgccccgccggcccgccgcacggcgggtggtcgcccgatggccaccgagctggccgacggagactggcaggagttctga

SEQ ID NO: 499343 - DNA, 309 bp, Stenotrophomonas maltophilia
atggccgttccgaccctccagcgttgccttggccaggtgcacaaccgcaagcgccatagcgcgcagcacccccagcgaaagaagtccatcggggtgctggtgcaggactgccacatgttctccacagcgtcgcgagtgggggctatccaggtacaggatcctgactccaggcgtgagtacctgatcgaggtgtggatccacaccggcgtgctggtgatctcgcagagcaccgacaagcgctggctgctggaactggacgagattctcgacctggccatcgccgccggcattgatcggggggccatctga

SEQ ID NO: 499344 - DNA, 246 bp, Stenotrophomonas maltophilia
atggctgatacgccccccagcaacaacggactgcagcatctgcgctggttcgccgaaagcctgatgcgcgatgccgagcttccggatcgtcaggtgacggtgatgcaccgagacctcttccgccgcgccggaattcaatggcgcgacggacaggatttggtggaactcttggcttcgttggacctgcagcagctgagcagcctgatcagccagctgcgcgacggcgatgacgacgaggaggaatga

SEQ ID NO: 499345 - DNA, 237 bp, Stenotrophomonas maltophilia
atggcgattcgaaccgaaggttggccggccgtcgaaggtatggtggttgaaccgatgacggcgcagtggccgcttgcaacgcgtgttgtggcggttccctttgaaatgcaggaccgtccggcgccggtgaatgtggacatcctgcaggtggtgatcgtgccgcgcgctaactgggagcgcatcaccgcgcatgttccagctgatgtactgcagcgtgagggggtggctcatggctga

SEQ ID NO: 499346 - DNA, 399 bp, Stenotrophomonas maltophilia
atgcgcacggatctgaccgcctcgctccaaaccgcactcggtcttgtcgctgatgaacgtcgccggcagatcgatgagaagggctattccgccgaacacgacgacgagcatgcacaagaggagctcgcagcagctgcagccttctacctgcttccgtcgtggatgaaccaggacgttgtgagtgtcgatgcgaacggtgcaatggagatcgcgccgctccagcagctggtcgccggcagtgcgttcaaccccagcgcttgggaaggcctcactcgactggaggacgacccggaaggcgatgttgatattcgcatccagaacatcgttcgaggcctcgcgcttggcactgcagagctggaacgactgctgcgtcttcgcgacaaccaggagggcatctga

SEQ ID NO: 499347 - DNA, 1176 bp, Stenotrophomonas maltophilia
atgacgctgcgtctgaagcgcctgctcaccgaggccggcatcaagcagggagacctggccagcgctgcaggcctgagtcgtccggccctcaatgccttgatcaatcacggccagcttcccaccagttgcgacccggcagcggtgcgcgctgccatcagttcctgcctgacccagcacggcgtgaccgacgcccactggcatgaaaaggaggggccgacgtgcggggtcacgccagccccggtttccccaccgcaagacaccgataacgacaacgacattcacgacgaggaagatcccatgctactgcgttttcaggctttgactccacaggccaagcgtcacttcggcctcaccagcaaccccttcgccgatccgaccagcgccgaagaggtgttcctgtcgccggatatccgctatgtccgcgagagcatgtaccaggttgcccgccacggcggctttgctgcggtgatcggcgaaagtggcgctggcaagagcacgctgcgcgaagacctggtcgatcgcatccagcgcgaagagcaggcggtcattgtgatccagccctacgttctggccagcgaaggcagcgatgcagtgggcaagaccctgcgcagccaccatatcgccgaggcgatcatggctgccgtcgcgccgctggccaagcccaagagtagccccgaggcccgcttccgccagctgcacgaatcgctgcgtgacagcgctcgcgccggccacagccacgtgctggtgatcgaagaagcccacagcctgccactgcccactctgaagcacctcaagcgcttccgcgagctgaaggacggcctgcgtccgctgctgtcggtcatcctgatcggtcagcccgagctgggcgtgaagctctccgagcacaacccggaggtacgcgaagtagtacagcgcatcgagatcatcacgctgccgccgctggataacgagctgggagcctacctggcacaccgcttcaagcgcgcccaggtgccgctggacaaggtggtggaccaaggtgccatcgatgcactgcgcaccaagctggttccttcgcgcggcgccgggtcgctgctgtacccgctggcggtccagaacgcactgaccgctgcgatgaaccgcgccgctgacctgggcgtgccgaccgtcaccgctgacgtcgtgcggggggtgtga

SEQ ID NO: 499348 - DNA, 1815 bp, Stenotrophomonas maltophilia
atggccctcagcgccagcttgatcgagcaggccgctgctgacctgctctgcgccgggcatggccagaagcgtgccattgccgagcgatacgctgccgaatggggctgcagcgtacagacgttgtaccgacaggtatcgaagctgacctgttcgctgaagcctcgcaagcgccgcagtgatcggggcaattccgactggacccagcaggaactggaactgatttccgctgtattgctggagtcgcgtcgcggcaccggcaagcgcctggccagcatcggcgaggccatcgacatgctgcgcgccaatggcatggtgcgcggcgagactgtggataccggcaccggcgagatccgactgctgagcgagagctcggcagccaaagctctgcgtaccaaccgcctgcaccctgatcagctgtcggcacccgcgccgaaggtgcagctggccagtgaacaccccaaccaggtgtggcaggccgatccaagcctgtgcgtgctgtattacctcaagcggcaggacggcctgcatgcgatgccggcaagcgagttctacaagaacaagcccaagaacctggctcgcgtggagaacgagcgtgtctggcgctacgtgttcaccgatcacaccaccggcgccttctatgtggagtacgtgctgggcgccgagagcggcgagaacctgtgccgcaccttcatcaatgccatgcagtaccgcggtgcggctgacccgttctgcggcgcaccgatgatggtgatggtggaccctggcagcgccaatacgggcgcgatgttcaagaacctgtgcgccgccctgggcatccggatctggatcaatcagccaggccagccgtgggccaagggccaggtcgaaaagaccaatgacctgatcgaacgcaagttcgagcaccgccttcgcttcgacaacgtgcagagcctggagcagctcaacgcttcggcgtggcgctggatgcgcaacttcaatgctaccgctcagcacacccggcacaagtcctcgcgttaccaggcgtggatgaccatcaagcccgatcagctgcgcctggtaccggcggcagaggactgcatgaagctggccacccgcgccccggaactgcgcaaggtcaatccgctgctgcgtatcagcttcctgggcaagacctttgatgtgtccggcgtgccgggcgtgattgtgggccagaagctgaccgttgcccgcaatgccttcggcagcgaattcggtgcacaggcactgtttaccgacgatgctggccgcgacacctggtacacgatggagccgctggaggcggacgcatacgggttcaccggtgcagtggccgtcggcacataccgcgcgcatgccgatactccggcggacacgaaccgcaagcgggtcgagcgcctggcgatggatgccgagaccgacgagcaggccaaggcgcagcgtaaagccaaggccatgccgttcggtggccgaatcgatccctacaaatcggtgcaacaggcacctgagattcagcacctgccgcggcgcgggcatcgggtggacgttgcggtccccgatgtggtcgaggcccctcgcttcacggttgattcggtcacgcccatccgcgcggaactgccgcccctgaaccatgtggaagcggccatgcgcctgaagcctctgctggaggcggcgggctcggcctggacggcggatcactatgcccgcaccgcccagcgctggccggaaggcctgcctgtggatcaggtcgaatcctgggcgaagaccctggcaacgcctgagcgtggcggtctgcgcctggtggaaggaggtgccgcatga

SEQ ID NO: 499349 - DNA, 936 bp, Stenotrophomonas maltophilia
atggcagagaagcaacccaacaagcgcggcgccaagccgctcgcccaggccgagccggttgtccaggatctggacgcggacaagctggccgagcgcagccaggagctggtcaccctaggtgagcaccagagcgaggtggtggatcagttcggtgacggcctgccgtggcacccggaccactacgagaacgccattcgcagcgaactacgccgtggctgcgaagccttcttgcgcgccggtcgctacctggtagtggcccgtgaatgcgcgacgcacggcgattggcagggaatgcttgaacgcctgagcattgagcccagacaagcccagcgcatgatggaggccgctcgtcgcgtctccatgctgccaaatgcgtcgcatgcgacgcatttggtggcagccaccaagacccagagtcggctgatcgagctgctctccctcccagaggagcagttcaccgagctcgcagaacagggtgagacaggcggcttgtctctcgatgacgtcgagacgatgtcccgcgccgagctccgcgccgcgatccgcgaagcccgcgccgatgctgatgccaaggatcagcgcatcaccaagttgagcgacgatctcaacagggcggaggagaagacggcaaaagcccagcggaagtggaagaaggccacgccggacgagcagtcgcaggagctgctgacccagctggagcaggcggccgcccaagtgcgcatcgctatcgccagtggcagcgaagaagccgggttcagcggcgcagtgatcacgctcatgcagcacgccgagcagcacgacctcaatgttgacgaacaggtggccgggatcatcgccagcctgatcaacgacctgcgccttgtccgcgaccaccaggaggtgggcgtcacggtgattcatgaccgccgcctggccgactggaagcgggagggctga

SEQ ID NO: 499350 - DNA, 744 bp, Stenotrophomonas maltophilia
atgccggctgtcacgacggtgaccctcaccggtggcacgtggctcagtgcggaccagggctcggcgctgttcgacggaaagcctggcagggcgtctcggatccgccgcaccagttcgctggcgatcacgatcaccctggccgaagctgttgtgccggggatcatcgcgattctcggcctcaacattccgcccggcgtccaggtgagcgccgccggcgcgagtgccaccaccgtgcgactgccagacggcagtgtctgcgcctggctgttccctcaggccagcgccttagtatcgacggtgtccgtcgagatcgccacaactgccaccaacgtggacgtgggcgagatcgcgatcttccgggcaattgaggtgggcatcagcgacggctgggcggtggccacaatcgacaccagcttgcacaaccgcaccaagggcgcccaggtgaacacggttccagggcgtctgtaccgcaggctgacctgcactctgtctggccgggcgactgccatagtgcgcggcggtggcctgggtgggaccgattgggaaacggtggcggcagcgatcgccgggcgccggcgctcctgtgtggttccgcagttccgggacatggtcagcaaggcgttcgacccgctgctggcggcgcgctcggcgctctacggctatccgacacagctgccgtcggcggagaacatcagccggcagtacttctccggatacatggagtttgaggaaatcccggcctga

SEQ ID NO: 499351 - DNA, 327 bp, Stenotrophomonas maltophilia
atgattgaacacacgagcaaagtcgatgttccggagggggggggccggccggaaaagctgccagccaaggctggatctgcgctggaggacgtgggccgattgatggtgctgctatcgctggttgcgggagtggttggcgtgttcgcctttgggcgtgtgcctcgcgttacgtcgtggggcggggtttcccacgactggaacctgctcaacgtgttcgcggtggtgctgagcaccgggtgggcgctggccatgtcatgggccgtttaccgactggggaccgccctctgctggcttgagcgtatcgggaagaaagtcgaagttgaatag

SEQ ID NO: 499352 - DNA, 744 bp, Stenotrophomonas maltophilia
atgccggcagtcacgactgtgaccctcaccggtgggacgtggctgacagcagaccagggctcggcgctctttgacggaaagccggggcgcgcgtcgcgtatccggcgcaccggggagctggcgatcacgatcaccctggccgatgccgtcgccccggcaatcattgcgattctcggcctcaacatcccgcccggcgtgcaggtgagcgcggtcggcaccagcggcacgacggtccgactgcccgacggcagtgtttgcgcctggctgttcccccagtcggcggcgctcgtatcgacggtgtcggttgagatcgcaaccacggccacgaatgtggacgtcggcgagatcgcgatcttccgggcggtggacgttggtatcagcgacggctgggccgtggccacgatcgacgctagcacccacacgcggactaagggtggccaggtcaataccgtgccaggccggttgtaccggcggctgacctgcacgctgtccggacgctccacgccggttgtgcgtggtaacggcctcggcgggatggattgggagacgatcggagccgcactggcgggccggcggcgctcctgtgtggtgccccaattccgggacatgctcacgaaggcgttcgacccgctgctggcggcgcgctcggcgctctatggctttccgatccagctaccgagtgccgagaacatcagtcggcagtacttctcgggatacatggaatttgaggaaatccctgcgtag

SEQ ID NO: 499353 - DNA, 330 bp, Stenotrophomonas maltophilia
atgaaacatgcaatcaggtgcgcgtcggcactgctgctattgacggtagtgggttgcacgactgcaaaggacgacggtgcgaaacaggccctgctgaactgcatgagcgcgattcaggctgcatcagcggacccgaggagcgccaaggtccccttcgtgaaagacatgggttcggcgggcgagcattacttcgcctggccattaggatctggcctggttctacctacaaccgacggctccgcgaagccagcttctgcgtcctgcatcaccaacgctacggggaccgtgacagatatgaccatcaacggatcggagatcccgattcgctga

SEQ ID NO: 499354 - DNA, 1839 bp, Stenotrophomonas maltophilia
gtggatgctagagccggagaggatcgatgcgaccttgtcgttgaagccgagaccgcggaacgtcttgtcggccaggcccacagcgccggccgttgcgatcttgccggcccagctctctccgttggcgatgttccagccctgatcgaacaactgggcgttcttcatcatgccggccacgatccagccgatgatcggcaccgccgccgccgcggagcttgccgcgcccgctgcgccggcgccggtgcccgcactgccgccgccaatcagccccgagaagctggagccggtcatccctgccatgctggtcacatcaccgaagccgttaagggtccctgccgccgcgccggccgagcgcccgaagccgaacaggccctgacccttggaaagcaggccggccacggtgctcacattctgcccgccggccgccgagccgttgccgcccaaaacccccatcaaactctgaagactgagccctccgccctgcccgctgattccattgaggatctgcgtctggatcgggatcaccagcttctgctgcagaaactcgcgtgccaggtcgcgcaatccgcgtttggccgcgtcctgcaggtcatcccacagattgtcgaagtcgcgcatccccccggccacgaagtcggccatggcatcggcggcatcgccaacgccgtaaacgagcacgctggcccacgcctccacgttcgcggccgcttcttccacgcgcagcgaaagatcggcagacgcacgcgctgcggcgagcatggcctgctcgtaggcctcgtaggaagcaacgcccttcctgcgggccaactcctccttgctgcccgccgcctccacggccttctgcagctcctgccgcatgtcgcgctcgttcatcatctgccggcgcgacagttctcgggcacgacccaccttgccgagcatggccacctcggtgtccatggtcgccagcagcgattccgggctggccagggccttcttgatctcagcgctggactgctccagcgccttctgcgactccaggaccagcgtgttatacgccgcccgctcgatgcgcccttccttcaccgcttccttcagcttgtcctcgagctgcttctgtcgctcggtggcctcagccagtgggccagccatggtcgcggccgccatcgccgcctgctcgttgtagcgcttgatcgcttccgcgtctgccttgcgatccttggcgcctgcgcgttcagcggccgccgacgctttgcgcgactccgtgaagttcttctgcgcagcggccagctccgtctgcagccggatgtactgcgcgccctgctcgatgtactgcctgaccttggggtcatcgcgcttggagaagtcgacgccgctggcctgggcctccttgaaccaatcgcccacgtccagctttgccacctctgcggcgctcttaccaacgcgtgcgagctggccaggcagcgactgcatcgccgaggcaatccgcttcccggcagcgccggccgagtcccccaatgcgttgaacgaacccgacagagcatcggttgcagtcgttgcttggttcgtagctcccgtgaatgccgtcaacagacggttctgctgttcatagctctgagccaaggatgcagcggaagccgtctgttcagtgaacttgtcagcgatgcgcttggcagccggagcgccttcaagaagctgcgtatttgcagcagcaagcgatgcgctgaactggtccgcagtaatcttccctgcctgaaactctgctcgaagctgcccaacttcttggacgtagagcttgaaacgcggaccgccaatctccgtgctggacacggccaccatctgatttacagcagcgtttag

SEQ ID NO: 499355 - DNA, 177 bp, Stenotrophomonas maltophilia
atgcgccgtgacccgctgacgaagaagaatcaggtcgcggaagtgctcaaggccggtggccatatcgtgcctggcgcccgtcccggcctgctgcagctgctggatcatgccggccaggacgtgccggcatggcagaccgccctccgagccgcccaggccgcaaggagcaaggcatga

SEQ ID NO: 499356 - DNA, 627 bp, Stenotrophomonas maltophilia
gtggatgagaccgtatatgacgccgcatggcgggcctacaaggcagcacctcgtgcggtggtcaatggtccctcgcgctcggcagtgagggctgcagtggatgcgacccttgccgcatgccagccggcaggcatggttgtgccgtatgagcgggcactggatctcgtcgaagatgcttataacgccggcgggcgccgtagtggctacaaccagcaagcaatggacctgcatgacgccatcatgggagccacgccggcccaaggctgggtagtcgccgacggacaaggcacccgctggcggaaatggggcgacttcggtcccgagtggacagccgacagggacgcagcgctgcacttcgctcgccgcaccgacgccgaggccttcgccaaggaggatgaagacgcatggctgattcagccgatctttgtgccgaccaaggccctggagcggcatcactgtgtaccgccgatgtggctgagcgaacagattggaggccctcttgatgatctgacgcccggtcaggcatggcgcgacggcttcaacgagtgccgcgcgaggacgctgttgctgatccagcaggaactgaccgaaaccggcagcgaagaggggaccactgatgcgccgtga

SEQ ID NO: 499357 - DNA, 918 bp, Stenotrophomonas maltophilia
atgttgatgcgtaacctggtgctgttccgcttcccgaccagcaccgacttctccgaagtcgaatccgtgctgccgcatggcgtgctgaagccggtcggtccgctggaaatgaactcgcgcggcttcatttcccccttcggccgcgaggagcaggagctcctgtcctgccggcagggcgatttcctttggttgaccgtgggcggcgaggacaagatcctgcccggcgcggtggttaaccgtgcgctggagagccgtcttcaggtcatggaacaggaacaggggcgtcgaccgggtgggcgcgagcgcaagcgtatgaaggacgacatcctgcacgagctgctgccgaaggccttcgtcaagaacagccgccacgacgccatcctggaccttgccaacggctacgtggccgtggatacctccagccgcaaggtggctgaggccctcgtgtccgacattcgcggcctgctcggcagcttcccggcgatgccgctgaacgccgaagtcgcgccgcgctcgatcctgactggctggatcgctggtgagccccttccggatggcttgtccctcggggagtccgccgagctgcgcgatccagtcgagggtggcgccaaggtgcgctgcagcgaccaggagctgcgcagcgacgagatcgacaagcacctggatgccggaaagcaggtcacccgtctggccctggtgctggaggacgcgctgtccttcgaactgggcgatgacctggtggtgcgcaagctgaagttcctggacggcgcgctcgcgcagctggagcacgccgacgacgacggccgccgcgccgagttcgatgcccgcttcgccctgcagagcggcgagatccgccgcctgttcctggtgctggaacaggccttccagctttccgatgcggaggtgcggcgtggatga

SEQ ID NO: 499358 - DNA, 249 bp, Stenotrophomonas maltophilia
atggcacagatccaacttactcgccccagctgcgaagccatcttgcagaacccggacagcgacccgtgcgtacgggcagtggcggcactgggagtcgccttcttcgaagtcaacgatcaggccgggaagctggatggtgctcatcggggcatctgcctgaagttgatctacatgtgccaggaggccatccacaccgccgagcgcgagcaggccgaagaagaagaggaggacgacgatgttgatgcgtaa

SEQ ID NO: 499359 - DNA, 306 bp, Stenotrophomonas maltophilia
gtgatcgcgtactgctgggccaatggccagatcgggttcggcacgagcgtgccggatggtgcgattttcatcgcagaagggagcgacggacagctgcgcaaggtgatcagcgtcgttgccaggcacggaaaggggctgatgcaggggatgctggtcgtgccgggtgtgccagaggcggagacgcagcaggcaaaggttgacgcgttgggcgcctggttggcgtggtgttcccagcatccgcgccgcctgcgttggggaggggtgagtgccaatagctgctgcaccggttccaaggagaacgtctga

SEQ ID NO: 499360 - DNA, 711 bp, Stenotrophomonas maltophilia
atgccgaagatccgagacacctgcaccttccgtttcgacggcgttcgcggtgcactcaatgccagcaccttggcgctggcggtggagatcgccgaccgggctgcacgggccgacgtggaaatccacgcaccggccgtggagctggatgggctgcgcttcttcgatgccaactgcggcaacgtccagggcgaagacgcgaccgctgctcgttatgccatccgccaagcggtccggtacatcgaagcgcgcggagacgtgttcccttggtgcctgaagcgtcatatctcccagccgggcctgttgcacttcgaagagcgtatcgacgttgaggtggccaccttcggtccgcgccacgcgtgcgtcaactgcgacatgcccaccggtgccgccgcgatgcccatgtgcggtccctgcgcccagcaggcggtaggtgcgatggcgtctaccacggctgacgcgctccggagcatgaacgggctcgacttcatatgtggcctgcgcgacccgcagacgaagcggaacgtggccacagctattgctcggcaggttgggcatggcatggctgagaagtgcgaagcccaagccgaagcggccctcaacgccattctcgagctgctgctccaccagccggtgctggtgacacaaggccattttccactccacctcatcgacctgctcaagaacggtgccggaaaggaggtgcactcgtga

SEQ ID NO: 499361 - DNA, 612 bp, Stenotrophomonas maltophilia
atgaccccatccatccccgaaggctaccgcgaggaccgtaacggtcggctggtgcccgaggcacagatcaagccgatcgatctggcccgcgaccagctggtgcaggagaagatcgagcgcgccctgcagctgcgcgaagaactgcgcacattcaaggcggacaccttcgctgacattgcggccttcgtgcagctcagtggcgagcagtacggcgccaagatcggcggcgacaagggcaacgtgagcctgtacacctacgacggccactacaagatcctgcgcgcctgccaggacagcatccagttcgatgagcgcctgcaggcggccaaggccctcatcgatgagtgcctgaacgactggaccgaaggctcccgtgccgagctgcgcaccctggtcaacagtgccttcaaggtaggccaggacggcagcatcaagaccggcgaggtgctctcgctgcatcgcctcaagttcgatgatccgcgctggcagcaggcgatgaaggctatcagcgatgcggtcacggtggtgggcagcaagacctatgtgcggttctacgagcgcgacgcacgaggtcagtaccagccgatatctctcgacgtggcgggggtctga

SEQ ID NO: 499362 - DNA, 255 bp, Stenotrophomonas maltophilia
atggcacgtaccggccgccagcgctacgaccaccttcgcgcgatgcgctttgcgctgtgggcgcgtacacagaacccgcgccagctcaccccacagcgcatttccggcctgctcggcatctcgctggatgccgcccgccgctggcgcgccgactggttcaccgccaccagcccgatccacgtcgaaggcgtccccgacgtccttcggcccactcaaccgcttgtcacccccgccgcccaaggaggcgcccaatga

SEQ ID NO: 499363 - DNA, 480 bp, Stenotrophomonas maltophilia
atgagcgccatccccagccccgcgctgcagcatgctatcgccctgtcgctcggcgccagcgtggtccggtctgacgacctgatcgaccgggtgatggagcacggcttccagtaccgcggctacgtgtccaacgcggtcgccaaggcggtgcgatgcggaatgatcctgcgcgttggcgaagggctggcccgcaactaccgcctcaaccccgactggaagatcgacccgacggcgttggccgccgcgcaggcacagcgcgtgcgcggcactcggccgggtacgacagggacgcagaaggcccaatctgctgctggcggctacaaaggccccgccttcgacaaaggccccctgacgccgtccatcggcaccgtatgccagtcccaggaggatctggaaggtgagctgccgccttacctcggtggccgcttggtcgattcactgcacagccacttcgatcgcatcttcggcggggtggagtga

SEQ ID NO: 499364 - DNA, 228 bp, Stenotrophomonas maltophilia
atggctgaccgtggccagttcctggtagtcccggccgagtgggtgggcggtgacgccttcaccgatccggccccggccatcgcggatgccgaggcacgcagcaaggtcgacggcaagcaccgcgccgtggtctgcgtcgtcgcccgcaccacgcccaacccggcgccggtcatcgtgctgacccgctccgaggccggcgtcacccaaccgcaggtggttcagccatga

SEQ ID NO: 499365 - DNA, 240 bp, Stenotrophomonas maltophilia
atggctgatttcaacacctctggggcgcagtacctgcgcagcttcgccttctacttgatgcgcgatgccgagctgcccgaccggcaggtaacggtgatgcaccgcgacctgttccaccgtgccggcatcgagtggcgcgacggccagggcatggcctcgctgctggacaacctcaacctgcagcagctgcgagcgttggtcgaccagctgcgcgacggcgatgacgacgaggaggaatga

SEQ ID NO: 499366 - DNA, 237 bp, Stenotrophomonas maltophilia
atggcgatccgaactgaaggctggccggccgcagagggcatggtgagggtaccggagagcgaagcgtgggcgttcgcaaatcaggtcatcctgattcccttcgaaattcaggataagcccgagccgatcaacgtggacatcctgcaggtagtgatcgtgccgcgcgccaactgggagcgcatcactgcccatgttccggccgatgtgctgcggcgtgaaggggtggctcatggctga

SEQ ID NO: 499367 - DNA, 399 bp, Stenotrophomonas maltophilia
atgcgctcggatctgaccatttcgctcaaaactgcccttgaccttgtcgctgatgaacgtcaccggcaggtcaatgagaagggctattccgccgagcacgacgacgagcacgcgcaggaggaacttgcagcagctgcggccttctatctgctcccgtcgtggatgaaccaggacgttgtcagtgtcgatgcgaacggcgcgatggaaatcgccccacttcagcagttggttgccggcagtgcattcaaccccagcgcctgggagggcctcagtcgactggaggacgatccagaggatgacgttgagacccgcattcagaacgtcgttcggggactagcccttggcaccgcagagctggaacgactgttgcgccttcgcgacgaacaggggggctgctga

SEQ ID NO: 499368 - DNA, 1176 bp, Stenotrophomonas maltophilia
atgacgctgcgcctgaagcgcctgctcaccgacgcaggcatcaaacagggcgtgctggccacagctgccggcctgagccgaccggccctcaatgccctgatcaatcacggccagctgcccaccagctgcgatccggcagtggtgcgcgctgccatcagttcctgcctgacccagcacggcgtgaccgacgcccactggcatgaaaaggaggggccgacgtgctccaacacgccggccccggtttccccaccgcaagacaccgataacgacaacgacattcacgacgaggaagatcccatgctactgcgttttcaggcattgaccccacaggccaagcgccacttcggcctgaccaccaatcccttcgccgatccggccagcgccgacgaggtgttcctctccccggatatccgctatgtccgcgagagcatgtaccaggtggcccgtcacggcggctttgccgcggtgatcggcgagagcggtgccggcaagagcacgctgcgcgaagacctggtcgatcgcatccagcgcgaggagcaggccgtcatcgtgatccagccctacgtgctggccagcgaaggcagcgatgcggtgggcaagaccctgcgcagccaccacatcgccgaggcgatcatggccgccgtcgcaccgctggccaagccgaagagcagccccgaagcccgcttccgccagttgcacgagtcgctgcgtgacagcgcccgcgccggtcacagccacgtcctggtgatcgaagaggcccacagcctgccgctgccgaccctgaagcacctcaagcgcttccgcgagctgaaggacgggctgcgcccgctgctgtcggtgatcctgatcggtcagcccgagctgggcgtgaagctctccgaacacaacccggaggtgcgcgaagtagtacagcgcattgaaattatcacgctgccgccgctggacaacgagctgggcgcctacctggcgcaccgcttcaagcgtgcccaggtgccgctggacaaggtggtggaacagagtgccatcgacgcgctgcgcaccaagctggttccctcgcgcggtgcgggctcgctgctctacccgctggccgtccagaacgcgctcaccgccgcgatgaaccgcgccgctgacctcggcgtgccgaccgtcaccgctgacgtcgtgcggggggtgtga

SEQ ID NO: 499369 - DNA, 1803 bp, Stenotrophomonas maltophilia
gtgtccgaggtcctcatccaggctgcggccagccagttgctggcggcgccgcacggcagcaaggggcgcatcgcctccgcgctggccgagcagctgggatgctcggtccagacggcctaccgccacctgtcgaaggtgacggcggccctcaaaccccgcaagcgcaggtccgatgcgggcgaactgtcacttacccgtgacgaagcggcctcgatcgcggccatcgtcgaggaaacccgtcgccttaccggtaccggtgcgctgccggtcgaggaggccgtggatgccttgcgtgccaacggcaggatcgaggcaatgcgcgtggacaaggcgacgggcgagattgtcccgctgagcacctcggcgatctgtcgcgccatccgccattacggcttccaccgtgaccagctggcagcggccacaccggctgcacggctgtcctccccgcatcccaaccacctgtggcagatcgacgcctcggtcagccgccagttctacctggctgatgacggcacacgggtgatggacaagcgcgagttctatcgcggcaagcccggcaacttcaccaagatcgcagaacgccgcctgtggcgctatgccatcaccgaccacgccagcggtgcgatcgagctgttctacgtgctgggtgccgaaagcagcgccaacctgctgtcggccctgatccacgcaatgacacggcgcgaaatcggcacgatgcacggcgttcccaagttgctgatgatggatcccggcagtgccatgacggccaccagcaccagcagcttcctggcggcctgcgggatcgagccgatcatcaatgaagtgggcaatgcacgcgccaagggccaggtcgagaacgcgaattacctgatcgaaacccacttcgaggccctgctcaagctgcgtgcaccggtcaccagtctggaggaaatcaataccctggcccagcagtgggcacaggcctacaacgccacccgcatccacagccgcaccggctacacgcgccgtgatgggtggctgcgcatcacccaggaccagctgcgcctggcaccggccgtggaagtgctgcgacagctggccaccagcgcgcccaaggcctgcaccgtacgcgattgcatgatccgcttccgggcacagcagtacgacgtgcgtggggtgccgggactgatcaacggtcagcgcgtagacgtggtggtcaatgctctggatccggagggcagcgtacgcgtgctgatgccaggcacacaggactgcgcgcctgtgcactacatcgcaccgcgcatcggacgcgacgactggggcttcctggacagcgctgcccaggttggcacggagtaccggaccgctccggagacgccggccgacgcagctcgcaaggaactggatcggctggccatgcaggtccacaccgatgctgaggccgctgtggcacgcaaggcaaagcgagtggccttcgggggccaagtggatccgatgaagcacctgcgcgaagccaatgtgacgccgagcctgccgcgctcgggacgcatcgcccaggtcgatgcaccacaggtgctggcggcccagcgcatcgagcctgcgccgatccgcgccgagctgccgccactgaaccatgtggaggcggccatgcgcctgaaaccgctggtggaggcagccggttcggcctggtcgcctgaccactacgcccgtaccgcccagcgctggcctgaaggcctgccggtcgatcaggtcgaatcctgggcacacaccctggcagcaccggatcgcggtggcctgcgcctggttgaaggaggtgtggcatga

SEQ ID NO: 499370 - DNA, 921 bp, Stenotrophomonas maltophilia
atggcagagaagcaacccaacaagcgcggcgccaagccgctggcccaggccgagcctgtgggtacggagctggatgcaggcaagctggccgagcgcaaccaggaactggtgacgctgggcgagcaccaaaccgaggtggtggaccagttcggtgacggcctgccgtggcacccggatcactatgagaacgccatccggggcgagctgcgccggggctgcgaagccttcctgcgcgccggtcgctacctggtcgtggctcgggaatgcgccgaacatggtgaatggcagggaatgcttgatcgcttgggcattggcaaggctcaggcgttccggatgatggaagcatccaagcgtgtggccatgctcccaaatgtttcgcatgcgaaacatttgatcgaagccaccaagagccagagccgcctcatcgaactcctgtccctgccagaggagcagttcgctgagctcgccgagcagggtgaaaccggcggactgtctctcgatgacatcgagacgatgtcccgtgccgaactgcgcgccgccattcgggacgctcgcgccgatctggacgcaaaggatcagcgcatcaacaagttgagcgaggatctgaacaaggagcatgagaagaccctcaaggcacagcatcgctggaagagcgccacccctgacgaacggctcgtcacgctcaagcagtcggtcaccgaagctgagcagactgtgctggctgccatcggcggccagggcaatggccttcgcgcggcgatcctggaactggccgacttcgcgtgcgacaaccacgtcgaggaagatgcggcgctgttcctgagcgacgtgatcggccggctcctcacctcggtgcgcatcgcccgcgacgatgaggaactggccatcgcgatccctgtcaccaacgacgcggggatctga

SEQ ID NO: 499371 - DNA, 477 bp, Stenotrophomonas maltophilia
atggatgagaccgtgtacgacgcggcatggcgggcctacaaggctgcgcctcgcgccgtggccaacggcccgtcacgctcagccattcgagcggcggtggatgcggttcttggctacctgatgccgcctggttcgacgccagcgttcttcgccgaccgcgaactgcggcgggcagtggcggcggacctcatggagatgggcagtgagagccagcgcggccactggccggccatgcgggcaacctacaccgtcccgcttttccggctcccgccagagctggccgcgagcgaggggccgctgatccgccgcaatccgctgacgaagaagtcccaggtggccgccgtcctgaaggacggcggccgtatcgtgcctggtgcgcgcgaagggctgcggcggctcttggatcatgccggtcaggaagtgccggcatggcagaccgccctccgggccgctcagggcgcaaggagcaaggcatga

SEQ ID NO: 499372 - DNA, 369 bp, Stenotrophomonas maltophilia
atgaccatcaagcgctacaagattgaacgtgactggggcgaaggccaggtacagcttgagatcgaccacagcatcttgacgccgaagctggcgacggaaatcaacaagttctggaccggtgccgatgagcgccttggagaagccgacggcgacgcggtactggccgtcatcaagatggcgggtgccgagttcatggggtgggtgctggacgtgaactccagctactcgaccgagggtatgcagcgtgagttcgatcaactggagggctggccgtcgccccacggcatccgcttggtcgattgggacgaccggcccgatctcgattcctgcctcatgcaggtcgaggaagtggaggtatctcatggatga

SEQ ID NO: 499373 - DNA, 906 bp, Stenotrophomonas maltophilia
atgttcatgcgtaacctggtgctgttccgctttccgaccagcaccgacttctccgaagtcgaatccgtgctgccgtatggcgttctgaagccggttggaccgctggaaatgaactcgcgcggcttcatttcccccttcggccgtgaggagcaggagcgcctgtcgtgccgacagggcgacttcctctggctgacagtgggtggcgagaacaagattctgcccagcgcggtggtcaaccgtgcgctggagagtcgtcttcaggtcatggaacaggaacaggggcgtcgacccggtggccgtgagcgcaagcgcatgaaggacgacatcttgcacgagctgctgcccaaggccttcgtcaagaacactcgccacgacgcgatcttggacctgacccacggctatgtggccgtggacacctccagccgcaaggtgggcgaggccttcgtgtccgatatccgcggcctgctgggcggcttcccggcagtcccgctgaatgcccaggtcgcgccgcgctcgatcctgaccggctggatcgccggcgagccgctgccggacgggctatcccttggagagtccgccgagctgcgcgatccggtcgagggtggcgccaaggtgcgctgcagcgaccaggaactgcgcagcgacgagatcgacaagcacctggatgccggcaagcaggtcaccaagctggccctggtgctggaggacgcgctgtccttcgagctgggcgatgacctggtgttgcgcaagctgaagttcctggactgcgcgctctcccaactggagcaggccgatgccgacggccgccgcgccgagttcgacgcccgctttgccctgcagagcggcgagattcgccgcctgttcctggtgctggaacaggccttccacctttcaacgaacccgtga

SEQ ID NO: 499374 - DNA, 318 bp, Stenotrophomonas maltophilia
gtgatcgcgtactgctgggccaatggccagatcggcttcggaacaaacgtgccggacggcgcaatcttcattgccgaatggagcagcgcgcagctgcgcaaggtgatcagcgtcgcagccaggcacggaaagggagtgatgcagggggtgctgcttgtaccgggtgtgccagaggcgcagacgcagcgggcaaagggtgacgcgcttggggcttggcttgcgtggtgttcccagcacccgcgtcggctgcgctggggcgcactgcgcgccagcaacctcaacaccgacccaaaggagaaccgccatgttcatgcgtaa

SEQ ID NO: 499375 - DNA, 519 bp, Stenotrophomonas maltophilia
atgccgaagatccgagatacctgcaccttccgcttcgacggcgttcgcggtgcactcaatgccagcaccttggctctggcggtggagatcgccgaccgagcggcgcgggccgacctcgagatccacgctctggccgtcgagctggacgggttgcgctttttcgacgccacctgcggcaacgttcaaggcgaagacgcgaccgctgctcgctatgccgtccgtcaggcagtgcggtacatcgaggcgcgcggagacgcgttgccctggtgcctgaagcgccacatctcccagccggcgctgctgcacttcgaagatcgcaccgaccccgaggtggccaccaccggcccgcgtcatgcctgcgtcaactgcgacatgcccaccggtgcgcccgagtcgcccatgtgcggcccctgcgctcagcaggcggtgggcgcgatggccgccgcgctggctgccgccaaccaacgtttggatctgatccacgaggttcagaaatccatctgcgaggtgcaattgtga

SEQ ID NO: 499376 - DNA, 612 bp, Stenotrophomonas maltophilia
atgaccccatccattcccgaaggctaccgcgaagaccgtaacggtcggctggtgcccgaggcacagatcaagccgatcgatctggcgcgtgaccagctggtgcaggagaagatccagcgcgccctggaactgcgcgaagcactgcgcaccttcaaggcggatacgttcgccgatatcggcgcgttcgtgcagctcagcggcgagcagtacggcgccaagatcggcggtgacaagggcaacgtcagcctgtattcctacgatggccgcttcaagatcctgcgcgcctgccaggacacaatccagttcgatgagcgcctgcaggccgccaaggcactgatcgatgagtgcctcaacgactggaccgaaggctcgcgcgccgagctgcgcaccctggtcaacagcgccttcaaggtgggccaggacggcagcatcaagacggcagaggtgctgtcactgcgccggctgcagttcgatgacgcccgctggcagcgggcaatgaccgcgatcagtgatgcggtgacggtggtgggcagcaagacctacgtgcgcttctacgagcgcgatgcacggggtcagtaccagccgatttccctcgacgtggcaggagtctga

SEQ ID NO: 499377 - DNA, 255 bp, Stenotrophomonas maltophilia
atggcacgcaccggccgccagcgctacgaccacctgcgcgcgatgcgctttgcgctgtgggcgcgtacgcagaacccgcgccagctcacaccacagcgcatttccggcctgctcggcatctcgctggatgccgcccgccgttggcgcgccgactggttcaccgccaccagccctatccatgtcgaaggcgtccccgatgtccttcggcccactcaaccgtttgtcacccccgccgcccaaggaggcgcccaatga

SEQ ID NO: 499378 - DNA, 480 bp, Stenotrophomonas maltophilia
atgagtgctatccccagcgtcgcaatgcagcacgccatcgccctgtcactgggcgccagcgtggtccgttctgcggatctgatcgaccgggtgatggagcatggcttccattaccgcggctatgtgtccaacgcggtcgccaaggcggtgcggtgcggaatgatcctgcgcgttggcgaaggggtggcccgcaactaccgcctcaaccccgactggaagatcgaccaggtggctctggcggccgcgcaggcacagcgtgtgcgcggcattcggccgggtacgacaggggcgcagaaggcccgatctgctgctggcggttacgaaggtcccgccttcgacaaaggcccgctgatgccctccatcggcaccgtgtgtcagtcccaggaggatctggaaggcgagctgccgccttacctcggtggtcgcttggtcgattcgctgcatagccacttcgatcgcatcttcggtggggtggagtga

SEQ ID NO: 499379 - DNA, 228 bp, Stenotrophomonas maltophilia
atggctgagcgcggccagttcctggtggtccctgctgagtgggtgggtggcgacaccttcaccgactcggccaaggcgatcgaagatgcccaagcccgcagcaaggtcgacggcaagcaccgcgcggtggtttgcgtggtcgcccgcaccacgcccagccctgcaccggtcatcgtgctgacgcgtacggaagccggcatcacccagccgcaggtggtccagccatga

SEQ ID NO: 499380 - DNA, 495 bp, Stenotrophomonas maltophilia
gtggccaagccccgcactgcgccgcccagcgcacccaagaccgtccaggacgaccagccggccgacgtgccagtcgtcacggaagacaagactgccgacgcaccgccggcgacggacggcttggtgccggagcaaggccacagtgagctggagaccgccacgtcggcggcctccgcaggcgatggtgctgccgtcgacccgctgcaggctgaccatccggcagcggaccaggatgccgccatcgacgcgggtgctccgtcgccggaagccgacatcaccattggggttgccgccggtggaggcgattcgcccaatgcactggtttctgatggtctctggctgcctatgtgctttgaagtactcagcccgttcaagcacaacgacgtcgtcgtcaagccgccggcgtggatcgagatgacatgggaagaggcgcaggcctaccaggatgccggtgtcctcggtgacgacccggtcgccccggaagagctggagtaa

SEQ ID NO: 499381 - DNA, 534 bp, Stenotrophomonas maltophilia
atgtcctactgcacgctcgcactgctgtcggcggccaagcttgcccaggagctggcgcaggtggccacgccggagcgctatccgattgtggacgatgcgctgatggatgccacgctgctcggcagtgatcgcagcgcattcgacccggccgacgtggcgatcgccgatgaggcggccgcgcacgtgcagcgcgccctggacgatgccgatggcgtgatcaacggctacctggtcatgcgcaagcccaagccctatccggtaccgctgccagcgccggtaccgggcatcgtgtccacctgggcacggtggattgcgcgctacctgctgcacaaggatcgagtcaacaccgaggaacgcaccgatccggtggtgcgcgactacaaggaggcgcttgcctttctggagaaggtgcgcaagggcgaattcagccttggtgaggatgatccgctgccggcgccgagcagcggtgcgcccgaggtttgcgcgccgccgcgggagtttagccaccgcaccctgcaggactacggccggtga

SEQ ID NO: 499382 - DNA, 477 bp, Stenotrophomonas maltophilia
gtgagcacgcagcccttcgacatcgggctggtgcgcgatcgcatccgccagggcgtcagcgagaaggagctgcggcaagtccagggcagcgccgactacgccgccgttacagcgctgcgcgacttccccgcgccgtgctgctacgtgctgctggcccgggagatgccgctggagaccaaaaccggcgtttcgatccccggccagcagacgcgcctggcgcagttggtcgaagtgaacttcgcggtggtgaccgtctgccgcaactaccgcgagcagcgcggggcgcaggtgatcgatgagctgcgcctgctgctgggcaaggttcgtcagccgctgctgggctgggcaccgcccattcctggtggccgtgcctgccagctcatcgagggcaacctcgaggactacgacgctgccaccgccctttgggtcgacgtatggaagacccaagccgttcttcaacccgagattccgcgatga

SEQ ID NO: 499383 - DNA, 222 bp, Stenotrophomonas maltophilia
atgactacccagaccactcagaagcacacgatcaagaaggcgggcctgacgcttgcgagcaagcccattgcggaaggcgaaacggtggagcttcctgccgacctggtgccctgggcggttgagcgcggcttcatcgacgctcccgacgccgattcttcccccaatccgtcgcgcaaggccaacggccaggcgactcctgccatcgcccaggaggcgaagtaa

SEQ ID NO: 499384 - DNA, 756 bp, Stenotrophomonas maltophilia
atgtccgataccgagtatttctccctgcagggtcgtgtgtacctgggcctgcgcaatgccgacggcagccgcgcaccggcgcgttgggcgtatgacgccagcgtcctcgagctgaccatgtccagcactcgtgaaaccaagaaggaaagctggtccggtgtgcgcggcgtcggcgctaccatgaccaccgagcgcaacctcggcgtcaatctgaccctgggccagctcaacaccgatcacctggcgctggccacggacggcacccgcatggagctggctgccggctcagcagccaacgaggccattggtacggtcaagccgggggatgtggtcgcgctggagtatgcggcgatcagtgcactggtactggagggcggcaccccagccgcgccgttggtgctggacaccgactacaccgtcaacctgaccaccggcatcgtcaccttcctcaccgctaagacggcggtggtggccaagacctatgagtacgctgcgcacagcctggtgaaggtcttcgaaagcaccaagtccgagtactacgtactcttcgacggcgtcaacagtgttgatggcaccaccatgcgcttccgcggcgaggttcaccgcgtcaccttcccggcctcggagacgctgtcgctgatcaacgacaccttcggtgagattgcgctcaccggcgaggccaagattgacccggtgcggcaggccgatccgcgcttcgggctgtacgcccgtgccctgctggtggatgcagcctga

SEQ ID NO: 499385 - DNA, 510 bp, Stenotrophomonas maltophilia
atggccaaggtgatcggcaatgtcggtcagcagtcccccggatccggcactacggatccgggggcaatagccggtgagctggacgtgctagccggccagcagcaggggcagctcggcgaaaagaccatcacagtgcgcgagtacggcttctttgaggccgctcgcatcctgcagaccgccgcaccactggttggggacctgcagccgctgttcgaaggcaccgatccgccttccatgctgcaggtgatggatgcacttatgtcccacccggatctgatccggcatctactggcatgctcgatcgcagcgccgccggctgatgccaaggatcacgcagccgaggtgcgggagcaggaagcgtggctggagacgctcaacgaaaccgatggcgagcagatgctgctcttgtggtggcaggccaatagcagtttttttctccgccgcctgctccgaaacgccgtcagtcaaaaggtactcccgtcggttacggacgcgtcttcaccgacctga

SEQ ID NO: 499386 - DNA, 486 bp, Stenotrophomonas maltophilia
gtggccaagccccgcactgcgccgcccagcgcacccaagcccgcccaggacggcaagccggccgatgtgccggatgttacggaagagaatgctgccgacgcgtcgccgacaaaggacggctcggtaccggaggaaggccgcggcgaaccagagttcgcctcgtcggccgtttccgcagccgatggagctgcattggaccagccccaaggcgatcagacagcagctgatgaggacgtcggcaccggggcggaagcgtcttcgcccggtgctgcgtccatcgacaccgccgctgcgtctaccgcttccacagctggggaagatggtgcgccgagcacctggtgcttcgaagtgctcagcccgttcaagtacgacggcgtgatcatcaagccgccggcatggatcgagatgacctgggacgaagccgaggactaccaggaagccggtgttctcggtgacgaaccggccaccccggaagagctggagtaa

SEQ ID NO: 499387 - DNA, 534 bp, Stenotrophomonas maltophilia
atgtcgtattgcacgctcgccctgctgtcggcggccaagctcgcccaggaactggcgcaggtggccacgccagagcgctatccgatcgtggacgatgcactgatggatgccacgctgctcggcagcgatcgcagcgccttcgacccggccgacgtggcgatcgccgatgaggcagccgcgcacgtgcagcgtgccctggatgacgccgatggcgtgatcaacggctacctggtcatgcgcaaacccaagccctatccggtgccgctgccggcgccggtaccgggcatcgtgtccacttgggcacgatggattgcgcgctacctgctgcacaaggatcgggtcaacaccgaggaacggactgatccggtggtacgcgactacaaggaagcgctttccttcctggagaaggtgcgcaagggcgagttcagccttggcgaggacgatccgctgccggcgccgagcggtggagctcctgaggtctgtgcaccgccgcgggagttcagccaccacaccctgcaggactacggccggtga

SEQ ID NO: 499388 - DNA, 477 bp, Stenotrophomonas maltophilia
gtgagcacgcagcccttcgacattggcctggtgcgcgatcgcatccgtcagggcgtcagcgacaaggaactgcgtcaggtgcagggcagcgccgactatgccgccgtccaggcgctgcgcgatttccctgcaccgtgctgctacgtgctgctggcccgcgagacgccgctggagaccaagaccggcgcctcgcttcccggccagcagacgcgcctggcacagctggtcgaagtgaacttcgcggtggtgaccgtgtgtcgcaactaccgcgaacagcgcggcgcccaggtgatcgatgagctccggatcctgctgggcaaggttcgccagccgctgctgggctggacgccgcccgttgccggtggccgtgcctgccagctcatcgagggcaacctcgaggactacgacgccgctaccgccctgtgggtcgacgtatggaagacccaagcccttcttcaacctgagatcccgcgatga

SEQ ID NO: 499389 - DNA, 213 bp, Stenotrophomonas maltophilia
atgaccacccagaaatacacgatcaagaagccgggcctgacgctgtcgcgcaagcccattgccgccggcgaaacagtcgaggttcccgccgacctggtgccctgggcagtcgagcgcggcttcatcgacgctcccgacaccgattccacctccaacacgtcgcgcaaggccaacagcctgccggccgctgccatcgcccaggaggcgaagtaa

SEQ ID NO: 499390 - DNA, 756 bp, Stenotrophomonas maltophilia
atgtccaagaccgaatatttctcgtttcagggccgcgtgtatctgggcctgcgcaatgctgacggtagccgtgcgccggcgcgctgggtgtatgacggcagtgtcctggaactggccatgtccagcacccgtgaaaacaagaaggagagctggtcgggtgtgcgcggcgttgccgctaccatgaccaccgagcgcaccctgggtgtgaggctgacgttgggtcagatcaacaccgagaatctggcgctggccaccgacggcacgcgtctggacctggcctcgggctcggccgccaacgaggccatcggtgctgtcaaaccgggcgacgtggtcgcgctggagtacgccgcgatcagcacgctggtgctggaggggggcaccccggcggcaccgctggtgctcgacaccgactacaccgtcaatcttgcgaccggcatcatcaccttcttgaccaccaagaccgcggtggtcgccaagacctaccagtacgccgcccacagcgtggtcaaggtgctcgagagcagcaagtcggagtactacgccctgttcgacgccgtcaacagtgtcgacggtgctactcagcgcgtccgcgccgacgtgaaccgcatttcgttcccggcggctgaatccctgccgctgatcaacgataccttcggtgagatcgtgctcaatggcgaggccaagatcgatccggtccgtcagtccgatccacgcttcggcctgtacgcccgcgtcatgctggtggacgccgcctga

SEQ ID NO: 499391 - DNA, 510 bp, Stenotrophomonas maltophilia
atggccacccgaatcggtaaccaggccgagctgccctccggatccggctcaccggatccggaggcagttgccgacgaactggacatcctggctgcgcagcagcagggccaggtcggcggcaagaccatcatcgtgcgcgagtacggattcttcgaaggtgcccggatcctgccggccgccgcgccgctgcttgccgacctgcagccgctcttcgaggggcgcgacgcaccttcaatgctggaagtcaccgatgtcctgctctcgcaccctgacctgattcgccacctgctggcgtgtgccattgcgccggcgccgggcgagggccaggacgctgccgctgaggtacgggcacaggaagcctggctggaaacgctcaatgaaaccgacggcgagcagatgctgctgctgtggtggcaggccaacggaaattttttgctgcgccggctgctgcgcaacgccgtcggcaaaagggtgagccagtcggctacggacgggtcttcaccgacctga

SEQ ID NO: 499392 - DNA, 141 bp, Stenotrophomonas maltophilia
atgacgcagcgccagatcttgctggcttggagccatgtccagcagcagcagcgccgccagcggcgtgagcgcattaccgacaccaacgctgcctatgccgggggtgatccggcgaccaccttgctgaaggaactgacgtaa

SEQ ID NO: 499393 - DNA, 381 bp, Stenotrophomonas maltophilia
atggccaggcacaagcagcccgccgagctggcaaagctcaagggggcggacaagcgcaacccgcagcgttacagggccgaggtgccaaagacggggaagacactgggcaaggtgcccggccatctgccggacgaggtcgcggtggtctggaaggagctggagaagtgcgccctgcctggcgtcctgaccagcgccgaccgattcatcatggaggtggcgtcatcgctgctttccgagttccgtgccaaccgcggcgagttcgttgcggccaagtactcccacctgatcggctgcctggcgcgcctgggcctgaccccggctgaccgtcagaagctggggaccgaaaagaccccggagggcaacccattcgacgagttctga

SEQ ID NO: 499394 - DNA, 1671 bp, Stenotrophomonas maltophilia
atgacgccgagcgattcagccaaggcatacgccaagggcgtcacgtcaggaaagatcccggccggcgagttcatccgtctggcgtgccagcggttcctggatgacctgaagcgcaagggggccgactggccctacaagtacgacgccgagaaggcggaccgcgcggtgcggttcatggagaagatgccgcacacgaaaggaaagtgggcggcgcagaagcgcctgctggtgctggagccctggcagcacttcatcgagtgcaatctgttcggctgggtccacaagaagaccgggcaccggcgcttccgccgcgcatacgaggagatcccgcgcaagaacggcaagtcgttgcgactggctgcccgtggcctgtacctgttctgcgctgacggcgaggcgggcgcggaggtctattcgggcgctaccagcgagaagcaggcgtacgaggtgttccgcccggcttggcagatggttcagaagctgccggcattgcgcgcccgcttcggtatcgaacaggcgggcaacccgaagaacccggggccgctgttcgtcatggaggacatgtccaagttcgagacgatgatcggcaagcccggcgatggctcgagcccgcacgcggcgctggtggacgagtaccacgaacatgacgatgaccacatggtcgacgccatggaaaccggcatgggcgcacgcgagcagccgctgctgtcgatcatcaccacggcaggcaccaacctgtccggcccatgcttcgagatgcgaggcgatgccatccgcatcctgcgcggcgaggtgaccgatgagacggtgttcgcggcgatttactgcatagacgagggcgaccgctgggacgatccggcgagcctgcgcaaggccaacccgaactacggcgtttccgtgttcgagcagttcctgctcgaccagctcgccaaggcaaagcggtcggccagtaagcaaagcgcgttccgtaccaagcacctgaatgattgggtcggcgccaagctggcatggatgaacatgctggcctggcagcggcagaaacgacggtttgaggtgtcggactttgcgggctgtccgtgctgggtcggtgtcgatctggcatccaagctggacgtggctgccgtggtgctgctgttcgagaagggcgatagctactacgccattccccggttctacgtgccggagtcggccgtggaggaaaacgagaagtaccagcagttcctgctggacgagctgatcgtgtccacgcccgggaacatgacggactacgcgttcattgaagaagagctgaaagagcttgcggcacaaggcatcgacgtgcaggacattgcctttgacccagcgcaggcggcgtacctgatgacgcgccttgaacaggaaggactgccgactgtggagatggcgcagtcagtgcgcaacctctccgagcccatgaaggaagtggaagccctgattctgtcgcggcgcctgtggcacgacggcaacgcggcgatgacctggatgatgggcaacgtagtggcgcgcgtggatgccaaggaacacgtctatccccgcaaggaaaagatggaaagcaagatcgacggcgcggtggcgctaatcatggccatgggccgcgccatgcaggcgcgggacaccggcacaacccaacaaggcttcgtggtgatcgactga

SEQ ID NO: 499395 - DNA, 1305 bp, Stenotrophomonas maltophilia
atgttcggactattcgagaagaaccggcgggccgatgcccgcgaccgtatcgagccgacgatcagcaacctggtcgacggcgaggtgatccagtcttccggcatgggcatgttcgaggtgttcgggaatccgacgacggcctccggcgccgtggtcagcccggaatcagcgatgcgggtctcggcggtgttcgctgccgtttcgctgctggccggcgcgatcgcccagctgccgctgcctgtgttcgagcgggtggacggccatcgcaagcgggcggagcatgactactggtggctgctgaacgagcagttctcctccggctggtcgagcgccactggctgggagttcatcgtcggccagatgctgctgcgcggtgatggcgtggtgtacgtgacgcgcaaccgtgccggggtggcgaccgggttgatcccctggccacgcgacagggtgatgatcctcaagcaggagaaaaccagcccacgggagccgacacgcctgcagtactcgttccacgatgcggacgggtacttcaccgtcgaccaggacgacgtgctccatttccccggcttcggtttcaacggcgtgcacggcatgtcggtgatccagtggggcgctcggaacggcatcggcatcgccatccaaggtgacgagcacgccggcaagttcttcagcgagggcggcaagcccgaagtggccatccgaacgcccaacaagatgaccaaggagcagcaggacgatttccgcgatgcctgggtcaagaagtacggcggggtgcagggtaaccgtcgcattccgctggttctgaccgaggggctggaggttcacgaactgaccatgtcagcggtcgaccagcagctgctggagtcgcgtcagtggcaggtgatcgacgtagcccgcgccttcggtgtgccgccccacatgatcggtgaaaccaccaagtcgaccagctggggcagtggcatcgagagcatgggcatcggcttcgtgaagtacacgctgggcccgcacctgaagcggatcaaggacgagttgaaccgcaagctgttccgcacgccgcgctacttcgttgagcacaacgtggacatgttcatggccggcgactcgaagacgcaggccgagtacttcagcaaggcgttgggtggccctggcacccaaggctggatggtcgtcaacgaagtccgccgcctcaagaacctgcctcccatcgagggcggcgacaagctctaccaaccgaaagaccccgcgccaccggcgaagccggacagcgacgaccctgaaaggaaccctgaagatgccgattcctaa

SEQ ID NO: 499396 - DNA, 456 bp, Stenotrophomonas maltophilia
gtgaccgagcccgtgagcaccatgaaaatcatcgtcgggacgttcaccgctgccgtagtggcgccggcaactgccgatgcgctccgggaggccgagcgggtcatccttggcgtgccgcagtctgtgttgctggtggccatggccggcgccctgatcggcgtcctgctgctgccggagaaggatgcggagcgagtcgctgccgacgccagccgtcggcgcggtcaccgcttcctacagacagccgcgcgctgggctgccctggccgtggcggtcgtggcctacgccattgtggccgcatgggtcatcgccgttgctgcctccatctggccggcactggcgggcgctccgcagctgccgctggccggcctgtccggcgtgctgatccgccggctactgcccggctacgtgcgcatggtggagaaagccaccggcgccatcggaggcgacaagccatga

SEQ ID NO: 499397 - DNA, 483 bp, Stenotrophomonas maltophilia
atgaacgtagtgattcgattccttcgcgcgctgtggacgctgatcgtaggcgccgctgccgatgcgctgcagtggctgagcaagcccggcagcaaggtcaagctggtgtgcgccgtgctggcattcggctgcatggtgtccgggctgaccgcctgggagaaggagcagaagatccgcgccctgagcgcccaggtgatcagggtccgggccgactggcaggccgatgccgcccgactgcaggccgaggtggacagccgcgatcagcgtctggccgaggtcgccgccgcactgagagccgaagccgagaagctgcaagccctccgggacgagagtgctgaggcactgcgggccttggcgggaaaggtcgaggcttccgagaaggaggcttccacctggcgcggtcgctatgagcaacggcccgacacctgcaaggcagcactggagctgctcgattccgcctgcccagcactgaaggggtactga

SEQ ID NO: 499398 - DNA, 204 bp, Stenotrophomonas maltophilia
atgacccatgagggccgtctattcggcgttccggcctggttgcgcgaagacagcgatacccaggtgaccgccagtccgaaggttccggtgttgcacctgtggtgcatggcagtggacctggttctggagatcgccactgcgttcgtacaagcggatcgcaccctggaatcacccatcaccctcggtaggaggatcgcgccatga

SEQ ID NO: 499399 - DNA, 282 bp, Stenotrophomonas maltophilia
atgaggttcgcactcctgttggcggtctcgctgctggccgcgtgccagcccgcacctaccaagccgaacccgccgccggcagccgtcatcacggtcccggtggccacctacgtgccgatcgatggccagctgcgcaagcgatgcaagtgggtgaaggaagcggcgccgtctgccgtgttcgaggtgagcaacggccggaagcgttgcctgctgcagtacgaagcccagctcgaagccattgaccaggtacagggcaagcctgtgccggaggaggatgaatga

SEQ ID NO: 499400 - DNA, 270 bp, Stenotrophomonas maltophilia
atgaaccggcgtcgattcctgcgcgcgctgggtgccgtacccgtcattgcagcggttccggccgtcgtagctcgcttggcgcccgttgcagctacttcggtgactgctgacagcttcaaggtgctggccccggacggcgccgtgccactggaggtaggtgacggagccacgaccattcgccatacaggtgggcggactgagtaccgggacggccgttgggacgtttacgacgcgcgaggcgtactgaggatcagcatggggtgcctgtga

SEQ ID NO: 499401 - DNA, 363 bp, Stenotrophomonas maltophilia
atggcccccagaggcaaggcggaacgccgcatgctcgcgctgggccggctgaagaccggcgagatgaacaagaccgaggccgcgtatgccgagcggctgcgcgcgctggaggcatccggccagatcctctggcacaagttcgaggggctgaagctgaggctggccgacaacacgttcttcaccccggactttgcggtggtggccgctgatggcgtcatggagtgccacgaggtgaaggggcactggcaggacgatgcacgggccaagatcaagatcgccgcggccatgtacccgttccgcttcattgcggtgaaggtgcggcgcaagcgcgacggcggcggatgggaggtggaggagttctga

SEQ ID NO: 499402 - DNA, 210 bp, Stenotrophomonas maltophilia
atgaacaggaacgtacacacgaccgctgatgggcgtggcaagcgacgcgtactgctggatggcagggagatcagaaaggtcgtttatgccgacacacgaaagggcgtggttcggtactaccccgagccggtgcgcatccacaagcacggcaagcgcgccgtcatgaagaccaagcacggcaaggtcgaagtggagttcgtcaatggctga

SEQ ID NO: 499403 - DNA, 183 bp, Stenotrophomonas maltophilia
atggctgagaccgtgatcgctgctatccgcacgcggtggtggctgcgttgctacttggccacggtggtgtggtttgccaggacgacgggcatggaaccggactgggaacgggtcgaggggtggatacgccgcggcttggtattgcgaacgacgagggttgctgatggacgttccacggattga

SEQ ID NO: 499404 - DNA, 291 bp, Stenotrophomonas maltophilia
atggacgttccacggattgaagaggttgcggcagcactggccgctgagcaggcggcgcgcgctggtgctgacgctgccctggcagcgctcatcgaaggcagcaccgacagccgcatcgaccgactggtcgggatcatcgagcagcagggcaagcagatcgccgagctggcaatgcacgttggcctgctcgtgcaggcggtggcgcagctgctgggcgaggaggccggtgcaccggtgcaggatgaaggtgccgagcctgagcgtgtcgacctggacgggaagtcctactga

SEQ ID NO: 499405 - DNA, 744 bp, Stenotrophomonas maltophilia
atgtccttgcttccccccaacgcaatgcacgagcggactctgcagggcgtacagagcaccggcaacgcacgggcaattacgaaggccgcgactctcactgcggtcatgatgtccgtcgaaattgctggaggatgggccttcaactcgatggctcttctcgcagatggctggcacatgagctctcacgtgctggtgctcctgttcgcactttctatcgcttggtacgctgagcggaatcagagccgcccagagcgcgcggctcgggtgctagcggttgagctcatcgcggcgagcgtaagcgcgatgatcatgctttggattgccgcttcgatggcctatgaatcgacggagcgtctccatgcgccagaggctgttcagtactcagaagcgcttgccatcgccgttgcgggtttgattacaaatatattctcagcgcggtggctacattctgcctaccatcgcgaaggtgctgcggttgatcactgccacgttccgcatgagcgccatgctgacgagaaggggcccggtgcgcgcaggagtcccaatcttcgtgcggcctatcttcacgtcgctacggacaccgctgtaacggcactcgcaattactgcacttgtcgtgggaatgatctgggacgtgacatggctggactcaatcacaggcctcatcggcgcgtcggttgtcgcagtctgggccattagattgcttcgtagctccatttcggcgtggacaggtcggcgtaagtag

SEQ ID NO: 499406 - DNA, 576 bp, Stenotrophomonas maltophilia
atgcaacaccaaactatccatccctcggtcgattccggcgtcgttgccggaaccgccggcttcaagggcggcacgctgaagtgcctgtgctctgacaagccggttgagatctccgtcgcaagcaatgtggcccacaaccacgcctgtggttgcaccaagtgctggaagccggaaggcgccatcttctccgtggtcggtgtcgttccccgcgataccgtttcgatcacggcgaacgccgacaagctggcgattgtcgatccggctgcgaccatccagcgccacgcgtgcaaggactgcggtgtccacatgtttggccgcatcgagaacaagtcccatgccttctacggcctggatttcattcacgttgaactgtccgaacagaagggctgggaagaaccgcgcttcgccgcattcgtgtcttcgatcatcgaaggcggcggcgcaaggccggaacagatggacggcgtccgtagccgcctgaaggctctgtccctggagccgtacgacgtgttgaacccgccgctcatggatgcgctgtccgcgcatgctgcacgactcagcggcgttctctcctaa

SEQ ID NO: 499407 - DNA, 543 bp, Stenotrophomonas maltophilia
gtggccgtgttcggcctcggtggcatcggcctggcggtgatccagggtgctcgtcaggcgaaggctggtcgcatcatcgcagtggacaccaacccgtccaagttcgagttggccaagcagttcggcgcaaccgaattcgtgaacccgaaggattacgaccgtccggttcaagaagtcatcgttgagatgaccggctggggcgtcgatcacagcttcgagtgcatcggcaacgtcaatgtgatgcgttctgcgctggagtgtgcacaccgcggctggggccagagcgttgtcatcggtgtggccggtgctggtcaggagatctccacccgtccgttccagctcgtgaccggtcgtcgctggattggcagtgccttcggtggtgtgaagggccgtagccagctgcctggcatggtcgaagacgccatgcggggtgagatcgatctggctccgttcgtgacccatacgatgggcctggaagcaatcaacgaagccttcgaactcatgcacgaaggcaagtccattcgtactgtcatcaactactga

SEQ ID NO: 499408 - DNA, 1278 bp, Stenotrophomonas maltophilia
atggccggggttgcctacgctcaactgccgttccgggagcagatcgagttcttccgtcgcaaaaagaacgtgctcaccgagagctacctggacgtttgggagtcggagcacgacaccagcttcatggtggccggtgccaaccgtgacgctctgctggcggacttccggcaatccatcgatcgggtcattgctgaggggcggactcttcagcagttccgggaggacttcgaccggatcgtggccacgcatggttgggactacaacggcggtcggaactggcgctcacgggtgatctacgagaccaacctgcgccagagctacaacgccggacgctgggcccagctgcagcagctgatcaaggtgcggccgttctggcgctacaaccacaacgacgccgtcgagcaccctcggccgctgcacgtgtcgtggaatggcctggtgctgcgccacgacgatccgtggtggcgctaccactatccagccaacggctggggctgccagtgctatgtcgatgcgctcaacgagcgcgacctgcgccggttgggcaagaatggtccggataaggctcccgagatcgtgatgcagtcggtgaccatcgggcagcgcagtcccggtgggacccgcacggtgctgacgccggcaggcgtcgatcctgggttcggctacgcgccgggggcaacggctgaccactggcccagtggccgcggtggtccggtcaccccgccttcgttgaccgagcagctcacctccgctctgcagaacgccctggagacgggagcacggttgccggcggcgccagcggctgccagcgctgcccaggccttggcgcggccgcgcgccagggatgcgctgcaggccggctatgccagctggctggccagcattgatgccgatgctgcccacgctgcccgctatctggccggagcactgtcgcccggattggtgtcgcagctgcagcgtgccgccgttcgcccagcgacggcggcctttgccgtgttggccgaccagctccccatcactcggcctggcgcggtggccatcgccgcagccgagctgccgattcgccttctcgatgcggtggccatcctgctggacgctgccgcaggccgcttgcgctatgtgctggcggtgggacgtcctgccttcatggtggtcgacgtggccatctcgggaacgggcgtcagcacggtgcagtcccagctgcagatgctgatgcccgccgaactccagcgcggcgttgccgatggcacgctgcagctgctgcagggagagatctga

SEQ ID NO: 499409 - DNA, 570 bp, Stenotrophomonas maltophilia
atggcacagcttgaggtcacgcttgattcggcaacacctggtctggccgatgcgctgcggcagctggagggcgaggcgcaccaactgatcttgaaggactggggcgagtacctgctgagatccacacgcgagcgggctgcaaaggagcgtgacccgactggacgtcgatggcgcgcgcttgagcccagctacaagcgctggaaacagaagaagcgccccggcgtgccgattctgaagttcgatttccacatgctcggtgacatggcttcatggcaaacggacgggaacgatgccgtcctggtcggtaccaatgcaccctatggcgccatccaccaattcggcggcaccatccaacgcgccgcgcgtccggccaacatccacctgaagacgggtaaaggcggcagccggttcgtcaaagccagtcgtgggaacgcgcgctacaagcgctcggtcacaatgccttcgtacacgaacaccatcgctgctcgtccgtggctcggtgtcagtcgcgaggatgagaaggagctgctggatatcgcccaggatcacgtgagcggcgccttcgagtga

SEQ ID NO: 499410 - DNA, 1002 bp, Stenotrophomonas maltophilia
atgcgtggcaaggtggccaccgccgagggcaagaaggagtggtacaccgccatccgctcggcctacggcccgcgcaaggccgccatgcgcgaggagctggacgtcatcccgcgcgatggcgatggctcagccatcccttcggtctggatcgatcgggccatgcccgaggtccggcccgtgctgcgcctggtcttcgatgatgacttccccaagcgctctgagaaggagcgcgagatctggtgctcggtctggattgctaccacgttgctgcccgtgctccgtgctgcggtggccgggttcaccgggcgctgggcgatcggcatggacttcgcgcgccaccgtcacttctcggtcatcaagcctgccaaggtcgggcaggatctgcgccgcgacgtgccgttcctgatcgagatggccaacgcgcccacccgccagcaggagcagatcctgtgggcgctgctggacgcgctgaaggaaggattccctggtcgctggtcatttgccggcgatgccactggccccggccagaccttgatggagtacaccggcgaccgctacggccgggctgagctcgataccgagacgggccgctacgtcggtggcccaatccacgaggtcaccctgtcgcgcccctggtacggcgaatggatgcccaagtacatcgcgctgttcgaagacggcttcctcagcctacccagggacgcgtccctggaagacgaccaccgcgcagtggagtacgtcgacggcatcccgatggtgccgcgtctggagcgaaaggacctgcaggatccggagctggtgcgccacggcgacggcgcgatcgccggcgtgctgatgcagtttgccgcactcaaccacgtcacctcggtgcccatcgagttccaggcggccggcgcgcgcgcctacatcggcgacggccgagccgacggcgtggccaccgtcgtgaccgatgatgccttcggcacggtcagcggcggaaatgattttggaggatatgcatga

SEQ ID NO: 499411 - DNA, 1278 bp, Stenotrophomonas maltophilia
atggccggcgtcgcctacgctcaactgccgttccaggagcagatcgagttcttccgccgcaagaagaacgtgctcaccgagagctatctggacgtatgggaggccgagcacgacaccagcttcatggtggctggcgccaaccgcgacgcactactggccgacttccggcaatccatcgaccgcgtcatcgccgaaggccgcacgctggagcagttccgcgaagacttcgaccggatcgtggccacgcatggctgggactacaacggcggtcggaactggcgctcgcgggtgatctacgagaccaacctgcgccagagctacaacgccgggcgctgggcccagctgcagcagctgatcaaggtgcggccgttctggcgttacaaccacaacgatgccgtcgagcaccctcggccgctgcacgtctcctggaacggcctggtgctgcgccatgacgatccgtggtggcgctaccactatccggccaacggctggggctgccagtgctatgtcgatgcgctcaatgagcgcgacttgcgccgcttgggcaaggacggtcccgacgcggcccctgagatcgtgatgcagtcggtgatggtcgggcagcgcagtcccggtgggccgcgcacggtgctgacgccggcaggcgtcgatcctggcttcggctacgcgccaggtgctacggccgatcactggcccagtggccgtggttgtccggcaacaccgccatcactgaccgggcaactgacctccgctttgcagaatgcactggagacgggcgcgcggctgccagcggcgcccgctgccgccagtgccgcccaggccttggcacggccccgcgccagggacgccctgcaggccggctacgccagctggctggccagcattgacgctgatgccgcgcacgctgctcgctacctggccggcgcactgtctcccgggctggtgtcgcagctgcagcgcgctgccgttcggccagcgacggcggccttcgcggtgctggccgagcaacttcccatcacgcgacctggcgcggtggccatcgccgcggccgagctaccgattcgcctgctcgatgcagtggccattcttctggacgtggccgcaggccacctgcgctatgtccttgcggtggggcgcccggccttcatggtggtcgacgtggccatctcggaaacgggcgtcagcaccatccggccccagctgcagatgctgatgccctctgatctcaagcgcagcgtcgccgatggcacgctgcagctgctgcagggagcactctga

SEQ ID NO: 499412 - DNA, 570 bp, Stenotrophomonas maltophilia
atggcgcagctcgaagtcaccctggattcggcaacacctgcgctggctgatgcgctgcgccagctggagggcgaagcccggcaactgatcctgaaagactggggcgagtacctgctgaggtcgacacgcgagcgagccaaaaaggagcgtgatccgaccggacagcgatggcgtgcactggagccaagctacaagcgctggaagcggaagaagcgccctggcgtcccgattctgaagtttgatttccacatgctcggcgacatggcatcgtggcaaacggatggaaatgaggctgtcctggttggcaccaatgcgccctatggcgccatccatcagttcggcggcaccatccgtcacgcggcacgtcccgccaagatccacttgaagactggcaaaggcggtagccggttcgtcaatgccaatcgcaagaatgcgcgctacaagcgctcgatcacgatgcctgcctacacgaacaccatcgctgctcgcccttggctcggcgtcagtcgtgaggatgagaaagagctcctggatatcgctcaagatcacgtgagcggcgccttcaggtag

SEQ ID NO: 499413 - DNA, 315 bp, Stenotrophomonas maltophilia
atgatcggggtcgacgtggactggcaggccattggcacggcagttgggggcctgatggtcggcgccggcggcgtggcgctgtggtggcgcaagcagttcgtagagacagccagggaaggggccgaggtcaacgtgatccagctgatgcgcgaggaagtgacccggctgggcgaacgggttggccgcatggagcggcgagaactgcggctcatccgccacatctaccggctcgaagggctgatgcgggcggccggtttggagccgccgccgttcgacccggacagcgacacgatcaaggcaggaggttcggagtga

SEQ ID NO: 499414 - DNA, 450 bp, Stenotrophomonas maltophilia
atgcgcatcacgttcgacggcgccggcgacggcttcggacaggcgagcggtattgcaggtggcgaggtcgtcgcgcagctggagacgaccagcgcgcaggtcagccacaacagcagcagggacggtcgcggccgcagtgcggtcttcttcatgctttgctccgatggtggccaggctgtcggcttggcggtgttcgacggcgcgggttcggttcacctgttcggccacggccacagctccggatgcgccctggttggcttcgcttccctctgcccggtcacctcgccaagcccagccggcaccgaacatggctacagaccacagggcgaaggcggcgactgcgatggctatgcggttcactccgaacctcctgccttgatcgtgtcgctgtccgggtcgaacggcggcggctccaaaccggccgcccgcatcagcccttcgagccggtag

SEQ ID NO: 499415 - DNA, 345 bp, Stenotrophomonas maltophilia
atgaaccgtcggttgcttgcgctgggccggctgaagactggcgagatgaacaagaccgaggcggcctatgccgagcgcctgcgcgcgctggaggcatccggccagatcctctggcacaagttcgagggcctgaagctgaggctggccgacaacacgttctacaccccggactttgccgtggtcgctgctgatggcgtgatcgagtgccatgaggtgaagggccactggcaggacgatgccagggccaagatcaagattgccgcggccatgtacccattccgcttcatcgcggtgaaggccaagcccaagcgggatggtggcggctgggcagtggaggagttctga

SEQ ID NO: 499416 - DNA, 291 bp, Stenotrophomonas maltophilia
atgaacgatgcacagattgaagcgctgggggccgcgctggccaccgagcaggctacgcgcgctgttgctgttgccggcttggccgcgcgcattgatggcagcaccggcgatcgaatcgatcggttggtcgggatcattgagcagcagggcaagcagattgccgagctggccatgcatgtgggcctgctggtgcaggccgtggcgcagctgctgggcgaggaggcgggcacgcctgtgcatgacgaaggtgtcgagccggagcgagtcgacctggacgggaatccttactga

SEQ ID NO: 499417 - DNA, 855 bp, Stenotrophomonas maltophilia
gtggccagcggtccgatcgcggccaacgatttcgtgtcactgaagggccgaggcctggcgggcgaggatgagatctacgtatctctacaggcctgggtggtgccggccagcgcctactacaacatggcggtcttcggacacaccggctacaacccggcgcagccgcgcctggatcctcctggctccaattcaaatccggtagcactgctgggagtcaactcgccgatcaagtactggttcatcgcaaacggccgttgcttcagggtcatcacgcgcatcaatggtcgctacgacgccatctatgccggcttcatcttgaccgaccatctgcctgccgattggagctatccgctcttcatcggtggatcgtgcctcggcaggaacttcttggcctcctccgatagctacgagcattccaacttctggagcgccaatgccgacggcaccgacaacaccaatctcagccaggcgtacctgttctcgccaatgcaggcttgggtacccatccgcaacctctcgctgaatggatctcagtccaaggggcgcatgaccgtgccttggtcgaaggcggtctgcaaccagaacgtgcgtaattgtctggatgggcagaggtgggttcagcgcggccagttggtgggatttgcgtgggacggcagcctcaccgacaggagttttccctacagccagatgcctgagaaggggcagttctacggcagcttcgacggcgtcttctacacgccgtccttcggtgcaacagccgagcagcttgcaacgatcggtggtgtggaccatctgcttgtgccgaacgtgtaccgcactggctctggcgagtttgccgcgttttccctggagtga

SEQ ID NO: 499418 - DNA, 978 bp, Stenotrophomonas maltophilia
atggcctacgctgaattcagcaacgtttccaatgtgcagaccctgatcgatctggtcgtgcagtttgtgcaggccaatggctggaccgttgaacgcaacaacctggccggggccaatcgaacagccaccgttcgcatccccggtgtgtcggattacgttcacctgttcaacaccgaccagctgagtctgcagtcgcgcctgtccatcgggtacaacggcgcggtcgatcccgcttcgcagccactgccgtctcccaggagcgtgtcgaccctcggcctggtgggtccgttcccacgtgtgaagctgttcgccaatggcaccgcgatccacgtcgccatcgcccaggccactgccggcgagtatcgccatcatgcgttcggggtgcttgccaaggccggagcctatgacggcggcacctatgttgatggcacgtactggccactgaacagcagctccagcggcgtgatcagcaccagtgcgcccacggtggtgctgttcggattcaacaccaatgggctcggttgcggacaggtgcgggccgactctgtcgaggatgggcgcagcaacagctaccacatgatctgcaacacctatggcggctcgctcgggactgaaggccaggccggcagcggcgttgggccgagctatcagggatcgtccaacgacattacgctcgatcacctctggctgggccgcgctttgggcaatgcagacgagaacatcttttccggccgcagcatccttcacccgattcatctctgggtccgccgggctggaacgaccccaaacctgtcgccgatcggcgaggtgatcgggctgcgggcgtgctacctggagaagctggaacccgagcaggagatcaccatcggcgatgaggcctgggtagtgttcccctgggtacgcaagctgacgatggtcagcggttcgggccaacctccggccagcaacgcctatggctgggcaatccggaagtcctga

SEQ ID NO: 499419 - DNA, 855 bp, Stenotrophomonas maltophilia
gtggccagcggtccgctcgcggccaacgattttgtgtcactgaagggccgaggtctggcgggcgaggatgacatctacgtgtctctgcaggcgtgggtggtgcccgccagcgcttactacaacatggcgatcttcggtcataccggctacaacccggcgcagccgcgcttggatcctcctggctccaattcgaatccggtggcgttgctgggcgtcaactcgccgatcaagtactggttcgtcgcaaacggccgttgcttcaaggtcatcacgcgaatcaacggtcgttatgacgccgtctacgctggcttcatcttgaccgaccatcttccagccgactggagttacccgctcttcatcggtggatcgtgcctggagaggaactacctggcttcctctgatacctatgagcactccaacttctggagccccaacgccgacggcgtcgacaacacaagccgtagccaggcgtacctcttctctccgatgcaggcttgggttccgatccgcaacctctcgctgggcggctctcaggcgacagggcgcatgacgctgccgtgggcaaaggccatctgcaaccagaacgtgcgcaactgtctggatgggcagcgctggatgcaacgcgggcaattggcgggttttgcatggggcgccagtctgtccgaccgaggcgctccctacagccagatgcccgagaagggtcagttctacggcagcttcgacggcgtcttctacaccccgtcattcggtgcaacggcggagcaagtggcaaccgtgggcggtgtggaccatctggtggtgcccaacgtgtaccgcactggttctggcgagttcgccgcgttttccctggagtga

SEQ ID NO: 499420 - DNA, 978 bp, Stenotrophomonas maltophilia
atggcctacgccgaattcagcaacgtttccaatgtgcagaccctgatcgacctgatcgtgcagtttgcgcaagccaatggctggaccgttgaacgtaacaacctggccggggccaatcggacagctaccgttcgcatccccggcgtttccgactacgtccacctgttcaataccgaccagctgagcctgcagtcgcgcgtctcgattgggtacaacggcacgctcgatcccaattcgcagccgacgcagtctccccgtgctgtgtcgacccgcgacttggtcggtccgttcccgcgtgtgaagctgttcgccaacggcaccgcgatccacgtcgccatcgcccaggccactgccggcgagtaccgccatcatgcgttcggagttcttgccaaggccggcgcctacgatggcggcacctatgtggatggcacgtactggccactgaacggcagctccagtggtgtgatcagcaccagcactcccacggtggtgctgttcggatacaacaccaatgggctcggatgcggacaggtgcgggccgactctgtcgaggatggtcgtagcaacagctatcacatgatctgtaacacctacggtggctcgctcggcaccgagggccaggccggtagcggtgtcggacccagctaccagggctcgtccaacgacgtcacgctagaccacctttggctggggcgtgcgctgggcaatgccgacgagaacttcttctccggtagaagcatccttcacccgatccagctgtgggtccggcgagctggaaccacccccaacctgtcgccgatcggcgaggtgatcgggctgcgggcctgctacctggagaagctggagcccgagcaggagatcacgatcggtgctgagacctgggttgtcttcccttgggttcgcaagctgacgatggccagcggttcgaaccagcctccggcaagcaacgcctatggctgggcagtccggaagtcctga

SEQ ID NO: 499421 - DNA, 363 bp, Stenotrophomonas maltophilia
gtggcgttcgccgaaggcctggtgaaagaaggcaagttgctgccgcgccagcagccggccgtggtggaactgctgctggctcagcccaatggcaaggagccgctgaacttcgccgagggtgaaacgacggtgtccaagccggccgaatcggtgctgcgcgaactgctcaccagcctgcccaaggcggtggacttcagtgagaagtctggtggcgaaggtgtggagccaggcgcggccaacttcgctgcaccggctggcacccaagtcgacccggcacggcttgcgctgcacaacaaggcgctggactaccagcgtacccacgcgggtgtggactacctcacggcggtcaaagcggtctcctga

SEQ ID NO: 499422 - DNA, 354 bp, Stenotrophomonas maltophilia
atgactcagaaaatctcgctgctcaccctggctgtcgtcgcagcagtcgccttggaagccgagcgcgtcgtcggtcgtgacggaaagtacgccaacgccggtggcaacgccttcggtgtgaccaacaccagtggattggtgggcgaccgggtgcccgttggtgtggtgggcaccagcattgccactgccggcggagcgtttgccgacggtgcctacctgcaggtggggtctgctggaaagctcatcgctcgcactaccggcgttgccgttgctcaggctctgcagcctgccacggcagatggtgaccgcgtcgaagttctcctgatccccaacgcgccagcgaccaccggctga

SEQ ID NO: 499423 - DNA, 957 bp, Stenotrophomonas maltophilia
atgtcccagcagactctccgtcaggctcgcatcatcgatccgatcctgaccacccatgcactcggctacgtccgccccggaaacgttggccagttcctcttcccgcgcgtcgatgtggccacctttggcggtcagatcctgacgttcggaaaggagggcttccgtcgctacaacaccaagcgcgcgccgggcgaagccaccaagcgcgtccagttcggctaccagggcaagccttacgccatcatccctgcagcgctggaggcggtggttcctgatgaaaccgccaatgaggcggccaacggccccggcctggacgcttcgcaggacgcggtggatatcgtcctggacatcatggagttggaacacgagtgtgagtgcgctgacgtggcgcgcaatgcggccaactacgacaacgagcacaaggtcgctctggtgggcgtcaatcgctggcgcggcgcctctggtgatccaactgctgatattggtgtcggcaaggaagccattcgttccagcatcggtatgcggccgaacacggcgatcctgtcagcggcggcgttcgaagcggccaaggccaatccgaagatccaggactacctcaagcatcgcggcttcaatgcactgaccacccagatcctggcgtcgatgtgggaaatcccgaacatctacattggtgaggcggtggtggctaccggccaggatgatgacctgggcgatgtctggggtcaggacgtgatcctggcgttcgtggccccgccgagcggcggcaaccgccgcaaccgcgcccgaccgagctatggctacacctacagcatggctggagaaccgaacgtgcgtcaggcctatcgcgaagaaaaccgccagtcctggattcacccggtcaacaacaaccgtactccggtgcttagcggcatggtcgcgggctacctgatccagaacgcaggcgcgcccgcagcgtga

SEQ ID NO: 499424 - DNA, 588 bp, Stenotrophomonas maltophilia
gtggacgtgtgcgcggacgacctggtcggcaactacccgctgcgcctggcgcagacctggtacagccagggcgagttcgacaaccgcggccagcgccccaaggcacagacgattgacgatcacgatagcggtgacggcaagacgttctacgtcggcggcaagaagtctgaaaagcagctgcgcgtctatgagaagggcagggagcagggcgacaagacctcaccgtgggtgcgctatgaggcccagttccgtgcgtctaaccgcaaggaacttcccttggacattctgcgcgaccccgcgtcctacctgcttggcgcgtatccggtgctgcacttcctccattgcgtcgctacacgcatcgatatcaccaaggccgccgttgaagcgacctggaagagcgcccgccgacatgtccgacgccagtacggcgcgctcttgaacttcattgcaaagaactgcccggacgatcagtcgctgcgggcggtcatcgaatcctgcacctcgccaaagctgccgaggtgggtcacaggcgacacagcagcgcattggcccgaaatcgcggccgtacaacgaacccaagaggggtaa

SEQ ID NO: 499425 - DNA, 303 bp, Stenotrophomonas maltophilia
atgagcatcaaggtcaccgtcctgaagaacgaaattgacgaacgcggcggcagcttcaagaacgatgccggtgagaacgtcgagtacaccacccgcaagcagaagggaaagctggaaacgggcggcttcgcctatccgttcgatgtgcgcctggacaagggccagcctggctaccccgagggcgaatacgagctggacgtggaatccatgatccaggtcaacaagggcgtggcaacgctgagcaagttcaccgtgctgcgtcagccgcagaaagctgcaccgcgcgtggcggcacagggctaa

SEQ ID NO: 499426 - DNA, 258 bp, Stenotrophomonas maltophilia
atggccgtgtgcgtgactctgacccctgaggggacgctcgtacccaccggggagcctgcatcgcagtgtggtggctacgtgcttgtgtcaggggcggagcacgcacaggcctcgatcctcatcgagcttttccagtggccggagccggaagtggccactggctggttctcgggggtgttcaccctggtccttgcactcaacgtgctgggctacgtggtgggcgccgtcgtgaagtcggtcagtacagagcgggattga

SEQ ID NO: 499427 - DNA, 135 bp, Stenotrophomonas maltophilia
atggatttcgacagcatcctgaccggcctcgccgtcaccagcgccgttaccgccatcatcggcgccggcgccatcaaggccgcacctggctttgcccgctgggcaaccaacaaggttgcgaccttcttccgctga

SEQ ID NO: 499428 - DNA, 270 bp, Stenotrophomonas maltophilia
atggatttcagcggggtatttctcgggctctccgtagcgcaggccgtggccgccatcgtgggtgccggcaccgtcctggcactgccgctgttcggccggtggtgcgtggagaagatcgcggggttctttgaggatcgcgaagacctggacaccgatgaccatgctgacgatgaggcgggcgaggcggatgaggtcgtgtgcggtgacaccggccacgactatgacggcggcgaatgcgtctactgcggcgcgccagagaagggggattga

SEQ ID NO: 499429 - DNA, 363 bp, Stenotrophomonas maltophilia
gtggcgttcgccgaaggcctggcgaaggaaggcaagttgctgccccgtcagcagccggccgtggtggagctgctgctggcccagcccaatggcaaggaaccgctgaacttcgccgagggcgaaacgacggtgtccaagccagctgagtcggtcctgcgcgagctgctgaccagcctgcccaaggcagtggacttcggcgagaagtccggtggcgacgcacccaacgcagcggcgaacttcgccgcgcccccgggcacgcatgtcgatgctggccgcgcggatctgttcaaccaggccaaggcctaccagcagcagcatcccggcacgtcctgggcggctgcagtcgccgcggtcggcggctga

SEQ ID NO: 499430 - DNA, 342 bp, Stenotrophomonas maltophilia
atgtcccagaacatcgctctgctcacgctgtccgtgctggccgcggcagccctcacccacaaccgcttcgtctcgcctaccggtggagtcgccgctgctggcggcaacgcctgcggggttgcgcgctcggatgccgccgtcgggcagttggctccggtcgacgtcttgggcaccacgcaagtgaccgcaggtggcgcaatcgctgccggcgccgccctccaggtaggtgtcgatggcaaggccatcaccgccgacgccggcaaggtcgttgcccgtgcggcgcctggcgccacggccaccgccgatggcgatgtccttgaagtgatcctcatcccgaactga

SEQ ID NO: 499431 - DNA, 945 bp, Stenotrophomonas maltophilia
atgtctggacaaatgacccccggccaggttcgcgtcgttgacccgatcctttccgaacacgcccgtggctaccgccaggcgcagctcgtggccaccgcgctgttccccttcgccgacgtcgccgcctatggcggccaggtgatcgagttcggcaaggaatccttcaaaatctacaacgccaagcgtgcccccggtgccaataccaagcgcatccgcttcggctatgaaggcaagccgtacgccatcgtcccgagcgcactggaagcgccggtgccgcgtgaacacatgcgagatgcgagccaagtgccggggatcaacctgagcacccgggccgtgaacatcgtgctgcgctcgctgctgctggaatacgaggtggacagcgccaagatcgccaccagtgccgccaactacgacaacgaccacaaggtcgcgctggctggcaacaacgtgtggtccaacgccgcctccaatccggcgcaggatgtggaaaccggcaaggaagcagtgcgagacagcattggcctgtaccccaacaccatgttgctgtcggccaaggccttcaagcagctcaagcagcatccgaagctgatcgatcgctccgccagcactggcattcgcaaggtcaccctggatctgctcaagcaggtcttcgagatcgacaacattgtcgtcggcggcggtgtggttgctgatgacaatggcgcctttggtgacgtgtggggcacttcggctgtcctggcctacgtcagccccggtgccgacgtgaacgccaacgtggaagagcccagctacggctatggctaccgcatcgaaggcatgccgctggtcgaagttccctactgggacaacagcgccaagagctggatctatggcgtcagcaacgatgccactccggtcctggcaggcatggcggcgggctatctgatcagcggcgccggcaactga

SEQ ID NO: 499432 - DNA, 309 bp, Stenotrophomonas maltophilia
gtgcgcctgtgcctgtgtaccggcggtaccgggctgggcccgcgtgatttgaccccggaggcgttgcgttccttgaacgcgcggccggtacatggcctggcgcagatggtgcgggcactgagtgcacagcacacgccgatggcctggctgagccgcgccgaggtggtgcaactgggcggcatgctggtgttcgcgctgccgggcagcccgaaggcggcggcacagtgcctggacatcctggcgccggtgctcggccacgcactggcgatggtcgatggcggcggccatgcccatgggggcgcggcatga

SEQ ID NO: 499433 - DNA, 1254 bp, Stenotrophomonas maltophilia
atgattgcctacagcgacgccctgcaacacctgctggacgcggccacggcgctgccggccgagaccctgcgcctgcatgaggccgcgggccggacgctggctgccgacatccacagtgggcagtcgctgccgccgttcgacaactcggcgatggacggcttcgcgctgcgcgccgagggccgggtgttcgagccgggtaccgaattcgcggtgcagggctggcaggccgccggtgatgccagcgcagaaggcggcgagggtgcgtgggaaatcatgaccggcgcacgcatgccatccgggctggatacggtggtgccagtcgagaatgtgcaggtccttgccagcgacgcgggccggccgacccgcatcgcgctgaccgcgacggtgaagccgggccagaacgtgcgcctgcgcggccaggacgtgagcgaaggcgagcgtgtgctgcaggccgggcaggtgctggatatcaatgcgcgcaccctgctgcacgccctgggcgtgggtgaggtggcggtggtggcgcggccgagggcggcggtgatcgccaccggcaaggaactggtgaccgaggcggcgcaggcgctggaatcgggccagatccgtgacagcaatcgcccctacctggtgggccgcctgcaggcggccggtgccgaggtggtctggcagggcacggtgggtgatgaggtggccgcgttcaatgccgtgctggatgaggcgttggccgccggcgcgcaggtgttgatcagtaccggcgcggtctcggccggtcgctacgacttcgttccggatgcgctgcgcgagcgtggtgcacgcatcgtattccacaaggtggcgatccgcccgggcaagccgctgctgttcgcggtgctgcccaatggcgcactgtacttcggcctgccgggcaacccggtctccgctgccgtgggccagcgcttcttcgtcgagccggtgctacgccgcctgttggggctggcgccggaagtcatgttgcagctgccgctgcaggccgacgtgcgaaagccgccgggcctgcgcttccacgcgcgtgcgcgggtggaaatggacgggcaggggcgcctgagtgcgcgtgtgctgtccgggcaggagtcgttccgtttgatgtccatgctgcaggccaacgcctgggtggtgctggaggccgagggtgacctggccagcgccggcacctacgtgcgcgtgcagggctggggtcaccacgaaccgctgcagctggtgagccaggagtcatga

SEQ ID NO: 499434 - DNA, 375 bp, Stenotrophomonas maltophilia
atgagcaagaccaacgacaccccccaaacccagccgcaggagcccctgagcgtcctgcagtcgttcaccaacctgggcatgttcgcgtccaaggacgtgcacgccgacacgatcaccctgcccaacggagccaaggcgcagttccatgtccgcgagctgccggatgcggagttccgcaagctgtggggcgagggcgaccgcgccaagctgatcgcggcaaccatctgtgacgaggacggcaagccggtcatgaacgcggcgcaggccgcccagctcaagccgctggtggctgctgagctgcagcgcgtggccatgaagcattccggcttcggcgaggatgctgcccaagcccaggccgacgcgggaaacggctaa

SEQ ID NO: 499435 - DNA, 216 bp, Stenotrophomonas maltophilia
atgtcgcgccgcgagttcctggagtggtgggagttccacaagcggaaccccatcgaccccgtgagcctgcacatcaagcccgctgccttcgtcgcgtacatcaccgcctcgcacagccagggcggcaccaaacgctcctttcagcactacctcgacgctcttgtgccacggtccgacgaggacgaggcgcaggactggttcgatggactgggatga

SEQ ID NO: 499436 - DNA, 375 bp, Stenotrophomonas maltophilia
atgagcaagaccaacgcccccccccaaacccagccgcagcagcccctgagcgtcctgcagtcattcaccaacctgggcatgttcgcgtccaaggacgtgcatgccgacaccattaccctgcccaatggagccaaagcacagttccacgtgcgcgagctgccggatgcggagttccgcaagctgtggggtgaaggcgaccgcgccaagctgatcgcggcaaccatctgcgacgaggacggcaagcccgtcatgaacgtggaacaggccgcccagctcaaaccgctggtggctgctgagctgcagcgcgtggccatgaagcactccggtttcggtgacgacgctgcccaggcacaggccgacgcgggaaacggctaa

SEQ ID NO: 499437 - DNA, 216 bp, Stenotrophomonas maltophilia
atgtcgcggcgggagttcctggaatggtgggagttccataagcggaaccccatcgaccccgtaagcctgcacatcaagcccgctgccttcgccgcgtacatcaccgcctcgcacagccaaggcggcaccaagcgctcctttcaggagtacctggacacacttgttccacgttccgaggaggacgaggcacaggactggttcgatcgactgggatag

SEQ ID NO: 499438 - DNA, 1062 bp, Stenotrophomonas maltophilia
atggacctgacggccgacgaagcactgcgcgagcagggtgtgcgtgaacacgacaccgccaaccgcagcggccgggagctgtccaacgagatgcgcctgttcgaccgctgggcacgcggcggtgacagcgccctgagcgctgaggactggaagcaggtcaacgccgccatgtcgggcaatccggccgtcaacccggaacagggtggctacaccgtgccgaccacgctggccgagcagattctggaggctctgaaagcgttcggtggcatgcgccaggtggctgacgtgttcagcacggccggcggcgagccgatgcagtacccgaccagcgatggcacctcggaagagggtgagctggtcgccgagaaccagtcggcgaccgatcaggacgtggccttcggcaccaagggcctgcaggtctacaagttcagctccaaggtggtcaccgtgccgtgggagctgctgcaggacagcaccgccgatatcgccggattcattgagaagcgtctgcagacccgcctgggccgtgtcaccaatcgcaactacaccgtcggcaccggcgtgggtcagcccatgggcgctttcaccgcagcggccgttggcaagatcggtgcggtttcggcgctgccgatcatcacctacgacgacctggtcgacctggagcacagcgtcgacccggcgtatcgccagctggccaagtggatgttccacgacgacatgctgaagctgatccgcaaggtgaaggacgaccagggccggccgatcttcgtgccgggctacgagcagggcaatccgggcggtgcgccggatcgtctgctgaatcgcgacatccagatcaaccagcacgccccggccccggcagcaggcgccacctcgatcgcgttcggcgacttcagctactacaagatccgcgacgtgatggcagtgaccctgttccgcttcaacgactcggcctatgtgaagaagggccaggtgggcttcatggcctggatgcgctccggcggcaacctggtcgacgtgggcggcgcggtgaagaccttcaagcacggcgctgcggcttaa

SEQ ID NO: 499439 - DNA, 405 bp, Stenotrophomonas maltophilia
atggcaaagcagaagaacaccctcgctcaggcggccggccgtccgctcgatgcggaggaagcgccagctgcggtagtggacgcagcggctggccagggcgcgcagccgggcgccgaaagccccgacgctgacgcggtagccgccgtcggtgagccggagacggatgagggcggatccagccagacgcccgaaaccgtggcgacggacaatgacgtgccgtcaccgaatgaagaaccggctccgccggagggtgacaccgtgccggcgctggtgctcagtgacaaccacctgggcaaggtaggcgaagtgatacaggtcaacgcggctcatgttgatgcgctgcgccttggcgggctgatcgacccccaccccaacgccatcaagtcggccacgccggaggaatga

SEQ ID NO: 499440 - DNA, 405 bp, Stenotrophomonas maltophilia
atggcaaagcagaagaacacctccgcgcaggtggccagcggtccggccgacgcgcaggaagcgcccgctgcggtagtggacgcagcggctggccagggcgagcagccggacgccgaaagccccgacgctggcgcggcagcagccgtcagtgagccggagacggacgagggccacgacagccagaggcccgaaaccgtggaggcggacaacgacctgccgccaccggatgaagaaccggctccgccggagggtgaaaccgtgccggcgctggtgctcagtaacaaccacctcggggaggttggccaggtgatccaggtcaacgcggcacacgttgaggcgctgcgccttggcgggctgatcgacccccaccccaatgccatcaagtcggccacgccggaggaatga

SEQ ID NO: 499441 - DNA, 1062 bp, Stenotrophomonas maltophilia
atggacctgacggccgacgaggcactgcgcgaacagggcgtgcgtgagcacgacactgccaaccgcggcggccgtgacctctccaacgaggagcgcctgttcgaccgttgggcgcgtggcggtgacagcgccctgagcgcagaggactggaagcaggtcaacgcggccatgtcgggcaacccggccgtcaacccggagcagggcggctacaccgttccgaccacgctggccgagcagatcctggatgccctgaaggcattcggcggcatgcgccaggtggctgatgtgttcagcactgccggcggtgagccgatgcagtacccgaccagcgatggcacctccgaagagggcgaactggtcgctgaaaaccagtcggcgaacgaccaggatgtggccttcggcactaagggcctgcaggtgtacaagtacagctccaaggtggtgaccgtgccgtgggagctgctgcaggacagcacggccgatatcgccggcttcatcgagaagcgcctgcagacccgcctgggccgcgtcaccaaccgccactactctgtcggcaccggcgttggccagccgatgggcgcctttactgccgcgacggtgggcaagatcggcgctgtctcggcgctgccgatcgtcacctacgacgacctggtcgacctggagcacagcgtcgatccggcgtatcgccagctggccaagtggatgttccacgacgacatgctgaagctgatccgcaaggtgaaggacgaccagggccggccgatcttcgtgccgggttacgagcagggcaatccgggcggtgcgccggatcgtctgctgaaccgcgatatccagaccaaccagcacgccccggccccggccgcaggcgcaacctcgatcgcgttcggcgacttcagctactacaagatccgcgacgtgatggccgtgaccctgttccgcttcgccgactcggcctatgtcaagaggggccaggtgggcttcatggcctggatgcgctccggcggcaacctggtcgacgtgggcggcgcggtgaagaccttcaagcacggcgccgcggcttaa

SEQ ID NO: 499442 - DNA, 567 bp, Stenotrophomonas maltophilia
atgaatgtgcacacgatcacgaacattcccactgacggcatcgtgctggccggtggtctttccagcaggatgggccgtgacaaggcgctgctaccgtggcacgggcgaaccctgctagagcacatgcgtggcctgctgcgacaggcaggtgcggaaagggtatgggtgagtggcaactacccggccttcggtggcattcctgatcgcgtggcacgctgcggcccgttgggcgggctctacagtgtggccatgtgcatgccggacgctgccgctctggtgcttccggtggatacgcccaatgtgaccccggcgttactacaacggttacgtgatgcgccttcggctgcctgtgtgctgtttgcggaagaacccctgccgatgcggttgcagattgatgaccattgccggcatgtgttgcgggaattgatcgagaatccggcggcgcaccgctcgctacgcgccctgcgagaacgcttgggcgcaatcgagctgccactggcggatagcgaatacgaccagctactcaactgcaacacctcaaccgagctcgagttcattgcatcatga

SEQ ID NO: 499443 - DNA, 591 bp, Stenotrophomonas maltophilia
atggacgggcaggccctcacccatgccgacctggtgaagatcgccggccggtggctgcggaacaccgccggttgctcggtggtgttggaggagctgtgcgccgccacaggcaacggcgagaacccggacgctatcggctggcgctgcggccaaacgatgctgatcgaatgcaaggcgagccgatccgacttcctagcggaccgaaagaagccgttccgcgcggatccgtcgcgcgggttggggatgtaccgctacttcctggcgcccaaggggctgctgcgacccgaggagatgccggatcgctgggggctgctggaggtgtccggccggcgcgtgttccggacaaagggccatgagccggggcaaggctactggcgcactgaggacccctggtgcttcaccccgaggtttaacgacggcgaggtgcagatgctgctgtccgccatgtcccggatcaaggtcagggtcggcgccagcgatttccattcgatgctgcacgagcggctgatgcgtccggtcgtagcgccgctcagggaaagtcagacggctgcggcgtgggcgactgctgccgccacggagccgcccgcgtga

SEQ ID NO: 499444 - DNA, 333 bp, Stenotrophomonas maltophilia
atgaccgacctggacctcaagccgtgccccttctgcgcatcgaagaatgttgcagatcagaacgatgtggttatgtcgtcagatggcgacgagggctacagcgagtggatcgaatgcggcaactgcggctgccgcgcgccccaggcgcaggcatggaacctgcgatccggcactgccgtgaactggcgatcaatcgtggaagctccgcaggacggtcggcggctgatgctgtgggactcggtgagcaagcggccggtgttcggcggctggcggggtgacaaccccaagatcacgcactttgcggccgagccggctggcccggaggtgctgtaa

SEQ ID NO: 499445 - DNA, 441 bp, Stenotrophomonas maltophilia
atggcccgcgagatctaccaaggcgtgggcgcaaccacaccgatcgaccgtgaccggatccgcagcgcgctgcgggacctgaccgaggcccactacctcttgaaggatggaattggccaacgggcggtgtttcgcctgtcgggtgtcggcatgccccgggcgttcgttgtgacagacgagcagcgcgagcgctgccgtctcgacaaggcacacaagcaagcgctgcgccgggccgcgaggcgaggtggggcggcaggcccgcgcacggcggacaagatgaccatcaaccgttcgcgagtggagcgtctgtcggggctggcccctgcgaaggcgtggggcatggagaaggacggccagcggccagccgagacggtggagcagttcgaggctcggggtgggcaggtacagcgcctgacggccagctgggagcagcgagcatga

SEQ ID NO: 499446 - DNA, 396 bp, Stenotrophomonas maltophilia
gtgcgggtcagttcggcggtttccttggcgaagtcggtgtccttgatgcggctacgcgaagccgacaggttttccgacgaggtctgcaggttggccacgaccgaggtgaagcggttctgcacggcgccgagatcggcgcgggtgctgttgatcgcacccagggccttgtcgacgatttccatcgcctgctgggcgcccttcacggtgctgacgtccaggttgctggcgtacttcgcagccggggccgcagcagcggtcgtggcggtgaaggtcggcgcggtggcgccggtccaggtgcccggggtggcggtgatggccttgaacgagccgtcggcgttggtgctgtccttgaccgaggtcagggtcacgccagcggtgccgttcacttcagcgtag

SEQ ID NO: 499447 - DNA, 183 bp, Stenotrophomonas maltophilia
gtggccaacctgcagacctcgtcggaaaacctgtcggcttcgcgtagccgcatcaaggacaccgacttcgccaaggaaaccgccgaactgacccgcacccagatcctgcagcaggccggtacggccatgctggcccaggccaaccaggtaccgcagaacgtgctcagcctgttgcagcgctga

SEQ ID NO: 499448 - DNA, 1212 bp, Stenotrophomonas maltophilia
atgctgcactggcacggtgtcgacgcacccacgggccacggtcagcgtcgcggccacagggtcgatcgacaccacccggaccagctcgtcatcgatcaacgcttcgctgccgacctcaacggcgtccaggctgactccagcggccagcgcgatcgcagtcggctcgctcttggcaggcattgcggtcgtgagcaggccggtgggggcgaagtcggccgtaccggcttcggcgaatgcagcgttgcccaggcgggtctgcagggtgtagccgaacgccaccgaggacggccgcacgccgatcgaggtcaggtagccgacgtctggcgacaaggcagcaagatccggcgcaccaagcgtggtggccaggtcacgatagctcgcctcctgcaggcgctgcaccgtgaccggtttgggcttggtatccggctcgacccaggcgctgtcagagggctggatgtaactggcagccgccatgcctgcaacgtcctggccaacggtcagcaccacggccgtttcggtctgcgtgccttcgtcgacgtccagaatgcgcactggcatgcgggccacgccacgccgtggccacgacagcgcacgcacctgaccacgttcgaaggggccagcatcgcgccgcacccggatcttcaccctgcagggcaggctgctcaccgccgccacctcgcgcgccgcgacgcgggcggcgagcgtggcgttccacaggcccggatagttctttcggctgctgaccacccggccctgggcctgcacgctggcgagattctgataggtgaccgcagcatccttgttggtggcgatatcgcgatagaccaccgtgatctcgttgacgctgttctccagcatcggctgctgccactccatcatctcgatgatctggccaggaccgatctctgccagagtggccgggtcatagtccggccgcaccagcaccagcttggtcagacctgtcaccggatcttcaatgcgcatgccgccgatgtggtcgcataccatgtccatgaactcaccggcgggcaccgacctggaccacttcaggcacaagccaagaccttcatccttgagcacctgcgcggcggcaaggaagctggcttcgtcaatcacctcgatcgggtgccccataccctcagtgcggacctggtagatgatgtgggccgggttcatgccttcatcgatctgcaccaggccaccctgccatag

SEQ ID NO: 499449 - DNA, 1023 bp, Stenotrophomonas maltophilia
gtgattcgacatgccatcgtgacaaccggggcgattgcactggccgttcttggcctaggcttctccgcaccagcacaggccgccgggtgcccggcccgtgcgggcatctcctatgccgagtgcgacgatcaaggcgaggcctacgcagcggcgtgggcggctgcgaccgagcaggctggcatttccaatgccggtggcgggttcacatgggtcccaatggttgagcaggagggcaaagcgtacgttggctttgtacggccctcgtatgcgtctagcggccggtatgcgagcaacacgcgcggctacaagacgcagtgcagtgcgcgacctgaggaaactggctggaaggggggtggcactggcgggaccggatccgtgtgccacaacggttgcgcctatgagggttccgtctatgcgggctctccagtgggccttctattccaaccaacaggtggcacgtgcaccacgaacgatcatcctgctcccaccacgcctgatccgggcgagggcggtggtgacggcggaggcaccggtccgggcgacggtggtggcgaaggtggcgggacggatccgggtggcggcgacggcggcggtaccggccctggcggcggtgacggcgggggtggcacagggcctggtgatggcgatggtggcgggaccgatccgggtggcggcaccggacctggcccagggcctggcacaggagagggcggggacggtggcggggcagggccgacgactggacggctgtacaagaagtcgggcaagaccgtcgccaaggtccttgctgagttcaaggctggcattgagggcgccccgatcctgtccaaggtcaagggcttctttggtacctgcacgggtggcggatcgtgcccgacggcgacctgggacggcggccagtatgccggcaagttcgacctggccagtctgtgcagcgggccactgctgcaactgttccagtacgccggcttcgtgttcctcgccggcatgggtgttgtcgccttgaggtgggcattgctatga

SEQ ID NO: 499450 - DNA, 186 bp, Stenotrophomonas maltophilia
atggaccaggacgccatgctctccatactgccagcggaccacgggcccggcgctccctgcgactcagtggcctctgccaacatcggacgcacccaacgggtgaacgtcgcaaccggcgaggtccaacgggtgatgaggaacatccagacgcgagttgtgcccggcggtgccttcatcttcacgtag

SEQ ID NO: 499451 - DNA, 480 bp, Stenotrophomonas maltophilia
gtgcagtcccatgcctggcagacgtggggccgcaccgagcaggccaacctgcgcagcctcctgtactggctgcagggtcgcgcgtccgcgctgtggctgccgtcctgggccgacgacctggagctgatcgagccggccttggccacctccggaggcatcgtggtggcatgggccggcgtgtctcgcttcggccgcgcgcagcccggacgccgacatttgcgcatcgaactgttcaatggtcaggtgctctaccgccagttggtccaggccaccgagctcgatgcccagcgtgagttcctgcagttggacgtgccgcacggtatcgccctgcagcctgcagccatccgctcgatcagttggatggtgctggcccgcctcagctccgacaccgtcgagctgtcccatgaaactgatggcgagggcctggcccgctgtcgggtgtccttcgccggcatcggtgccgaggagagtgagccgtga

SEQ ID NO: 499452 - DNA, 717 bp, Stenotrophomonas maltophilia
atgaggacgaacaaggcacgcgaattgctggcaagccgtatggggccgaccacgcagaggttcgacgctggctgtggcggcggacggccggagctgacgacgcaggacattgcggccgcccttgcgtacgtgccggatggccttgggcgtgagctgctggaggtgctgtggtggccggagagcgcagcgcgccgtcgcgagcatctgcgcaaggcggtgatcggcttggtggcgccagagttcatccagcagatgcatggcctggccaccgcgcggaccgagttcggcattgccaaagcaagcatcggctggggcggcgggccggtgacggatatgcagcggcgtgagctgagacgggcagagagcgcactggatgaggcgcgcgctgcggcatggccgaacaacaccatggagcagcttggggtgctggccagcgctgtgattgaggagatggccacctgtggctgctgcaaggcctgcgacggcctgcgcattcaatccgcccctgagggtggcggggtggtggagtgcgaggcatgtggcgggatggggctggagcagctcagcggcagaaagcgcgcggcagcgattggcgccgacaagtcggcctatcagcggttctggcagccggtctacgaatggatgctggagcgcatgcgaagcgctgagcacgttgctgccgagagtctctcaagcgcgttgaaccgcgcggcttag

SEQ ID NO: 499453 - DNA, 372 bp, Stenotrophomonas maltophilia
atgacgatcggaacccgtctgaagagcgagcgggaacgcttgggcctcacgctgcctgagttcgcagaactcgctggcgcgaagaagaacaccgtgattgattggcagagagatgcatccagccctcctgccgccaagctggctgcgcttgctgatgcgggagtggatccgctttacgtgctgacggggcaacgcagcatcgcacgccccggcatgacggacactgagatagagcagttcaatgacgtggtggatacgttctgggcgctgtccgatcccggtcgcgtaatggccttgaacatgctgactgcactgctggcaaaggaaacccaagaagggtcttctcggggactgcgtaagccaaagacctga

SEQ ID NO: 499454 - DNA, 420 bp, Stenotrophomonas maltophilia
atgaagaagctggttttttcgctcgcggttctgttggtcttgctcggtgcaaaggcggtaattggccaggacttcaaagaccagaatctcaagcatctagtcatcggaaaaacaacgctgagcgaggcggccgccctcttggaagcgccgccgctgcgatcatcggttggggcaagcggcgctactggctacacctggcaatacatccagtcgaaagccagtctttggactggcaatgtgcgcagctccagtaagcaggtcatcctggtcttcaatacggatggaacattccagagaattttccaaatggatggcatccagctcccgcctgaggatctcgagaggcttttcagtcagcctgctgccgagcacgcgcacaggcaacagaaccaagtgaattcacgagctgttccagactga

SEQ ID NO: 499455 - DNA, 810 bp, Stenotrophomonas maltophilia
atggtcgagaagggattgagcgagcggcgagcgctgacggtggtgcggatgagcgctagcgcgctgcgctatgagcctcgggccgaccgcaacgttgagctgcgcgagcagatcgctgcgctggcgcatcggcacagacgctacggggtgggcatgatccatttgaaattgcggcagaaagggcttgtcgtgaactacaagcgagtggagcgcctgtatcaggaagcgggcctgcaggtgcgtcgcagaaagcgtaagaaggtgccgataggcgagcgccagcccctcctgcggccgtccgctgccaatgaggtgtggtcgatggacttcgtgttcgaccgcaccgcggaaggccgggtgatcaagtgcctgaccatcgtcgacgacgccacccacgaggctgtggccatcgaagtggagcgggcaatttccgggcaaggcgtgtccagggtgctggacaggctggccatgcagcgcggcttgccacgagtgatcaggacagacaacggcaaggagttttgcggtaaggcgatggtggcctgggctcacgaaaaggaagttgccctgcgtctgatcgaaccaggcaagccgaaccagaatgcttacgtcgagtctttcaacgggcgtttacgcgatgaatgcctcaacgagcactggttcccgacattgcttcatgcccgtaccagcatcgaaagctggcggcgcgactacaacgaagaaaggcccaaaagagcgcttggcggactaacgcccgcccagtacgccgcgcagttggcgacgaagaaagataacatcagcaccggactctaa

SEQ ID NO: 499456 - DNA, 264 bp, Stenotrophomonas maltophilia
gtgaagaagcgcttttccgaagagcagatcatcggcttcctacgcgaagctgaggccggcatgcccatcaaggacctctgccgccagcatggctttagcgaggcctcgtactacctgtggcgcagcaagttcggcggcatgagcgtgcccgacgccaagcggctcaaggacctggaggcggagaacacacgcctgaagaagctactggcagaacaggtcttcgagaacgacgtcatcaaggatgcgttgcgaaaaaagtggtga

SEQ ID NO: 499457 - DNA, 387 bp, Stenotrophomonas maltophilia
atgactgacggaaactcagagaacgacagccggcgcgacaccggcgaaaggcttcggttgatccggggcgatagaagccagaaggacttcgctgagctgctcggcatcgggcgaaccacgctcatccggtacgaggcgggaacgcgtccaatagaggtcgaactgctcgttaaattgaatctgctattcggtactcaaccgctctggcttctcaccggcatgggcgcatcaggagaaggggtgcagttgacaagtcgcgaggcgatgctgctgaacaactaccggaacagtcctgaagacgcgaaggtggctcttgaaaaaacaagcgctgcgttcgcccagtcgaaaccggaactcaaaacgaaaaagcacgactcgtcagagtga

SEQ ID NO: 499458 - DNA, 267 bp, Stenotrophomonas maltophilia
atggtcagctgtagcctcaccgtcaccattccggcgtacaccggcctcatgctccagtgcatccgctgccacatcgcgctcgccggattggaccaggtcgagcccaacgtcgaccgcttcgggttgcacttcgtgtgccccagatgcggacgccgcaacgaccttcacgtcgtcggcagggatgagtacggagcgctgatcgaccagttcccgctccccggcggctcccatcaggacacccccggcccagcgggctctgcggcatag

SEQ ID NO: 499459 - DNA, 378 bp, Stenotrophomonas maltophilia
atgagcaaacggaagatcatcgcggcagcgaagcgcaagggcctgactgtcgagtctgcgcattacggctggtcagcaacaccgggagaaatggttccaggctgggaggtgcagttcggtccggagatcgatgagctgttctgcgaggccgagcttcagtacttcgatagcaccagcgaggcgctgcagtggctggatgcactggtggcgctgccgcgccggccggactggttccctatcgcggacgcgccgcaggacggcacgcggctgatgctgtgggactcggtgagccagcggccggtgttcggcagctggcggggtgacaacccggcgatcacgcactatgccgcagagcccgctgggccgggggtgtcctga

SEQ ID NO: 499460 - DNA, 441 bp, Stenotrophomonas maltophilia
atggcccgcgagatctaccaaggcgtgggcgcaaccacgccgatcgaccgtgaccggatccgcagcgcgctgcgggacctgaccgaggccaactacctcttgaaggatggcactggccagcgggcgttgttccggctgtcgggcatcggcatgccccgggcgttcgttgtgacggacgagcagcgcgagcgctgccgtctcgacaaggcacacaagcaagcgctacgccgggccgcgaggcgaggtgggacggcaggcgcgcgcacggcggacaagatgacgatcaacagggcgcgggtggagcggctgtctggcctggccccggcgaaagcctggggcaaggaaaaggacggacagcggccggccgagacggtggagcagttccaggcacgcggcgggcaggtgcagcgcctgacggccagctgggagcagcgagcatga

SEQ ID NO: 499461 - DNA, 654 bp, Stenotrophomonas maltophilia
gtggtacagctcccatatggccgggtcatacttccgggtctcggtgccgaccgtctcgtacttgccggtgcccgtggcggcgtaaaacctcaccgaataacgctgatccgagccgagcgcatcgagcttggtgtaggtgttcttcttcgccattcggcgaatgatcagccggtgcaggtctttgcagtcctgcgaaatgatgaccatgtccaggctgatatggccgtgcttggcaaagaagttggccgcccgctccgggaggttcgcccggttggtgggccagtactcgtgcgcctcatcgatcaccaccaaggcgtgcttctcgatgtgcgggaacgtgaccccgccgtcattgtcggtgtcgcagacgcaccactccacgacctccttgtcgcccatcacgtggaccaggctgcgcacctcttcttctggcatttccaggtgcgcggcgatcttgtcgagcttgtcccctaccccattcaaccgcacgtacacgtgccgcttggcgcgcagcgccggcaggatgtgatgcagcaccgcttcgtagctcttgccgctccgcggcagtccttcgtgaccgaagatcatgtcgttacgtccactggaatagggtcaggaacacgcgtacgaggcgaaagaccagcgccgcggtga

SEQ ID NO: 499462 - DNA, 135 bp, Stenotrophomonas maltophilia
atgctcaccgcggccggtccgtggacagccttcatcgtcgcccagcttcgcgttggcgaggccatcgcgctgctcaccgcggcgctggtctttcgcctcgtacgcgtgttcctgaccctattccagtggacgtaa

SEQ ID NO: 499463 - DNA, 231 bp, Stenotrophomonas maltophilia
atgtgggtccaaatcatcgtaatgattgtggcgctgatcgtcagctacgtgatgcgcccaaaacctacagtcccgaagccggcatcgctggaggatttcaacgtgcccacggcagaggacggtcgcgagtgcgcaatggttttcggcacgaactggatcgacgatcccaacgtgctgttctacggggatctgcgcaccacgccgatcaaggtcaagggcggcaagaagtga

SEQ ID NO: 499464 - DNA, 228 bp, Stenotrophomonas maltophilia
atgaatcgccctgtcctggtcactgttgaccatgctcgcgccgcaaagctcggcgagggtaacggcgtgctgtgcgctgccggcatccgcacctggatgggccggcatggactggatctccgtcaattcctggacgaaggcctgcctgccgagcagttcgaggctctggacgatgccttcgcccagcgactggctctgatagcacgcgaggaggccggccgtgggtag

SEQ ID NO: 499465 - DNA, 231 bp, Stenotrophomonas maltophilia
atgtggttccaaatcatcatgctggtcgtgtcgctgatcatcagctatgtgacgcgtcccaggcctaccgttccgaagccggccgccctggaggacttcaacgtgcctacggccgaggatggccgcgagtgcgccatgatcttcggcacggtgtggattgatgatcccaacgtcctgtactacggcgatctacgcaccacgccagtcaagaccaagggtggcaagaagtga

SEQ ID NO: 499466 - DNA, 228 bp, Stenotrophomonas maltophilia
atggatcgtcctgtcctggtgaccgtcgaacatgcccgagcagccaaactgggcgaacacagtggcgtgctgtgtgccgcggggattcgcagctggatggaccggcatgaactgaacctccgccaattcctggacgaaggcttgccggtggagcagttcgaagcgctggatgatgccttcgcccagcgtctggctgcgatcgcccgcgaggaggccagccgtgggtag

SEQ ID NO: 499467 - DNA, 768 bp, Stenotrophomonas maltophilia
atgaagatcacttccattccattggacaaggccgtgtcggacggccccatcgatgccttcagccatgcgttgctgggcgattcgcccacgctggatgaggtgctggaatacctggcctcgcggcacgcggctgatccccggtatcgctacctgtgcacgctcgatgatgtcggccaatgccgctacaccagcatgcatgcgtccgacgacgcgcgcatcgcgctgtacgaggacgaagatccggaaacccccgaagatgcattggcggcacgtgagcggttgctggcgcatgtggtcgcgcagctcgagcattcctctcatcggctggaatggagcgcgctggcgggcacgctgatgtgcagcaacgaggacatcgaggcgctggtcgccgccaatgcaacgccggacctcatcgtcgacgaggtggtctgcgtgcaacaggtgccggtggaccgcgatgacctgctgatcgccgccctgcccaacggttacttcagcgcggactgggacatcttccagaatcacgccctgatccggcacctgcaggaacaccatgactaccgcttgttcggactcggcgcatcgtggctcggcttccagcgcgacagcgcgccgtcgcctgcacaggcaaatgcgttggtcgcggacctgcagcgcgtctacgcggccggaacgcatgacacgtggtcaaaactggctgcaaccctggccacccgcaccacagtgctgttgggctacaccgaagacttcagcgaacaactgccctga

SEQ ID NO: 499468 - DNA, 882 bp, Stenotrophomonas maltophilia
atggaccgcggcgacctgatggaggccggcacctacagcgaggcgccagacgggcaacaggtgctgctgaagtcaccaccggtgacgcctgtggtcgtggatgcttccagtgttggcgctggcatgatgcccgcccgtctggagcaggcggtaggcgacgtgatggcgcggctgggccgcgaggcgtggtcggccagcgactgtgtggcgatcgatcaggccacgggctacatgggtatcggctattacgcgggcgcggcgatcaccgggcgcgcggcgttgaacgctctcctgccaagctacggcgcggggtgctaccaagatccggccggcgtgctgcgctttgttcgcgtgatcgcgcccgaatcccacgcagggccgttcgcctttgatctgtccgaggcacacgacctcgcggctgacctggtcatggtgcccgatgatgctccgaacctgacccggcgaatggcctaccgcccgaacgcccaggcgctggccgcatcggatctcgtcaccgacgtggtcgaggtgccgcaggcgcgccgtgatgagctgaccggcctctaccgtgggcaggtgtacggggccggcccgctgcatgcccactaccagcgggcggaagttgctgaccctgtcatctcgttgttctggcacgccagcgacgcgcaggcggagatcgatcgaatcttgggcatgtaccgggtgcaacgctacttctaccagctgacggtgcgtggtgatcaggatctggcgccgctgccaggtcaggtcggccggctcacctacagccggtatgggctggcagacggcaagccggtgctggtgcgccgagttgagcgcaaccctgccacgggggacgtggtgctgacggtgtggggatga

SEQ ID NO: 499469 - DNA, 879 bp, Stenotrophomonas maltophilia
atggaccgcggcgacctgatggagatcaacacctacaacgaggcgccggacgggcaacagctgctgctgaagtcgccaccggtgacgccggtggtggttgacgcctccagcgtcggcgcgggcatgatgccggcgcggctggagcaggcggtgggtgatgtgatggcccggttgggccgagcggcgtggtcggccagcgactgcgcggtgatcgaccaagccacgggctacatggggatcggctactacgcgggcacagccatcaccggccgcgcggcgctgaattccctcctgcccagctacggcgccggctgctatcaggatcctgctggcgtcttgcgctttgtccgcgtgaccgcgcccgagacacatgccggtgcgttcgccttcgacctgtcggaggatgatctggcggctgatctggtcatggtgcccgacgatgcgccaaacctgacccgacgcatggcctaccggcccaacggccaggcgctgggcgcatcggacctggtcaccgacgttgtcgatgtgccccagtcccgacgcgatgaactgaccggcctctaccgggggcaggtgtatggtgctggtccgctgcacgcccactaccagcgggcagaggcggcggacccggtcatctcgctgttctggcacgcggccgacgcgcagcaggagattgagcgcgtcctggccatgtaccaggtgcagcgccacttctaccagctcgcggtccgtggtgatcaggatctggcgccgctgcccgggcagatcggtcggcttacctacggtcgatacggccttgaagacggcaagccggtgctggtgcgccgggtagagcgcaaccctgccacgggggacgtggtgctgacggtgtggggatga

SEQ ID NO: 499470 - DNA, 243 bp, Stenotrophomonas maltophilia
atgatcgccggcagcgaggcattgatggtcgtgatcgactgcgccagcgcaccggttgtggtcgccgtggcctcctcgagcgatgtgaccgacgcagcagtagccagcgcaccctcccccgcgggcatcctggcctccatggtgctgatgcgccgcacctgcgcggcatctgccgcaacgcgggccttcagctcctcgtacgccaggccagaggtcaactggagcgggtccgagccggtgtag

SEQ ID NO: 499471 - DNA, 324 bp, Stenotrophomonas maltophilia
gtgagtcacggaaatcagggcccggatctgggcaagttgcgccgggagcagctgcgctggctgatgctgctggtgctggatcgctctcgcccgtatccgatcggcgaagccgtcctggccggcgccgcccaggacatgtatccggatgccaccgctttggaagtgcgcagggagctggattacctggacacccgccgcctgatcgacatcaccaaatccccgtcggggccgtggtctgcggagctgacccgccacggcgtggatatcgtcgagtacagcatcgactgcggtcctggcatcgcccgcccgccgaagtactggtga

SEQ ID NO: 499472 - DNA, 318 bp, Stenotrophomonas maltophilia
atgatcgttgaagtgcagccgctctacctggtgtggttcgccggcatcggcatcaccctgctcggcggcctgatcgccggcggtcgctggctggtcaaccagctgcagcaacgcactgatcagcagttggccatcctgatcaacgacagcaagcgctggcgcgaggttgagagccacctcaccgacttccgtctggaagttgcgaaggaatacgtccgccgcgaggactatgcccgcgggcagagcgtcatcgaggcaaagctcgatgcagtggcctcgaagatcacgaacatgcaaagcaaggggaacacgccgtga

SEQ ID NO: 499473 - DNA, 450 bp, Stenotrophomonas maltophilia
ttgctgctcgggctggtacagccctttgagggctactcggcccagccctaccgcgatgtagtcggcaaactgacggtttgctacggccatacggcaaacgtcgaacagcgcacctacacccgcgccgaatgcgagcgcctgctccagtcggaccttggtgttgcctggaacaccgtacagagctgcatcaaggcgccgatgacggactatcaggcggctgccctgacgtccttcgccttcaacgtgggtcctggcggtgccggggtcaaggatggactgtgcttcctgcgtaacggtcagcagccgcgcatccgcgtctacgccaaccaggggcgctgggatctggcctgtgcccagttgagcaactgggccaatgccggcggcaagccctacaaaggcctggagcgccgccgcacggccgagcgcgcgatgtgcgagggccggtactga

SEQ ID NO: 499474 - DNA, 435 bp, Stenotrophomonas maltophilia
gtgcagccctttgagggctactcggcccagccctatcgtgatgtcgtcggcaagctgacggtctgctacggccatacggccaaggtggaacagcgcacctacacccgcgccgaatgcgagcgcctgctccagtcagacctcggcggcgcctggaacaccgtgcagagttgcatcaaagtgccgatgacggactaccaggcggccgccctgacgtcgttcgccttcaacgtcggtcccggtggagcaggggtcaaggacggtctgtgcttcctgcgcaacggccagcagccgcggatccgtgtctacgccaaccaaggccgctgggaccttgcatgtgcccagctgagtaactgggccaatgccggcggcaagtcctataagggattggagcgccgccgcaccgctgagcgtgcgatgtgcgagggccggtactga

SEQ ID NO: 499475 - DNA, 330 bp, Stenotrophomonas maltophilia
atgggcgctggcgcgccgatggcgctgcgcgggaactgggtgagcaatggcgacgcaaagagggctgagttgcgcgcttcgtcgtcatcgcgtgtgctgctcgcgatcccacggatctgccagtcgggaatgacctggtcggccgtctcaaggccctgggtgtcgatcagccagtcgcggaagcggcggaacaggtccgtcagcgtccagcccagcggggccagcgacatggcaaagcaggcggcatcgtcgccctcagcgaacgaggccgacttgagtcccttcaccgccggcggctgcgcgcccaggaagccgatgtggcgcaggtag

SEQ ID NO: 499476 - DNA, 297 bp, Stenotrophomonas maltophilia
atgcgcaacgccggctccaccggcttgctcaggtcgtacagggtcagcagcgccgcgttgacgccggccaacgcttccatttccacgccggtgcgtgcctcgctggcgcactcgcaccacacgcggatcgcctgccgctccggcaccggcgcgcagaacacctgcaccagttccagcggcagcggatggcacagcggcatcagcatcgacgccatcttggcgccctgcagtccggcaatctcggccatcaccagcgcatcgcccttgggcaggcggcgctcgacgatcagcggatag

SEQ ID NO: 499477 - DNA, 297 bp, Stenotrophomonas maltophilia
atgcgcagcgccggctccaccggcttgctcaggtcgtacagggtcagcagcgccgcgttgacgccggccagtgcctccatctccacgccggtgcgcgcctcgctggcgcactcgcaccacactcggatcgcctgccgttccggtaccggcgcgcagaacacctgcaccagttccagcggcagcgggtggcacagtggcatcagcgtcgaggccatcttggcgccctgcaggccggcaatctcggccatcaccagcgcatcgcccttgggcaggcggcgctcgacgatcagcggatag

SEQ ID NO: 499478 - DNA, 447 bp, Stenotrophomonas maltophilia
gtggattacatcctgcatgacttccagatcgttgccctggatgagcatggcaaggaatcgaccaccctgcgcgcaccgcggctggagcgccagcgcggcgaccagaccatcaacatcgccaccccgctgttcgagatgccggacaaggatggcaagcactggacgctgcgtgccgagaccggctggctcagcgccaagggcgacgagatgaagctgcgcggcaaggttgccggcgacagcccggccggcccgggcgtggtgccgaccaccttccgcaccgaccacctggacgtgttcccgaaggagaaccgcgcccgtaccgacgccctggtgaccatgacccgcccgggcatggaacagtccggcgtcggcttcgaagtggattcgaagaacaacacgtatcatttcctcagccagtccaagggccgttacacgcccaaacgctga

SEQ ID NO: 499479 - DNA, 363 bp, Stenotrophomonas maltophilia
atgtggtcgaaggcaccgccgccgacgaaggaagaagcggcccggatcgagctggccaagacgggcccgtgcatggcctgcctggcgttgcagatgcaggacctgctggagccggagctggtggtctatggctgcgactacaaccacgccaagagcgggaacgtgcggcgcggtcacatgttcggctacgccctctgcaagtggcaccacatgcggcatccgatggaggggaacaccttcgcgacgatgcgccagatctacggcccgagcctgatggatggctcgcggaccttccacgagacgtatggctccgatgacgagctgattgccagtcagacctacgtgaacgaattgagggcatga

SEQ ID NO: 499480 - DNA, 297 bp, Stenotrophomonas maltophilia
atgcagattgtgatggaagtgaacgatgagaacggcaatcggctatgggacctcgccagccggttggggctgctgtgcggcgtggcgtggtcggatgcaacgcctggcaatggctttgctgccaatctgccgcctggggagttcttctatatccccatcattccctctgactcgcttggctacgttcccgtggttggttacgcgaatggccgggtttactgggcgttgaacaagaatggcagcggtcagttcgtcggcacgatcaaaccggtcaagttctactacggagtgcggtga

SEQ ID NO: 499481 - DNA, 297 bp, Stenotrophomonas maltophilia
atgcagatcgtgatggaagtgaacgatgaaaacggcaatcgactgtgggacctcgccagtcgattgggcctgctgtgcggcgtggcgtggtcggatgaaacgcccggcaatggttttgctgccaatctgccgcctggggagttcttctacattcccatcatcccctcggactctcttggctacgttcccgtggttggttacgcgaatggccgtgtgtactgggcactgaacaagaatggcagcggtcagttcgtcgggacaatcaagccggtgaagttctactacgggatacgatga

SEQ ID NO: 499482 - DNA, 243 bp, Stenotrophomonas maltophilia
gtgcttgccgagttcaaggctggcattgagggcgccccgatcctgtctaaggtcaagggattctttggcacctgcacggggggcggatcgtgcccgacggcgacttgggatggcggtcagtatgccggcaagttcgacctggccagcttgtgcagcgggccgctgttgcaactgttccagtacgccggcttcgtgttcttggcgggcatgggtgttgtcgccttgaggtgggcattgctatga

SEQ ID NO: 499483 - DNA, 297 bp, Stenotrophomonas maltophilia
atgcgcagcgccggctccaccggcttgctcaggtcgtacagggtcagcagcgccgcgttgacgccggccaacgcttccatttccacgccggtgcgtgcctcgctggcgcactcgcaccacacgcggatcgcctgccgctccggcaccggcgcgcagaacacctgcaccagttccagcggcagcggatggcacagcggcatcagcatcgacgccatcttggcgccctgcagtccggcaatctcggccatcaccagcgcatcgcccttgggcaggcggcgctcgacgatcagcggatag

SEQ ID NO: 499484 - DNA, 276 bp, Stenotrophomonas maltophilia
gtgaaggaagcgcgcgctgcacatcgcacggcgacctaccagctgtctctcggcgccgacgtgtctggccgggatggggtgctgcagcaggccgtggcttctgggcagctgatgcacgagcaggtggcggaacaccttgcactgcctccagcaacgcccgcgttcaacccggtggcgctgttggcggggaccgtagaggcctcgccgaccgccaatgcccgagcccgtcagcgcctggcggagatcgcggagctgctgggagacaaggccgcatga

SEQ ID NO: 499485 - DNA, 276 bp, Stenotrophomonas maltophilia
gtgaaggaagcgcgcgcggcacatcgcacggcgacctaccacctgtccctcggcggtgacgtgtccggccgggatagcgtcctgcgagaagcagtcgccgcgggcctactgctggaggcgcaggtggccgattacctggcactgccgccagctacgccagcgttcaacccggtggcgctcctggccggaacggttgaggcatcgccgacagcggacgaccgcacccgtgcgcgcctggccgagatcgtggcgctgctgggggacaaagcagcatga

SEQ ID NO: 499486 - DNA, 234 bp, Stenotrophomonas maltophilia
atgaacgctcccggccgccccttggacgaggtttccacccgcgaactggagctgctgctcgcctcagcccgcgaccaatacgccaccgccgtcaacaactggcagcgggccatcgagtcggacgagccgctggccaacaccctgccgctggccggcgccgttgacgcagccgaccgccgcgccgtccgcatcttgaaggagctggcgcgccgccagcaggacgctgcggcatga

SEQ ID NO: 499487 - DNA, 234 bp, Stenotrophomonas maltophilia
atgagcaccgccggccgccccctggacgaagtcccgacccgcgaactggagctgttgcttgcctcggcccgtgaccagtacgccaccgctgtgaacaactggcagtgcgccgtcgaatcggacgagccgctggcccacaccctgccgctggctggtgccgtggacgcggccgatcgccgcgccgttcgcatcctgaaggagctggcccgccgccagcagggagctgcggcatga

SEQ ID NO: 499488 - DNA, 288 bp, Stenotrophomonas maltophilia
ttgtggccgggaaccgcgccacaggatgcagcactgccctacgcgacgtgggaggtcgtcggcggttcgcccaccgcgatgctgtccgaggcgccgccggtcgacggctggcgtgtccgattgaccgtgtggggcaaagccttgacgcaggccaacggcgcggccgttgccatccgcgacgcgatcgagcgcgtaggcagcatcgagtcctacaaccccacgcctgacagcgacggcacggacgcctttggcatttccttcgacgctaggctcctgcaactgcgctga

SEQ ID NO: 499489 - DNA, 309 bp, Stenotrophomonas maltophilia
gtgctgggcgacccgatccggttgtggccgggaaccgcgccgcaggatgcagcactgccctacgcgacgtgggaggtggtcggcggatcgcccaccgcgatgctgtccgatgcgccgccggccgacggctggcgagtccgattgaccgtgtggggcaaagccatgacgcaggccaacggtgcggccgtcgccatccgcgacgcgatcgagcgcgtgggcagcatcgagtcttacaacccgacgcctgacagcgacggcacggacgcctttggcatctccttcgacgccaggctcctgcaactgcgctga

SEQ ID NO: 499490 - DNA, 255 bp, Stenotrophomonas maltophilia
ttggccgggcacagccgcaccggcctgcgcctgaaacccattgccgacggcatcggcgaatcccccagcaccacgctgcgcaacctgcagcgcctggccgaagacggcctggtcgaacgctcccccttcgaccaggacaactggcgcttgtccccccgaattgtccagatcgccctggcccatcaggccgaggtggcccgtgaagaacggcaactggacgacttcaagaaccgctacagccgtagccccaactga

SEQ ID NO: 499491 - DNA, 279 bp, Stenotrophomonas maltophilia
gtgcgtgatccgctcggcggggacgtgaagcaatggcgtagatggcgggctgacgtgccggcagaggtggttccgctctcgggtcgagagttcactgcggcctcggccgagcatggacaggtgactgcacgcatcgagatcccttacctgcccggggtagtgccgaccatgcgtgtggtgtttgacgggcagatgtatgcgattcgtgcggtgctgccggatgcgacagcacgcgggcatatcacgctgatggtcgatgccggggtgtccgatggctga

SEQ ID NO: 499492 - DNA, 123 bp, Stenotrophomonas maltophilia
atgagggccgagccgttcctcacgccggcaggcgagaccaagggaccggaggcagcgcaggtgatcatcaatgaaacctgggcggcgctcgacaagcagctgaaggaggatggctggcgatga

SEQ ID NO: 499493 - DNA, 375 bp, Stenotrophomonas maltophilia; identical to SEQ ID NO: 493275

SEQ ID NO: 499494 - DNA, 378 bp, Stenotrophomonas maltophilia
atgagattcatttacgtgttgctcttcatccttctcacgggtgcggcgctgttttcatttcgcaaactccatcgaggtgagctgggcgagaagccggtttatgccgctttgcagagagcagagctggagtacagacgccagccggttggcgacctgatctatgaagaagggggcgggcatctgctcgccgggttctctatagacgcacaagcgagggtttgggttgcgttggacacaatgagggacaatggggatctgtttgtcgtccctatgcacggggaacagagagtcccttgtcaactcgtcgatcagctggtgtcggccaatgtcggatcagcacaggctaggcacgcgttgaaggcgtcttgcgtgaagtag

SEQ ID NO: 499495 - DNA, 1107 bp, Stenotrophomonas maltophilia
gtggatggcgaggtacgcaaccatgacgcagcggggaataccaccagcatcggcggcaagacgttcatctacaacgatgccaaccgcatgaacgcggtgaagcagggcaatgccgtgctggaaagctacgcttacaatcatcgcggtgagcgcgtgctgcgtaccccggccggtggcgcagcgcagatcaccctgtacgacgaagcagggcagtggctgggcaactactcggccacggaccaagcgcagcagcaggccatctggctggacaactacccggtggcactgatgaacacgccggctaccggcgtgccggagctggcctacgtccaaccagatcatctgggcacgccgcgcgtggtgatcgatccggtacggaatgtctcgatctgggagtggagcaacaagagcgaagtgttcggcaaccagattccgagggctgacccggatggcgatggtgtggcgtttgggcttgcgctgcgcttcccgggccagcaggcgacggatgcgagtgggatgctctacaactaccagcgtgaatacgacccggtggtggggcggtattcgcagagtgatccaattgggcttggtggaggtgttagcacctatacctatgcaatcggcaatacaatttcgcacgttgatccactgggtttgaaagactcccagcctggagtgactgtgacagaaactggcgcatatacggtcgattggcgctattacgtgaataggacattggaagctcttggctttccgggggcatttgtcgcgggagccagcgacttcggcgggcagtatgccaatcaacggtcagccacacacgtggttggtgggtctcataacggatggggtggccaggataggtacttccactgcatggcgaactgcgaggctgcacagaagggtatgggcggatcagctgctgctcagtgcataagcaacgggcgcgagtggttcgatcaaagcatcaagggcgactctgccgctgactccgctgcggatcagttggcaaatcgcctcggacgatcatctggacaaatgagtcgtacggggagttgctcgcagatgtgcgggagctatcgtcccggtggaaacttcccctactga

SEQ ID NO: 499496 - DNA, 153 bp, Stenotrophomonas maltophilia
gtggctgaccacgtgcgagatacccaggggcgcatcagccagatcggcctgacccggaccagccacgcgcgccagatcgtggtgaacaacgtgacctatgcggccttcggcccggcgacgggctggacctacggcaacggccgccagctgtag

SEQ ID NO: 499497 - DNA, 1041 bp, Stenotrophomonas maltophilia
atggcaacccccctcgaccgcatcaagatcctcgaaccgcgccatcccaaccgcagcaccggcatcatcaacggccgcaccagcgggatactgaactggaatgacatcccgtacccgtcgttctatcgggcctacaaggagctgtcgaccaacttctggatccccgacgaggtcgacatgaaggccgatgcgcgccagtacggcgagctgtccgggcgcgaaaagaacgcctacgactcgatcatcggcctgctggccacgctcgactcaccgcagacgcgcttcatctacaacgtggccgagtacatcaccgacccggccgcgcatgccaatgccgcgatcatcggccagcaggaagtgatccacaacgagagttacagctatgtgctggcctcgatcaccgacctgccgaaccagaaccgcgtatttgaactggcgcgcacccatccgaccatcatcaagcgcaacgcgccgatcatgggcgcgtatgacgacttcatgcgcgagaagaccgccgagaccctgttgaagtcgctgatccagtcctcgatcctggagggcatcaacttctattccggatttgcgtacttctacaacatggtgcggcagaaccgcatgaccggcaccggcaagatcatcagtttcatcaaccgcgacgagctggcccataccaagttcatcagcgagctgatccgcgccatcatcggcgagaacccggagctgcagaccaacgagctgaccgcctatgtgcaccaggcgttcgagcacgccatcgaactggaaacccagtggtcatcggaagtactggacggcatcgatggcatcgatgtggaggaaatgacgcgctacgtgaagtaccgcgccaacaagatggccggcatgctcggcatcgagcggctgtacagcgacaccaccgacaacgtgatgccgtggatcaaggcttacgccgacaacttcaccgaaaccaagaccgacttcttcgagatgcgcaatgcaagttacaagaagaccaacgtcgacaacggcttcgacgacctctga

SEQ ID NO: 499498 - DNA, 327 bp, Stenotrophomonas maltophilia
atggataatgcctacttcgtctctgctgaagaaggaatcacgttgagcgcattgaatggtcggaaggtgctgctggcgacctttctcggaagcaagcacccgcctgacgatgttcggccctccgaagactactggaggttgatcggtaccaacggaaccattgttcttgaggaatcccaaacttccatggccaggcatcaacgcggcctgcgggtgctggtccagtttcctgaaagcatcaggggtatggggcttgtgtgccacaacgaggtaccggacagcctctggattttcgtctccgatctagtaattcacccggtcgattaa

SEQ ID NO: 499499 - DNA, 2628 bp, Stenotrophomonas maltophilia
atgtaccgcaccaccctgaacctgcttgccggcgcgatcgcgctgggcctcaccgccggcgcagccggcgccgctgaatccgccgacaccggcaaggacagcaccaccctcggcgccgtgctggtgaccggctccaacatcaagcgcagcgataccgccgggccgaacccggtgcagatcgtcagccgcgaacagatcgagcagaccggccgctccaccctcaccgacgtgctgcgcaacctgtcggccaatgccggcaacagcttcgacgaacagtacaccggcagcttcgccgccggctcggcctcgatcggcctgcgtggcctgtctccgaagaacacgctggtgctggtcaacggctaccgcgtctccaacttcggtttcgcgctcaacacccaggacaccttcgtcgacctcaacgcgctgccgatcagcgcagtggaacgcatcgaagtgctgaaggatggcgcctcggcggtgtacggttccgatgccatcgccggcgtcatcaacatcatcctgcgaaagaacttccagggcgtggaagtcggcggcggcttcggtaccgccacccaaggcggcctgaacgagcgcaaggccaacctgctggctggcttcggtgacctcgaacagcagggctggaacgtgctgttcgggctggacctgctcaagcgtgatcgcctcgacgccgaccagcgtgcctacacccgcagcggcgatttccgcgacaagcccggcggccgcctggccggttggtccaccgccggtggcaactggctgtccaacccacgcgcgccgcagccgttcgccaactgccccgacggcagccagctgcgcccgtacagcgacttcggcagcaccctgcccggccaggcctgcgccttcaacgcgcagccgttcaagaccctgcagcccggcgccgagcgcctgcaggcgtcgttgagtgcgacctaccgcttcaatgacagcgtcgaagcgttcgccgacgtgctgtacagccacaacaaggccgaccagatcttcagtgcgccgctgaccgtcggcccgggcctgcgtgcctacaacccggccaccggcaccctgatcgacgtgccggcggtgctgccggtcggccacccgaacaacccgggcagcgcgccgctgccgttcgagtacaccttcttcgatctcggcccgcgcctgaaggacaacacgcaggtgttctaccgtgcgctggccggcgtgcgcggcagcggcgagcgatgggactgggaagtggcggcgctgacctcgcagagcgcgcagcgcgaatacgtcgacaacttcgtcaaccgctacgcgttcgaacagatcctgcgcgatggcagttacaacttcctcaacccgtccagcacgccgggcgcgctggatgcactgcgcctgcagaccaagcgaccgggctggtacaagctgcacgcgttgaacgtgaaggcctcgacctcgctgtgggagctgccggccggtgcggtcggcttcgcctggggtgccgagttccgcaaggaatcactggacgcgcgcaccagtgcgcaggtgctgtcgggcaccgaactgcgtccggccatcaacgtggtcaacggcgagcgtcaggtcagcgccgcctacgccgaattgagcgtgccgctgcaccgcacgcttgagctgcaggtggctggtcgcggcgaccactacgatgatttcggcaaggcgttctcgccgaagctggcgctgcgctggcagccgttggacagcctgctgctgcgcggttcgttctcgcgcggcttccgcgccccctcgctgccggaaatcgcgccgggccagaccgtcagctacggctcggtgatcgatccgctggatccgctgcagcccggtggcagccgtggcgtgaccaacatccgcaccggcaacccggacctgaaggccgaacgctcgcgcaacttcaacgtgggcgcggtgtggtcgccggatggcgataccagcatcggcctggactggtaccgcatcgagcaggacaacctggtcaagccggacagcgcgcagttcatcgtcgacaacccgacgctgttccccggccgtgtacagcgtgatgcgcaggggcgcatccagttcatcaccaaccagtacgccaaccagggtgaactgaccacctccgggctggacctggacgccaaccacaccttccgcaccgagggctggggcaacttcaccgtggccagcagctggacccacctgctgagcttcaagcaaccgctggtagccggtcaggcgccgtatgagggggctggcaacaatcgccacggcgcgttgccgcgtacgcgcggcaccacctcgctgaactgggcggtgggcgactggagcagcacgctgagcctgcagtacgtgagcggctatgaccagcgtgtggcgacggcgaccagcaacccgggcctgcgcgaccgcatcaagccgtatcaccagctggacctgtacgtggcctacgaaggtattcccaacaccacgctgtcgctgtcggtgctgaacctgaccgacaaggatccgccgttcgacccggccggtggctccaacggcttcgacatcagccagtacaacctgcgcgggcagttcgtctcgctgggggcgcgctaccggttctga

SEQ ID NO: 499500 - DNA, 1980 bp, Stenotrophomonas maltophilia
atggatgtactggagccgcaacaatccccggtgcgcacccttcggcctgtgttcgccttcgcggcgatcgttgtcgtggcgttcgcgctgttcgtcagcctgtttccgctcggtgcgggccgcctgctggtcaaggcgcaggactgggccgcactcaatgtcggctggtactacctgctggcgatgaccctgtacttggtgttcgtggtcggtgtggcgctgtccaagtatggtggcatcaagctcggcgccgaccatgatgagccggagttcagttatctttcctgggccggcatgctgttcgccgccggcatcagcatcaccctgttcttcttctgcgtctccgaaccgctgacccactacctgcagccgccgcagggcgaaccggcggcgggcgaggccggcgcgcgccaggccatgcagctgctcttcctgcactggggcctgcatggctggggcgtgttcgcactcgcagcgatggcgatggcctacttcgcctatcgccacaacctgccgctggcgctgcgctcggcgctgtatccgctgatcggcaagcgcatcaacgggccgatcggctacaccgtggacgcgctgggcatcgtcgccaccgtattcggcatcggcgccgacatgggcttcggcgtgctgcacctcaacgcgggcctgtcgcacctgttcaacatcccgcactccaacctggtgcagatcatcctggtggtcagcatgatgggcgcggcggtggccgtcgcggtttcaggcgtggagaagggcgtgcgctggatggccaacatcaacatgctgctggcgatcgcgctggtgctgttcatgctgtgcgccggccccacccagtacctgctgagtacgctgatgcagaacctgggcgactacctgggcagcgtggtcggcaagagtttcgatgtgtacgcctatggcggccggccggaatggctgggcggttggacggtgttctactgggcctggtggatcggctgggcgccgttcgtcggcctgttcatcgcgcgcatctcgcgtggccgcaccatccgcgaattcgtgttcggcgtgctgctgatcccgctgggcttcaccctggcctggctgtcgatcttcggcaacagcgcgctggaccaggtgctgcaccacggccagcagcagctggcgcagctggcggtggatgacccaccgaccgtgctgtatgcactgctggatggctacccgtggagccgcacggtgatcgcggtgaccgtgttggtcagcttcatcttcttcgtgacgtcggctgattcgggggcggtggtgttgtccacgctgtcctcgcacggcggcgcgccggaggatgatggtccgcgctggctgcgcgtgttctggggcacggtgatcgcggtgctgaccgccgggctgctgctggccggcagcatcgatgcactgaaatcggcggtggtattggcctcgctgccgttctcggcggtgctgctgctgatgatgtggggcctgacccgcgccttcagtgacgaatcgcaccgcaagcgcgcgctgcagtaccggccctcgccgctgatcggtgacgatcgccaccatcagggctggcgccagcgcctgagccaggccatgcacttcccggtgcgcgaccaggtctaccgcttcatggacgacacggtgaagccggcgatggaagcggtggccgaacagctgcgcgggcagggctgggacgtggccacgcgcttcgaggccggcgacatggagctgacggtcaatcacggcgagcagcaggacttcctgtaccgggtgatcctgagtggctacctgaccccgtcgttcgccgcccagcagctgcgcaaccagcgctactaccgcgctgaagtgcatctgttcgaaggcagccaggactacgacctggtgggctacagccgcaagcagatcatcaacgacatcatcagccagtacgaacggcacctgcagttcctgcacctgagccggtaa

SEQ ID NO: 499501 - DNA, 2082 bp, Stenotrophomonas maltophilia
atgcccatccacgccctgcaaccggcccgcctgcccctggctgccgccctcgccctgtgcctgctcccggccacccgtgccttcgcccaggacggcgccacaacgctggacagcatccaggtgtccggcagctggctgggcaccggcctgcatgacagcgtcaagagcttcgccggcgcgcgcacggtggtcgaccgccagcgcatcgaggccagcggcgcggccagcatcggcgatgccatgcgccgcatccccggcgtgcaggtcaccgacaactccggcacggccggcagctcggtctcgctgaacatcggcgtgcgcggcctgaccgggcgctactcgccacgctcgaccgtactgctggacggcgtgccgctggcggtagcgccgtatggccagccgcagctgtcgttcgcaccgaccagcctgtccaacatcgaatcgatcgacgtggtgcgaggcggcggcgcggtgcgctacggcccgcagaacgtgggcggcatcatcaacttcagcacccgcgccattcccaccgaggcaggcctgcacggcgaagcgggcgtgcgctacaccgcctacgaccatggcggcggggacagcacccagtacaacgccttcctcggcggtaccggcgacaacggcctgggcgcggccctgctgtactccggccaggatggccgcggctggcgacagggcagcgatgaccgtttcaacgatctcgctctgaagttcgcctacgccatcgacgaacagcaggagctgcgcgccaagctgtcgtactacgacgtgcgctcgctgaccccgggcggcctgacccgcgcccagtacgaggccgacccgttccagaacacccgctccaccgatttctggaagggccaccgcaccggcatcgacctgggctacaccaacacgctgtcggccaacagcgagttcgaggtgctggcctattacaacgaaagcagccgcgccagctcgctgatcaacacggccaatacccagttgaccgtgcagccgcgcgattaccgcgtgcttggcatcgagccgcgctatacccagcgcctgcattggggcagcacggtgcacgacatcaccgccggctaccgcttcctgcgcgaacggggcaacgaccgcagctacaccgtcagccgccgcaccggcgtggccagtgccaccacccgtttcgacaacgccaccgatgcccatgcgttctacatcgacgaccgcatcgcgatcggccagtggcggatcaccccgggcgtgcgcatggaatggatcgacatggaccgccgccaggccggtggcacggcgaccttcagcagccgcaacgacaaggccctgccctcgctcaacatcgcctacctgctgacgccgcggctgactgtgttcggcaactacaccacctcgttcgggccggtgcagaacatccagctgaattcccagaccgccagcaatccgctcaaaccggaagtggcaaagaccgccgaactgggcgcgcgctggcaggacggtgcattgcgcgcggaagtgaccgtgttcaagatgcgcttcgacaaccagatcctgcaggtgccgggcatcaccccgccgaccttccagaacatcggcgccaccgaccacaagggtgtggagagcgcgctggagtaccacttcgccgaggacggtgcgctggccgggctggagctgtacgccaactacacctggacccaggcgatccagcagtccggtgacaaccgcggcctggacgtgccgttctactcgcgcgacaccgacagcgtcggcgcccgctacgcactggccggctggaccttcaatgtctccagcacccaccagagcggccagttctccgatgccgccaacacctgggaagaaaccgctgacgcgcgcgtgggccgcgtgccgggcgtgcgcctgtggaacgcgcaggtggcctggcaggtgccggggctggacgacagcgagatcgcgctgggcgtgaacaacctggccgacaagcgctggtacacccgcaacgtcgatggcaacgccggccgcatggtggctgcgccacgcaccttctacgtgcagggccgctaccgcttctga

SEQ ID NO: 499502 - DNA, 1149 bp, Stenotrophomonas maltophilia
atgctgccggcccgatggcccgggttcctgacgggcttcgaaggtgacgcgcaggtggtgatggtcgtggatggacgccccggtcggccgcccatgggcgcgcgattgctgtcctgtgatggcgtcgatgcacaggcactggctgagtggcgcgtgggcgacttcaacgggcgctggaacctgcaggcgagccgtatccacgcgggcggcgaggtgctgcttgaacagggcaacccgttcgtgccgacgttgcacagctgcgtcttctgggtggatgggcgccagagcgcctacacgctgcaatggcttccgattgatacggcaacacgcgaagcgcgactggccgatacccgtcgcagcttccgcccagccaatggctggcacacattggccggtggcggctactggatcaccaccagcagcttcaatgccgatccagccacgcgcaatgcccagcagctgaccgagcttttgcagcaactcaccccggtggccgacgcactgcagcaggcaccgcgggtggtgctggacgtgcgcggcaataccggaggtgcgtcgcactggagcatcgcgctggcccgtttgatctgggggcctgcagcggtggatgcattgcgtgacgagagttgggcggaatggcggacgtcggaggccaacatcgcgcagctgcgcggcttcctgcagaagctgaaggcagcacacgacgcgtcgcccgaactgctgcacatgctggaaacggtcaccgcagggatggcccgtgccggtgcgaacggtgaggcgctgtggcgcgaaccggcggacgcgccggttgggccgatgcgtccgcccgctgcagccgttccggatcgcagcggcagggtggtgatcgtggcggacgcctcctgcggctcagcctgcctggatgcactggatctatggaagcggctgggcgctctgcaggtgggggtcgagacgtccgccgacagtgtctacatggatatcaggcctcagccattgcccagtgggctgagccggatttcggtacccatgaaggtctaccgcggtcgcgggcgcggttcgaacgagccctacgtgccggatcgccgctacgcgggggacatgcgggacacgcaggcgctggaggcatggatcctggagggcagggactga

SEQ ID NO: 499503 - DNA, 816 bp, Stenotrophomonas maltophilia
atgaaccgctggattttcctggcattggccacgctcccgttcgccgccggcgccgtggtcatccgcgatgatgttgacgatgccagttaccagatcgacgcatcggtgttcccggcactggcagacatgccgggcgaggggcacggcgtcctgatcgcgccgcgctgggtgctgaccgccgcgcatgccgcgccgatggaagggaggggcgccaccatcaccatcaatgggaacgtctacggcgtcgagcgtgtcttcctgcaccccggctaccggaggatgcccgaagcgctgggcaaggaagcgatggcaaccgggagcgcgtcgaaaatccacgcgttcctggcagcatcggatgacattgcgttgatcagacttgccgcaccggtgagcgatgtgccgccggtcgcactctaccggggcgccgacgaggtcacgcaggtcgccgccctgatagggagaggcgccaccggcaatggtgcgactggcctggtgcccggcgggccgcatcgtacgacgctgcggcgggcctgcaacgcgatcaccggcggcaacacgcgctatctctggtaccggtttgatccgcctccgcagggccttccccttgaaggcgtgctcggcaacggcgacagcggcggcccgctggtgatcgagaaagatggggcctggcagctggtgggcctcggttcctggatcaccgccgtacccgagcatgcgctggaagcgggtttctatgggcaggtggtctacaacgtgcgcgtgtcccgctacatcgactggatcgaaagcatcatcgagcgtgacgcgtcactttag

SEQ ID NO: 499504 - DNA, 720 bp, Stenotrophomonas maltophilia
gtgcgcatcgtcgccaagcgggcgcggcatgcttcattggtcattgccgggctcggcactgttgccacgtggtgtgccgcgaccacagggaaacgccgtgcgcagcccttcgacaaccagtggcgacgcatcctgctgcaatcgctcgcggggcagttgccggagatgggaagacacatggtcgaccagttcatgcggaaggatctggccctgcccgcaccactgtccgcggctggcagcggcgacgcccaggatatagccgctggcgcgagcgctggacaggctccggcactgttcgccgtcgcagaacccgtcatcgcctttcccctgcaggagggtgatgagttccgtgccgctgacaagccaggtccgtgccggctgcgttgttccggccacagcggacccagccagcgcgcagaggccaagtgcgaggagccgaggcatgacgcggcgcgcctggggttggtgatgtcccttcatgttgaggccctggctgttgctttcatggatgccacgcggcagaggtcaaagccgatcaagctggccgagaaacgcgatgagatcgtagaggcttccagaatacgtcgtattggccgttttccatgcgccactgcccggagatgcgtcgccagtcggaccagcgggatgctgaaggcacgggcgctgccagccatctggaaggatcgtggtgggatgcctgcaggcggagcagtgctctga

SEQ ID NO: 499505 - DNA, 954 bp, Stenotrophomonas maltophilia
atgaacaccttcgcccgtaccctcgccgttgccgccctcgccctctcggtccaggccggcctgtccgcgcaggcagccgaaccggccaagccggctccggtcaccgccatcgcgcgcaccgccagctacatcaccaccgccgacggcgtgcagctgtactacaaggactggggcccgaaggacggcccggtcgtgaccttcagccacggctggccgttgaactcggacagctgggaatcgcagatgatcttcctggccaaccacggctaccgcgtcatcgcgcatgaccgtcgcggccacgggcgctccagccagccgtgggacggcaacgacatggatcactacgccgatgacctggccacggtgatcaacacactggacctgcacgatgtgaccctggtgggcttctccaccggtggtggcgaagtggcgcgctacatcggccggcatggcaccggccgggtcaagaaggccgtgctgatcagctcggtgccgccgttcatgctgaagaccgccgacaaccccaacggcctgccgatcgaagtgttcgatggcatccgcaaggcgcagatggataaccgcgcgcagctgtaccgggacattccgtcgggcccgttctatggcttcaaccgccccggtgcgaaggtgtcgcaggggctgatcgatgcgtggtgggcgcagggcatgcagggcggccacaagaacacctacgattcgatcgccgcgttctcggccaccgatttccgcgccgacctgaagaagttcgatgtccccaccctggtgatccacggtgacgacgaccagatcgtgccgatcgatatctctggccgccagtcagcgaaactgatcaagggcgccaggctgattgtctacccgggtgcgccgcatggcctgaccgacacccacaaggacaaggtcaaccaggacctgctgacgttcctgcaggaaaagtga

SEQ ID NO: 499506 - DNA, 219 bp, Stenotrophomonas maltophilia
atggacatgcaggcagggggcggcgtcgatccgccggcaacgaccgattcgcaggaactgacattccactggctctatcagcgagtgcaggggctggttgagcacagcatctatccgaaggcgggcagggtggagacgtgggcgttccgcatcggcatgggtgcggcgatcatgagggtcggcagggattcgtgtaaaaacgggccgaaagtgagctaa

SEQ ID NO: 499507 - DNA, 426 bp, Stenotrophomonas maltophilia
gtgcgtccgaacacgtttacgatcagccggctggcggcggcggccgatgtgcacgtcgaaaccgtgcgctactaccagcggcgtaggctgctgcgtcaacccgagcgacccataggaggcgtgcgtcgttacgacgaaaacgatgtcaatcggcttcagttcatccggcgcgctcagatgatgggattcagcctcgacgagatcgctggcctgctagagatcacaggcgaaggttcttgcgagcagacccgtcagctgaccgagcgaaagctcgtcgatgtccgtctacgaatccgcgagctgcgacagctggagagggatctcgaacagaaaatagcgcggtgcgcccaagtgccggtgggagagtgctgcccaaccctcgattttctggagcggccaataaagccagctgcgacaggcagttag

SEQ ID NO: 499508 - DNA, 357 bp, Stenotrophomonas maltophilia
atgcaaacaaccccggccaaatcgtctgttccagccatcgttggcgcgagcatcgccgccattggcgcatcggtctgctgcgtcgtgccgctggtgctggtcctgctgggcatcagtggcgcctggatcggcaccctgacagctctcgatcccttgaggccctggttcagcgccgccgccgtactgtccttggccgtggcgttttggatgctgtatcgaccggcggcacggtgcggtgtggatggcagttgcatcgccccggacgctctgcgacgcaggcgacgttggctctggttggcgacagccctcatcgtcctgttgctgctgtttccctattacatcgtctggattctgtag

SEQ ID NO: 499509 - DNA, 288 bp, Stenotrophomonas maltophilia
atgcacaagtggatactggccctggtggctgctctgtcggtcggtgccgctcttgcgacgcccgcaaccgtagtgatgctcgatgctgagaacatgacctgtcccgcctgcggcatcaccatcaggaaggcgctggagaaggtgccgggcgtggccgatgtgaaggtggacacccgggctgaaacagtcacggtgacgttcgaatcgagccagacggatgcagccggaatcgcgcgtgcagtcacggaagcaggcttcccggccaaggtgcggactggcggtgagtga

SEQ ID NO: 499510 - DNA, 1071 bp, Stenotrophomonas maltophilia
atgggacgagtcgcggcggcggtcttcgacgtcgcaggaaacccgggatatagccaacgggtcctgcaatgggcccctgacattgcaacccatgatccgggttcggcggggggcgtcctgggtctggactttcacctgacggtcgatggcccgcggctgatcgaggtcaacaccaatccaggcggtctgctcctcaatgccttgttgctcgatgccgtgcggtcttgcgcgccgccagcatgggccacctggaccaacgcggcccaagcgcgtgatgcggccgtcacggcctggatggaggatgctcggcagcaatccgggcgcacgccgtcgcgcctggccatcgtggacagcactccgcgagcgcagttcctttaccccgagtttgtgctgtacgcgaacgcgtttcgggaccatggcgtggactgcgtgatcagcgctcccgaggatttgtcgtttggttcggacgggcttgaggatgcccacggtcgaatcgacactgtctacaaccggttgaccgatttcgcgctcgaggatgcctcgcatgcagacattcgtgaggcttacctggcaggggacgtcgcgctgatgccgcatccccgagcacacgcgctgtttgccgacaagcgcaaccttgcggtgctcggggacccggctctgctcggcgggttcggggtcgatgcgggttcgacggcactgctgggccaggtgatcccgcccacggtcgaactcgtgcccgcgaaccgggatgcgttgtgggcagtgcgcaacggatatttcttcaagcctgcagcagggtttggcagccgtgggagttatcggggcgacaagttgacccggcggacttgggcgtctatggcgtcggcgacctacatcgcacaggccttcgcgccaccgagcatgcggatcgtgcatgggggccagtccctcaaggcggatgtgcgctgcttcgcgtccgaggcgggtgtcctgttgttcgcggccaggctgtaccagggccagaccacgaacatgcgcacccccggtggtggattcgcagcggtgctcacgtcgtcacggatcgaggagtga

SEQ ID NO: 499511 - DNA, 1104 bp, Stenotrophomonas maltophilia
gtgaccacgcgccggcttcttgcactcaacgttggctcgtccaccctcaagggcgcgtcctatctgttcaacactgagggacacggcgcgcagtctcgtctgctcgagcgctcccgggccgaaattccagtcggcgtggatgcgcaggagcgccttgccaccctgctcgaggcattgtcggagccgtggcccagccccgacgtggtggtgcaccgaatcgtacatggcggtgacctgcacgacgcccgcgagctcgacgaaaccgtgctcgcgaaactggatgcattggtgccgttcgcacccttgcaccagccggtagccctcgctttcgcgcgtgccgcgcgcatgcgttggccgcacgcgcgccaaggcgtggccttcgacaccgacttccacgcgtcgctcgcgccctggagccggcgcttgcctgtccctgaagcatgggatgcgctgggcatccgccgctacggtttccatggactcgcctttgcctccgcgctccgcatagtggccagccacgacgctggaatcctgaagggccgcgctgtcttcgcgcatctggggggtggctgcagcgtctgcgccgtcgagggcggccgcagccgcgacaccaccatggcgctcactccgctgggtggaatcccgagccctacccgctccggagatctcgatcccggcgcgttgctgtatctgctgaggcatgaacgcctggatgcgcaggcgcttgaaaacggcctgtaccgcagtgcaggccttgccggaatcgccggccatggcgacatgcgcgtgttgctgacggatcccggcccgcaggcccagcttgccgtggagctctttgcagtccggattgcgcagtccatcgcggccatggccacggcaattggcggtctcgaccatgtcgtcttttccggcggcatcggccatcgcgcgccggttttgcgggctcgcatcgtcgcgcgactggcctggctcggcctggcgctggcacctgacgtcaacgatgctggagccacgcggatcgaccgcgggggcgggccgagcatatggaacgtcgcgatcgatgaggagcgcgaactggctgaatcggcactcgcctggctgtag

SEQ ID NO: 499512 - DNA, 2076 bp, Stenotrophomonas maltophilia
atggcgcaacacaatcatcatcatcaagatcatcaggcgcacggcgagcaaccgccgcatccccgcacgggtgctgaaggtgacgtccatgccgggcacgacaagcatgccggccacagcgtggcgagcttccgcgacaagttctggctcacgctgctgctgaccatccccactctgatctggagcgggatgatccagcattggttcgactacaccgcaccacagttcccggggtcggcgtacatcccggcggtgttcggcacgatcgtgtacttctacggcggctcgccgttcctccgcggcggataccacgagctgagaaatcgcctgccgggcatgatgacgctgatctcgcttgcgatcaccgtcgccttcctttacagcgcgttggtcacgctcggcgttgtcgagggcttggacctgtggtgggagctggcgacgctggtggcgatcatgttgctcggccactggatcgagatgcgttcgatcaaccaggcacagggcgctctcaaggaactcgcgaagctgctgcctgatatggcggtgcggttggatgaggccggtaccgcgaaggaagtccctgtcgcggaactgaagcgcggcgacctgctgctcatcaggcccggcgcgagcattcccgccgacggcgtcgtgaaggaagggaccagcgccgtcaacgaagcgatgatcaccggcgagtccaagccgatggacaagtcgacgggcgaccgggtgatcgccggcaccgtcaacggacagggctcgttgcgtgtcgaggtgacgggaaccggcgacgagaccgcgctcgcgggtatcatgcggctcgtcgagcaggcccagacgtcgcgctcgcgcgcccaggccctggcggaccgggcggcgttctacctcacgatcatcgccatcgtctccgccgcggttaccgccattgtctggccactcctcggtcgaccgtggagcttcacgatcgagcgcgtagtgaccgtgctcgtgatcgcctgtccccatgcgctgggtttggccatcccgctggtgaccgccatctcgaccacgattggcgcacggaacggcctgctcgtgcgcgatcgacgcggcctggaagaggcccgtttgctgaacacggtcgtgttcgacaagacaggcacgctcacgctcggttcgcaccgcgtcgtgaagaccactgccgccgatggactcaccgacgacgaggtgcttcgcgtggccgcgtcggtccagcgcgacgctgaacatccgatcgcgcaggcgctgatgaccagcgccaaggaacatggcatcgacgttccgatgtcgcaggacttcgagtccatgccgggacgcggcgtgcgcgcagtcgtcgaggagcgctcgcttcacgttggcgggccgggtctgttgagaatgctcgcggtcgaaccgccggagacgcttcggcgggctgccgaatcagcggcagccgatggtcaatctgcaacctacctggtggaaggcgaccgggtgctcgccgtatttgcgatcgcggatgccatccgtcccgaatcgttcgacgcggtcaagcggctgcacgacgaaggactggaggttgtcctgctgacgggtgattccacggcggtcgcaaacgcggtcgcgaaggaactcaacatcgacaccgtcttcgccgaggtattgcccgaggacaaggtggcaaagatcgaggagctgcaggcccagggcaagcgcgtcgcgatggtgggtgacggtgtcaatgacgctccggcgctgctcacgtccgacgtcggcatcgccatcggcacagggacggacgtcgcggtcgaggccggcgacgtcgtactcgtgcgcagcgacccgcgcgacgtgccagcgatcatcgaattgagcaaggccacctatcgcaagatgatccagaacctgtggtgggccgccggctacaacatcgtcgccatccctctcgccgctggcgttctcgccgcatgggggatcctgctgcaacctgcgcttggggcagtgctcatgtcgctgagcaccgtcgttgtggcaatcaatgcgcagttgttgcgccgggcggtgcggtccccatga

SEQ ID NO: 499513 - DNA, 1593 bp, Stenotrophomonas maltophilia
atggcgggcacggtgcggcgcggaggccagattgcctgggcgggactcaagctcggcgtcgccgtgctgcgcctgcgccgacgtgcacccgacctgcttccggcatacgtcagcaccacactggtggggttgggcaccaccttcgtcaagctgggccagggcttgagcctgcgctgggacctgctgccggcgccctatcgcgaggcgctgtcgcgattgcacagcgatgtgccccccttcccggcggaggaggccatgcgtatcgtcgaacaggcgtttggcgcgccggtcggcgaacttttcgccagcttcgatgacaagcccctggccgcggcttcagtggcccagatccatccagcgcgcatgcatgatggtcgcgatgtggtcgtcaagatcacccgccccgggatccatgcccaggtgcaggcggatctgctgctcctgcggcgcacgatgcgcgtcgcccagtggatctggccgccactgaaacgccaccggccgctcgaactggtggacgaactaggcgcattcctgcgtgacgagatcgacatgcgtcacgaggcgcagaacatgcggcgcatggccaaggtgctggatgccctgcccggcatcacccagccgcacgtcgtcgagccgtatgccacccgcaacgtgcttgtgcaggatcgaagccacgggacccgtctggaggccgcgtacggcacagcggccgctcccgcactggcaagggcgctgctcggtgcctacgtgcatcagctcttcggcgccggcgtcttccatgccgacccgcacccggggaatctgttcttctttgacgacggtcgcctgtgcctgcatgactttggatcgatcggcgtgctcgaccctgcatcccggctcgcgctcggcggcatggtcgaggccattgcggccgacgacgccgagggcgtgctggatgcagcgatcgccatgggcttcttcccgtcgcaggtcgaccgccgctcgcatgtgcgcgagatccacctgatcctggccgagatggccagccgtccgctggcgcagtggtccagtgccgaggcaatctggcgcgtggcacgcattgggcagggcgctggcttccggcttccggcccacctgctgtccctgatccggacgctgttcctggtcgagaacacgctgcgggcgctggatccgaatctggacctgctggggacgctgtccgcgcaggcggccgcgatcgccgacattgccgaagccagccgccccagcggcaacaggccgcttgccatgcggctggcccgcactgcgcgccaactgccacagatcgccaccgacctgttgcggcaggcgcaactgagcgacggacgacccgccttctccgtacaccaccatggcctgagttccacgcaggaggcaatcgcgcgcacgggcaaccggctggcgttggccctggtcaccttgggcctgtacgtaagcggtgcgctgttgagcctgcattccgacggcccgcaagtgttcggtcacatgcctttcctggctatggtggctttcgctgctgcgggattgctctcactgcggctggtgatggccatcgccagatcgggacacttgtaa

SEQ ID NO: 499514 - DNA, 2466 bp, Stenotrophomonas maltophilia
atgaacctgcatctcaactgctgcaccgccgaccagctgtcggccgccgagcgccagcggacccttgaactcgccgacgcccaccggcgggccgatcccgcgtttgaccattgggcggccggctacggcgtgatccgacatgacccgctcacccagctccgggtccgccagatggtgcacgagctggtggccctgggccgcacgcccgatgccggcaccgcctggcagcggctcgccgcggccgatcgcgtcaccagcgccggcatgtggctggtggcccacatgacctacagccagcgggtccgcaccgacggcgcggccctcgaggccgatgacttcaaggccacgcccgaaggccacactggcgggtccctcaacatggtgccggcctacgccggctacctgctgatggacgccctggatggcgtcacccgcgcatggatgatgggccaggggcactgcgtggccgccatcgacgcgctgaacgtgctggttggcaacatgaccgcccggcacgccgaacgttacgaccgctccgacgcggggctgagccggttcgtcggcgacttctatgcctacaccctcaatccggacggaacaccggcgtcgcccctgggctcccacgtcaatgcgcacaccgccgggggcgtgatggaaggcggctatctcggctttgccgaactgcagtacgtgcatgcaccgctcaaggacgaacgcctggtggcgttcctcagcgacggtgcgttcgaggaacagcgcggcagcgactgggcgccgcgctggtggcgtgccgaggacagcgggctggtcagcccgatcatcatcctcaacgggcggcgcatcgaacagcgcagccagatcgcccagcagggcggcgagcggtggctggaccggcacctgcgattgaacggctttgatccgatcgcgctggacgggcgcgatccggccagcatcgcgtggggtatccatgtgatggagtcgcgcctgcaagcgggcgccgccgttcccgatgccgacgtgcggctgccctatggcattgccgaaaccgtgaagggcttcggattccccggcgccgggaccaacgcctcgcacaacctgcccctgcccgggaatccgtcgaaggaggccgaggcacgcgcgctcttcaatcaaggcgccgcggcgctgttcgtggccgcgtccgagctcgaggaggctgttgccgcactcaacagccacgacctccagcagcgcgtgcgcgagcgcgaccatgcgctggccgatcgccaggtggaaccgccccgcgtcccggcgatcgccgaccgcggcgccggcggcgagagctcgccgatgaccgcgctcgacgagcagttcgtcgccatcgccgaagcgaacccggggctgcgcgtgcgcgtgggcaatcctgacgagctgcgcagcaacaagctcgatcgcaccctggacgcaatgaagcaccgggtgcacgagcccgagcccggtgtcgcggaatcgaccactggcgcggtcatcaccgcgcttaatgaggaagccgtggtatgcgccgcgctcggcaacaagggcgggctgaacctggtggtcacctacgaggcgttcgcaccgaagatgcttggcgccgtgcgccaggaattgatcttcgcgcgtcaccaggcacaggcggggcgaccgcccggctggctgggcgtgcctctcgtgctgacctcgcacacgtgggagaacgcgaagaacgagcagtcccatcaggatccgaccatggccgaggcgctcctgggcgaaatggccgacatatcgcgcgtggtgtttcccccggacgccaacggcgccgccgcggccctcgcccacgcctacgcgcaacgcggcacggtcaccaccctggtcgtccccaagcgaccggtgccgcacgagctgacaccgacgcaggcgcaggcgctggccacccaaggtgcgctgtgcctggccggcaacccggcgagagcggcgatcctgctggtcgccaccggtgcttaccaattgcaggaagtgcgccacgcgcaggtgcgcctcgttgaacgtggcgtgtcggccgcgatcgtctatctcggcgagcccggccggttccgcacgccgcgcgatccggacgaggcgcggtacgtgcactccgacagcgaggtccatgcactgttcccggcggaacggccgcgcatattcgtcacgcatacgcggcccgagcccttcctgggcgcgctgcgccggctcgacactggcccggccacgaccgcggcgctcggcttcgtcaaccgcggcggcacgctggacgtgccgggactgctgttcgccaaccgcagcacctgggcgcacgtggtcgatgcggccgcgggcgtcctcggccagtcccggggcggcctgttgtcggaagcggagctggcggcagtggatggtcggggcgatccggccacgatcctgcgtcctgcaagtgggtcgacgccatga

SEQ ID NO: 499515 - DNA, 915 bp, Stenotrophomonas maltophilia
atgacccgtgtgctgatgcccttcccggccgatgcagtgttggccggcaccatcaaccagcccctgcaggcgcgcattgcacccgtggcctggcggcacttccccgatggcgagtcgctggtcaccctggacgacgcactggacggcgccgatgtggcgatcctggccagcctgcgcaacgccgatgccctggccctcccgctgcgcttcgccgcccggaccgcgcgcgagttcggggctcgttcggtcggcctcatcgcaccctacctggggtatatgcgccaggacacccgcttccatcgcggcgaggcggtcagtacaccgctgtttgcgcaattcctcgaagaggctttcgactggctggtgaccgtggacccgcacctgcaccgcgtcgagcgcctgcagtcgctctaccgcattccgacggtccacgtatcggcgacgccggccgtggcccgctggatcgctgagaccgtccccgacgctgtgctgatcggccctgacagcgagagcgagcagtgggtagcggacatcgccgccctgtccggcatgccctaccaggtgctggccaaggagcggcacggcgactacgacgtgcgcgtcagcctgcccgacccgcaggccgtggcgggccggaccccggtcctgatcgacgacatcgtgtcgtccggccacaccatcctggagaccctcgcacacctgcgccggttgtcgttgccgccgccactgctggtcgccatccatccggtgttcgccggcgatgcctatgcccgcctgcaggaagcaggtctggcccgcatcgtcagtaccgacaccattgcccacccgtcgaacgcgatcgcgctcggcgcggacctcgctgacgcggcatcgaccctgatgtccgcttcggccgactccccggaggacccatga

SEQ ID NO: 499516 - DNA, 1518 bp, Stenotrophomonas maltophilia
atgaccacgcaggccccgggccacacccgcctgcgcgtcacccgtgccggcatcgacacctaccagcagccggtggtctatatgcaccgcgactgcgaggtctgtcgctcggaaggctttgccgcgatgacgcgcgtcaggctggacgtggacgcccgcacgctggtggcgacgctgaacgtggtcatcgacgatcggctcggcctggacgaggtggcgttgtcggaggccgcgtggacgctcctcgatcccgcgcccgacgccctcgccggcgtcaggcacgcggaacccgcggcgtcggcgggcgcgctccgtgccaaggtgttcggcgcccggttggacgacgcgcagtacttcgccctggtgcaggacgtgatggaaagcaggttgtcggacctggagcttgcagctttcgtcactgccagcgcgggtgaccgcctggaccatgcggagacgaccgcgctgacgcgagccatgatctccgtgggccagcgcctggactggggcgaagggccggtgctggacaaacactgcgtaggtggcctgccgggcaatcgcaccaccccgatcgtggtggccatcgtggctgcgctgggctaccgcatcccgaagacctcgtcgcgcgcgatcacgtcgcccgcgggcaccgccgacaccatggaagtgatggcgccggtggcgctcgacctggcggcgatgcgccgggtggtggagcgcgagggcggctgcatcgtgtggggtggcaacgtgcgcctgagcccggccgacgacatcctgatccgggtccagcgcccgctggatttcgacagcgacggccaactggtcgccagcgtgctgtcgaagaagatagccgcgggctccacccacgtcctgatcgacatgccggtgggtccgacggccaaggtgcgaggtgaggccgcggcccacagcctcggcacgcggcttgcccacaccgcgggcgcgctgggattgcagttgggcatccatcgctccgacggcacccagccggtgggtcggggaatcggcccggcgctcgaggcgcacgacgtgctcaaggtgctgcgcaacgcggccgatgcacccgccgaccttcgcgaacgcgcacttgcgctgtccgcggcgctgctggacatggcagcgggcagcaacgccggcaccggactggagcgcgcgcgcggcgtgctggattccggggcggcgctggccaagttcctggcgatctgcgaggcccagggaggcttccgcgaaccgccacgggcggcgttcaccgccgacgtcccggcgcctgcatcgggccgcatcgcggcgatcgacaaccgcaggctggccaaactggccaagctggccggcgccccgacatcccccaccgccggcctcgaaaccggtctgcggatcggcgatacggtcgagcgcggacagcccatgatgaccctgcatgcggagtcgccgggagaactggcctacgccctggagcacgccgcgacgctgcaaccctttgtgcttggagaggttccatga

SEQ ID NO: 499517 - DNA, 1386 bp, Stenotrophomonas maltophilia
atgacagcgtcttccaaccccaccctgcaattcctcggtgccgcgggcaccgtgaccggctcgcgctacctggtcgaggccaacggtcagcgcgtgctcgtggactgcggcctgttccagggctacaagcaattgcgcgagcgcaactgggctccgtttcccgtcgaggcgtcatcaatcgacgcggtggtcctgacccacgcccacctggaccattcgggctacttgcccgcactggtcaaacaagggttccgcggccggatccactgcacccatggcagcgtggccctgtgcggcctgctgcttcccgacagcggacacctgctcgaagaggaggccaagtacgcggcccgcaaggggtactccaagcacaaggaaccacggccgctttataccgaggatgacgcccgccgcagcctgaagcagctcaaggggcatgactatggtcgcgacatcgaggtcgcatcaggcgtcacgatccgcttccatcctgccggccacatcctgggcgctgcccatgtcagccttgacgtccagggccagcgcctgcacttcagtggcgacctgggacggcagcaggagtcgctgatgaatccgccgacgcccctgcccgcctgtgacgtcctggtctgcgaatccacatatggcaatcgggaacacattccgatcgaccaagaagccgagctggcaccgatcatccgccgcgttgccgcccgcgggggcgtgatcgtcattcccgcctttgccatcggccgcgcccaggcgctcatgctgcatatcgcccggctgcgtgagcgcaaggacatccctcacgtgccggtctacctcaacagcccgatggcgatcaacgcgacccggcactaccacgaccaccactccgagcaccacgtgtccgacgaggactgccagcggatgttcgacgtggccaccttcgtcaacactgtagaagagtcgaaggcactcaaccgtcagcgcgggccgatgatcatcatctcggccagcggcatgatcaccggcgggcgcgtgctgcaccacatcgaggcgttcggccccgatgaccgcaacgcgatcctgctcgcgggctaccaggccggaggaacacgcggtgccgcgctggcggcaggcaagcgcacgttgcgcatgttcggccgcgaggtccccatccgcgccgaggtggtgcagctggagggcttctccggccacgccgacgccggggagctgctggactggatgcgcaccgcgccgtccgcgccgcgcatggtctacctcacccacggcgagcccgacgctgcagacatgctgcgcgggcgcgtgcagcgtgaactgggctggcgtgcgcgcgtgccggggcacctggagcaagtcggattggaggatgcgagatga

SEQ ID NO: 499518 - DNA, 408 bp, Stenotrophomonas maltophilia
atgaatacggtcacacacgtcgcccattccagaccccgaggtaccaatcgcagccattgggtcgccgcactggccctcgcgctcgcgttcgcattgccgggggtcgtctccgcgaacgagggtgggttccgccacaacgtgttgatgcgcggccaggtgctggaaaagcaggacggaacgcttgtggtctgtgtcgggcaggccgacggtgcccaggtcgggcaggtgctggacgtgatccggcacaagcgccgtatccggcattcgcgggccggcggtccacgctaccgccgcgagaacgttggccaagtgcgcatcgtcgaactgttcgacagccactacgcggaggctgaagtgatctccgggagccccaaggtcaacgacacagtggagctgatccgcccctga

SEQ ID NO: 499519 - DNA, 2388 bp, Stenotrophomonas maltophilia
atgacgcacgtccacaaacccactgtgcgcacgcgcacctggcccatcggcgacatggtgagtgccggctgcgcgcgcacgctggagaaggccgtggccgcgctgcctggagtcaacgccaccagcgcgaatttcgctaccgcgaccctgcaggtgtcctacgacccggcccgcctgtcggcgggcgcggtcgccaccgcgatccgcgactgcggcttccaatgcaacgcgccgatgcccgatgccgaccccgccgcaggcgcgcacgcccatgctgcgcatgccgggcacggacaggaattggccgcagagcgccccgctgacgcccacgccggccacggcgatgacgccacggatgccgggggccacgacgcccatgcgggcatgaaccacggcagcgatctgcacgccgcggcgcgcgacatgggccgccgcttcctggtcgccctcgccttcgcgatcccggtattcgtgtggtcgcccatgggcgggctgatagagccgccgccggtgccgttcggactgcgcgagaacgtctggttgttcctgctggcgaccggcgccgtgctgtatccgggctggccattcttcagcgccgcgatccggtccctgcgacggggtgtgctggacatggcggtcctggtgctcctgagcgtgggcacaggttacggtttcagcatcgcgtcgacgttcttcttcgacgggccgaacttctacgaggcctcggccgtcctgctgaccttcgtcctgcttggccactggctcgagatgcgggctcgcgccggcgcctcggacgccatgaaagcgctgctgaagctgtccccaccccgcgcggtcgtccggcgcgaggggcaggagctcgacattcccaccgctgaagtgctggtcggcgagaccgtgatcgtgcggcccggggcgaagatcccggtcgatggcatcgtgacggaaggcagctctcaggtcgacgaatccatgctgaccggcgagtcgatgccggtgcgcaaggatcccggagagtccgtcgtcggcggatcgatcaacaagagcggcgcattcgcctacaccgccaccaagatcggcagcgacacggcactggcgcagatcatcaagctggtccagaccgcgcagaactccaaggcgcccgcgcagctgctcgccgaccgcgcctcgcaatggctggtgctggctgcgatcgtgatcgggctgctgaccttcgcggtctggttctggtggctgggacagccgctgctgttcgcgctcacgctgacgatcaccgtcttcgtcatcgcctgccccgatgcactcggtttggccacgccgatggcgatcatgatcggcactggcctgggggcacgacacggcatcctcttcaagcatgccgaatcgattgagaagagcgcacgcctggacgtggtgatcttcgacaagaccggcaccctgacggtcggcgcccccgaggtggtcgacatggcggtcgcgccgggctggacgcaggagcggttgctggccgcggccgccgcggtcgaggcgcactccgagcacccgctggcgcaggccatcctgaagcgtgccggtccggtagccgagcgcgctaccgcgttcaccaacatcgatggccagggcgctaccggcgtggttgacggggtgcaggtggtgctgggcaaccggatcctgatggtcgagcacggcatcgacctctcggtattggaagcggaggctgcgcgcctcaccggtgccggtcgcacggtgatctatgccggggtgggtgaccggctcgcaggcttcttcgcgattgccgacgcgatccgggagacctcgcgcgcggccatcgacgaattgcaccggcgcaacatcaaggtggcgatgatcaccggcgacaaccgccccacggccgagcgcgtggcacaggacctgggaatcgacatcgtgctggccgacgtgctgccgggcggcaaggccgatgaggtcatcaagctgcagtcgcagggcctcaaggtcggcatggtgggcgacggcatcaacgacgcaccggcgctcacccaagccgacgttgggttcgcgatcggcgccggcaccgacgtcgccatcgagagtgccgacatcgtgctcatgcacagcgacccttatgacgtcgttcgcgcgaccaccatcgcccacgccactctgcgcaagatgcatcagaatctgggctgggccgtgggctacaacgtgctggcctttccgctggcggccggtgtgctctatccgttcgtgctgtcgccagaaatcgccgcgctgtcgatgtcgggcagttcggtgatcgtcgccctcaacgcgttgctgctcaaacgccttccactggcggatgccgccacccctcgcagcccatctaaggagtccacaccatga

SEQ ID NO: 499520 - DNA, 666 bp, Stenotrophomonas maltophilia
atgcaggcacccgactccggctacggtctttggctcctcgccgccatcaacgccgcgttcttcatcttcttcgcctggagcttctacaaaccgctgacccgttgggactggcgtgggttcggtatgttctccgccttcgtcgtggccctgttcgcggaaatgtatggcttcccgctgacgctgtacgtcctgggcggctggctcagcgccaactatccgcaggtggactggctgagccatgacgcgggccatctgctcgagatgtggttcggctggcgcgccaacccgcatttcggcccattccacatcgcaagctttgtcctgatcggcggcggcttctggctgctgtcggccgcctggccggtgctgtatcgggcacagcgtgaaggccggctcgcccgcgagggcgtgtatgcgcgcatgcgtcacccgcagtacgtcgccttcctgctcgtgctgaccggtttcctgctgcagtggcccacgctgctcacgctcgccagctatccagtgctcgtgtgggcctatgcccgcctggcgcgtcgtgaggaaaaagactgcttgagccgcttcggcgacgactacgtccgctacatgcaggaagtgccggccttcatcccgcgacgccggcgcggccccgctccatcccaaggagaaacccgatga

SEQ ID NO: 499521 - DNA, 315 bp, Stenotrophomonas maltophilia
atgacagcctccagtcctgccccctcaggctcccgacgctgggtcttctggatcttcctggcgctggccgtgttctatctcgccgtcgagcaccgcgcccaccttggggggacgcttcgctggttgcccctggccatcctgctgctatgtcccttgatgcatgtgttcatgcacaaggggcatggcggtcatggaggttccggaagtcatgggcgcgacggcaatgccgacgacacaccccatggccagcatgagagccgtagcaagcgggcactgaacgacgaaacgtccgacacctcgaacggagggcactga

SEQ ID NO: 499522 - DNA, 513 bp, Stenotrophomonas maltophilia
atgacgaccaaggaagaagtgacgctgccgctgatgacggtccgccagctggcacggcagggcgatgtcacggtgcatgtggtgcgcaactacctgcggcgcggtctgttgcaagcggccacgcataccgagggcggctaccagttgttctccacctcggagctccttcgcctgcacttcattcgcacggcgcaacaccttggcttcacgctgggggaaatcgaggaaatcatccaccacagcctgctgcgacatagtccctgtccgcttgtgcgggacatcattcggcgcaggctcgacgacacccgccaacaactggacaggctgctcgccatgcacggacgaatggagcgtgccatccacgcctgggcggagcttccggactccattccgactggcgatgacgtctgcgcattgatcgaatctgttgccgctgctgaaggcggcgggttcgtcaagtccaccccccggcgacttcttggacgccgccccacagaggagaatttgccatga

SEQ ID NO: 499523 - DNA, 3150 bp, Stenotrophomonas maltophilia
atgcttggccgtctcgttgaatggtcggtgcgcaacgtcttcctggtgctgctgatggcgctggcgattgtcgccggtggcatctacgcactgatgaacacgccgctggacgcacaaccggatctgtcggacgtgcaggtgatcgtgttcacggagtacccggggcaggcgccccaggtggtcgaggaccaggtcacctatccgctgaccagcgccctgctcgcgacgccgaagtcgaaggacgtccgcggcttctcgttcttcggcgcctccttcatctacgtcatcttcgaagaaggcacggacctgtactgggcgcgctcgcgcgtgctcgagaacctcaacgtcgcgtcgaaaaacctgccggctggcgtggcaccggcactgggacccgacgcgtccggcgtgggctgggtctaccagtacgtgctgcagagcgaccgccactcgctggacgagctgcgcgcgatgcaggactggtacctgcgttaccagctcaccaccgcgcccggcgtggccgaggtcgccagcgtcggcggcttcgtgcgccagtactcgatcaccgtcgatccggtccggctgcgcgagttcgacatcccgatttcacgcgtgtccgaggtgatcgccgagagcaaccgcgacgtcggcggccgcgtgatcgagatggccgagaccgagtacatggtgcggggccgcggctacctgcgcggtatcgaggatatcgagagcctggttctgcgcgccgaagggggcgcaccggtgctgatcggcgacgtcgcccgggtcgaactggtacccgatgagcgccgtggcatcgtcgacctggacggcgaaggcgacgttgtgggtgggatcgtcattgcgcgcttcggcgaaaacgccctggccgtgatcgggggggtgaaggacaagatcgcccagcttgcgagtggactccccgagggcgtcagcgtccaggcggtctacgaccgctccgatctcatcgtgcgcgcgatcaagacgctacgcacgacgctgctcgaggagagcctgatcgtcgcactggtgtgcctggtattcctgttccatgcgcgcagcgcgctggtcgcgatcgtcatgctgcccgtcggcgtgctgatcgcggtgatcgcgatgcgcatgctgggcatgaactccaacatcatgagcctgggcggcatcgcgatctcgattggcgtgatggtcgacgcggcgatcgtgatgatcgagaacgcgcacaagcacatcgagcgctccgacggctcccgcagccggacccagctgatcatcgatgcctgtcgcgaggtcgggccggcgctgttcttcagcctgatgatcatcaccgtctcgttcctgcccgtgttcgccctggaggctcaggaaggtcgcctgttcaagccgctggccttcaccaagaccttcgcgatggccggtggcgcgctgttgtcgatcacgctggtaccggtactcatgctgctgttcgtgcgcggcaagatcgtgcccgagcacaagaatccggtgaaccggttcctggttgcggcctatcggccggtgatcaacgtcgttctgcggcatcgcatggccacaatcatgtttgcgttggccgccctgtttgcaagcctgtggcctgcatcgcggctgggcagcgagttcatgccaaccctcaacgaaggcacgctgctgtacatgcccgcgtcgcttccgggcatgtcggtgaccaaggcctcggagctgctgcagcagcaggaccggatcatcaagggcttcccggaagtggagtcggtgttcggcaaggcgggccgtgccctgacggccaccgatcccgcaccgctggagatgttcgagaccgtcatcaacctcaagcccgaggacgaatggcgggacggcatgaccaccgacaagctcatcgccgagatggacgcggcgctgaagttcccgggcgtcgccaactcctggacgatgccgatcaaggcgcgcaccgacatgctggccaccggcatccgcacgcccgtgggcatcaaactcttcggcacggaccttgagcaactcgacgcgctggccaccgagatcgaagccgtggtgcgcgaagtgccgggcacgaccagcgcgttcgccgaacgcctgaccggcgcctactacctcgacatcacccccgaccttggcagcctggcccagtacggcgtcaccctgggcgaggtgcagaacgtggtggccgccgcgctgggcggcgagatcgtcaccaccatcctccagggccgcgaacgcttcagcgcgatcgtgcgctatccccgcgaactccgcgacgatccgcaccggataggcagccaagtccttgtgccggtgcccggcggcgcccaggtgccgctgggcgaactggcgcggattgaggtcaggaagggtgcgccgagcatccgcaccgagaacgcgatgctggcggcgtacatctacgtcgacacccgagagagcgatctcggccgctacgtgaaggctgcgcaggaagcggtcaccgagcaggtgcagttcccgcctggctactacgtgacctggagtggacagtacgaatacatgcaacgtgccgcggagaagatgcgtgtcgtcgttccggtgacgctggcgctgattttcctgctgctgtacctcaacttccgccgtgtcaccgagtcgctgatcgtgatgctgtcggtgcccttcgcactggtcggtggcatctggctgatgtggatgctcgactacaacaccagcgtcgcggtgatcgtgggcttcatcgcgctggccggcgtcgccgcggaaaccggcgtagtgatgctgatctacctcgaccacgcacttgaagcgcgtgccgcgcagaggcaggccgaaggccgggcactggattcacgggacctgcgcgaggccatcatcgaaggcgcggtcgaccgcgtgcgcccgaagatgatgaccgtggtcgcgatcatggcgggcctgctgcccatcatgtggagcagcggtactggctcggaagtcatgcgccgaatcgctgcgccgatggtaggtggcatggtgtcttcgaccatcctcaccctggtcgtgatcccggcgctgtactcgctgatcaagcagcggcagctggccaggaagccgcacccctcctccgcactacccaaggagaagtag

SEQ ID NO: 499524 - DNA, 1413 bp, Stenotrophomonas maltophilia
atgacccgtgtccagaccctgtcgctcgccatcggcgttgcactcgccgccctcgccgtcggctggattgccggccgcgccacgaacgactccccgaccgcgggcacgtcgatcgacggcccggccgcagaacgcaaggtgctctattaccgcaatcccatgggcttggcggacacgtcgccggtgccgaagaaggattcgatgggtatggactacgtcccggtctatgccgacgacgcaccgccggcggcaccgggcacggtggtgctgccgccggacaaggtgcaggcgctgggcgtgcgcaccgaagcggtcaagcgcggagccctgtccgctaccgtgcgcaccagcggcacggtcgaggtcgacgagacccggcagtacgcgatcgccccgcgcttcgaaggctgggtggagcggctgtacgcgaaccagaccggcatgcgggtcagcgccgggcagccgctgctctccgtctacagcccgcagctggccgcggcgcagcaggaataccggctggccgacgagaccgcccgcaggctggccgggtccgatcccgcgagcgcggcgtcgatggtccgcctgcgcgatgccgcccgcacccgcctgcgcaactgggaaatcagtgacgcgcagatgggcaagacgggcctggtgctcaccgcgcccgcggacgcggtcgtgatcgagaagccggtggtccagggcgcgcgtttcgagcccggcgaaaccatcctgcgcctggcggacctgtcgaaggtgtgggtgatcgccaaggtgccggcggcgcaggccgcgggtatccagcccggccaaacggcccgctttgaaaccgtggccctgccgggccaggtggccgagggcgaggtcaccttcgtgcagcccgtcatcgatgcgatgacgcgcaccgtggatgtgcgcatcgccctgcccaaccccgctggcgacctgcggcccgggctgtatgggacggtggtgctggaggagccgggggctggaccggtcctgaccgttccgcgctcggccgtgctcgacagcggcacgcgccaggtggtgctggtcgagaccggccctggccgcttcgcaccgcgcgatgtcagcctggggcggcgcggcggcgatcgcatcgagatcctcgacggcctgaccgagggcgagcaggtcgtggtctccgccaacttcctgatcgacgccgaaagcaacctgcagtcggcactccagggtcttgagggtcacacaggacacggcgcgccttcgggcaccgctgaggatccacacgccgggcacggcgaggacgccgccgacccgcacgcaggtcatggtgacgaggcctctgatccgcacgccggtcattccatgccggctagcccggaagagactccgcccgcccccaccggccacgaggggcactga

SEQ ID NO: 499525 - DNA, 1323 bp, Stenotrophomonas maltophilia
atggcatccccgttcgaccgactgccggccaggcgcctgcaccctcgccctctgtcccgccgtctgccaccgctccggcaccttcttgccggcgtgcttgccggcgccttgtgggccctggcgctgccggtgaccgccaccgaacccgtcccggggcacagcctcgagtcgatccgcgcctgggttctggaacacaacccggaattgcgggccatggacttcgaggcccaggccgccgaagcacggatccagccagcgggcgccctacccgacccgacggcttcccttggattccgcggcctcgatccggacaagccctggcgctccgccggtgccgagcgcgaggtcaactacgcgctgcgccagcgcctcccgctttggggcaagcgcgccctggcgcggaccgcggccagccaggacgcggtcgcggtcggactcgatcgcctcaccactgcgcgcgacttgctggccgacgccgaggcggcctacgcacgctactggcatgccgaccaggccgtggccgtgcttgatcgccgcatcgccctgctccgccaggtggaagagatggccggcgtgcgctacgccctgggtcgcgcggcgcagcaggatgccatccgcgcccaggtcgagcagaccagcctccagcgcgagcggatcgaacgcctcgcgaccaagcaggaggcggccgccaccttgaacgcggtgctggggcgccggtccgatgcaccgctggcgactcccgacgaggcgccgcgcctcgccgtccacagcgcctcgcttgccgaggcactggatgacgccgatgcgcatcccgcggtgcgctcgcagcaggctcgcgccgaggcggcgcgcacgaacgtggtactgcagcgtcgcaaccgctttcccgacatcaccctgggcgtgggtgcgatgcagttcggcaacggcatcgagagcaccgagctgatgttcgaggtcgagatcccgttccagcagcgtgcccgccgcgagcgcgagcgcgaatcgcgcctgctcgaagacgcagcgcttgcccgcagggacgccacgctgcgggccgtcgaggaacgcggcgcttccgcctggtcgcagtggaccaacgcgcgcgagcgtcgcggactgatcgagaacacgctgctgccgcaggccgacgccacctggcagtccgccctggccagctaccaggtcggtgaagtcgacttcgggacgctgctggaagcactcaatgaatggcagggcgccgacctcgcacgggtcgatgcactgcgtgacgaactgttgggcgccgccgccgtgcgcgccatcgaaggagagatccgatga

SEQ ID NO: 499526 - DNA, 378 bp, Stenotrophomonas maltophilia
atggtcgtgtcgggtgtcggtggcggcagcgacaaacgccgccggcgtgactgggagatccaggcaatcgccatggcctgcgagcgcgaactgggaccagagcagggccaccatcgcgaggagggcggtgcgctggaacaagttccgatggcggatgcggaccatggcgtgagcttacctcttactggaaccgatgcaattgatccaagtcaatccttggccaggcccaggggctggcgcggcacagatgtggtcggcgaggacggtacggcggccgacttggcaaggcgaagggcgttggccaccaccgacaccgagctcaagctcatcgcaagcgccgcgaccatcgggctcagcaagatcccgaatgcggggtag

SEQ ID NO: 499527 - DNA, 2427 bp, Stenotrophomonas maltophilia
atgaactcaccgtcgtcccatgaccatcaccattctgcaggcgcagcccctgtcgaggctgcggatggacgggtcaccgatccggtctgtggcatgcaggtcgatcccgccacgacgcagcatcatgcgacccacgccgacacacctttccacttctgctcggagcgatgccgcgcgaagttcgtggccgatccggagcgctatctgacgccccaggacgaacccgaggtggcacagcccggcgccatctacacctgcccgatgcacccggaagtccggcaacaaggtccaggcaactgtcccttctgcggcatggcgctggagccggaaatgccgagcctggaggacgatgacaatccggaacttcgcgacttctcgcgccggttctggtggacgcttccgctgactgtggtgacgctcgtgctggccatgttcggccagtacctcccgcgtgtcgtgctgggcgacgtgcagatcctgccgttgtcgatcgacgtgcagacctgggtcgagctggtcttgaccacaccagtcgtgctgtgggccggctggccgttcttcgagcgctgcgtgcagtcgatccgcaaccgcagcccgaacatgttcaccctcatcgggattggcgttgcggccgcctttggctacagcctggtcgccacgctggcacccggcttgttcccaccgtcgtttaccgaacatgggcgcgtcggggtgtactacgaggcggcggcggtgatcgtttcgctgaccctgctcggccagatgctggaactgcgggcgcgctcgaaaacgtccgcggcgatcaagggcctgcttggcctggcgccgaaggaagcccggcgggtcaacgccgacggcaccgaggaagacatcccgctgacccacgtccacgtcggcgaccacctgcgcgtgcgtcccggcgagaaggtgccggtggatggcgaagtggtggaaggccgctccagcgtcgacgagtcgatgctcacgggtgaaccgattccggtcgagaagaccgcaggcgaccaggtcatcggcgcgacccagaacggcaccggcgcgctggtgatccgcgccgccaaggtgggctccgacaccgtgctgtcgcagatcgtgcagctggtcgcgcaggcgcagcgctcccgcgcgccgatgcagcggatggccgatatcgcggcctactggttcgtgctcgcggtgctggcgatcgcggtggccaccttctttatctggggctccttcggtccggagccggcctggacctttgcggtgctcaacgcggtctcggtactgatcatcgcctgcccctgcgcgctgggcctggcgacgccgatgtcgatcatggtcgccacgggcaaggcggcgcaggtgggcgtgctgttccgcgacgccgaggccatcgagcacatgcgccgcatcgacaccctgatcgtcgacaagaccggcaccctcaccgaggggcgccccgccttcaaggaagtcgtggccttcgagggcttcgacgccgaccgggtcttgcacctggccgccagcctggaccagggcagcgagcacccgctggccgacgccatcgtcgccgaggctcgacgccggaacttcgagttcgaccgcgtggaggacttcgactcggtgaccggcatgggtgtgcgcgggtccgtggccggccatgcgcttgcgctgggcaataccgcgctcatggacgacctgggcgccaatcccgctgcgcacgtcgacgtggccgagcggatgcgccgcgagggcgcgagcgccatgttcctggccgtggacgggcgcctggcggggctggtcgcggttgccgacccgatcaaggcgtcggccgcggcggccatcaacgagctccacgccgccgggctgcgcatcatcatggccaccggcgacgggctcaccaccgcacgggccgtggccaccgagctgggcctggacgaggtgcatggcgaagtccgccccgaggacaaggccgagctggtgcagcgcctcaagcgcgaaggccggcgggtggcgatggcgggcgacggcatcaacgacgccccggcgctcgccgcggccgacgtcggcatcgccatgggcacgggcaccgacgtcgcgatgtccagtgcccagatcaccctggtcaagggcgacctgcggggcatcctgcgcgcccggaagatctcccaggccaccgtggccaacatgaagcagaacctcaccttcgcgttcctctacaacgcgctgggggtgccggtcgcggccggggtgctctaccccgcattcgggatcttgctgagcccgatggtcgcggcgcttgcgatgagcttgagctcggtgtcggtggtggccaacgcccttcgccttgccaagtcggccgccgtaccgtcctcgccgaccacatctgtgccgcgccagcccctgggcctggccaaggattga

SEQ ID NO: 499528 - DNA, 162 bp, Stenotrophomonas maltophilia
atgattctcagcactgtgatgggcgacgcagtcttcgtcgccttgcaccgcggcagccacttcgctggcctgcgcttccatggccgggttcatactgatcgacgcaaatgccgaccacgcgccgttaagcacgagcatgacgatcaggagcagtcgcagtag

SEQ ID NO: 499529 - DNA, 1041 bp, Stenotrophomonas maltophilia
atggcacgcggcggcttgtacaagagcgacatccagaaggcccgcgatgcgctgcgggcacagggcaaacacccgtcggtggacgcggtgcgggtggcgctgggcaacaccggctccaagacaaccattcaccgctacctgaaggagctggaagaagatgaagggcaaggccttggcgccaaggtcgcggtcagcgacgcgctacaggacctggtcggtcggcttgccggtcgcctacacgaggaggccgaggctgtaatcgccgaggcccggcagcgcttcgaagcgcacttgcaggagcgtagcgaggcgctggaacgcacccagcaggaggcgtccacgctgagcgcgcagcttcagcgcattgaaactgccttacgcgaagaaaagacgacccacgccgcagcccagcaggccttggccgaacgggtcaccgaggtcgcgcagctcggcgaacggatcgcgggactgaccgcgcggctggcggagcacgaggcgcatgcccagtcgctggagcagaagcaccagcatgctcgcgaggcgttggagcactaccgcacctcggtcaaggaccaacgcgaacaggaacagcgccgccacgagcaccaggtgcaggaactgcaggtcgcgctgcgccaggccaacgaggcgctgaccgccaagaaccacgaactggttcagctcaaccgcgacaacgggcagtggctggaacgccacagccgcctagagagggaactggcgcaggtgcggcaagctgcggacaaccagcggaaggagctggacgcgctgcggcttacggctgcggagtaccaggccttgctggcacgctggacccaggacgcccaagcgttggagagcgcacgggtcaagctggccaatgctcacgccgacttggccaaggagcgagaacggcgtgaacaagccgaggccgaagcgttgcgtgccggtgtgcgccaggacaccttggagcagttgctggcgcagttgcggcccgatcgcgccgacagttcaggtaccaacaaaaatccggcaaccaaatga

SEQ ID NO: 499530 - DNA, 1581 bp, Stenotrophomonas maltophilia
atgccgatcgaacgtatcgtcatcgacaacttcaagtcgtttcgccatctggacctgccgctcaacgcccacatgaatctggtggtgggcgacaacgaggtcggcaagtccaccctgctggaggccatccacgcggtggtcaccgggcaactgcatgggcgcaatctcgcctacgagctcacgccctacctgtttcaccagcccacggtgcaggaatttttggcgacccttgctgcgggcacgccggcctcgccgccacggatctccgtcgaagcctacttgggcggagacgccgcgctggcgtcgttgcgtggcaccaataactccctgcgcctggataccgccggcatccgcctgctggtcgagctcaacgacgactaccgcgaggagttcaacgcctacctgcagcagcaccagggcgcggtcagcctgccggtggagtactacacggtgcgctggtactccttcgccaacaatggcgtcaccgcccgcagtattccgttcgactcgaccatcatcgacacgcacggcatcaagaccttgtccggtgccgatcgctatatcgccggcatcatcgagcaagcactaacgccggcgcaacgcgtctcgctgtcgctgagcttccgccgcatgcggcagagtttttccgaagaagcggatgtggcagcgatcaacgcctacctcaccgaacacacgggggacatcagccaccgggcgctgacggtgggtgtggacacgtcgccgcgctcaacgtgggaaaccagcttgtcaccgtacctggatgagctccccttcacccaggccggcaagggcgaacagagtgcggtgaagatgaagctggccatgcatgcggccggggcggcccacgtgctgctgatcgaggagccagagaaccatctgtccttctccagcatgacccagttgatcgacaaaattgcggccctctccaccgcccagcaggtgatcatcgccacccacagcagcttcgtgttgaacaagctgggcgtggacaacgtgatccttttcagcgcgcagggccagatgaagctggaccagctgccatccgatacccacgactatttcatgaagctgccgggccacgacacgctgcggctgattttggcgaaacaggcgatcctggtcgaagggccatctgatgagctgatcgtgcagcgtgcttacagcgaccaccatggcgtggcgccgatggcccatggcgtggacatcatctcggtcaaatcgctggcattcaaacgcttcttgcagattgcggatcggctgaaaattctggccaaggtgatcaccgacaacgacggcgacatcgccgttgtgcaggaacgctatgccgaccacctcaccgcgctctactacgattccgacgaaagcgccccatcgttggaagagcagctgatcaaagccaattcgctggctgagctcaacaccgtgctgggcaagaccttcgccgatgaggtggcgctgctcaagtacatgaaaggccataagaccgatacggccctggcgatcttcaacagccctcactcgattaggttcccggactatgtccagcgtgccatcacctaa

SEQ ID NO: 499531 - DNA, 279 bp, Stenotrophomonas maltophilia
atgctggtgcgcgctggtcccaacggcatgccctcaggtgaaattgccgaagcgctcgcgattccgccaccgcgcatgagcttccaccttgcgaccttggagcgggcgagcctactgcgctcttggcgcgacgggcggcgtgtcctgtacgccgccagctacgaggacatgcgccagcttcttgaattcctcaccgaggactgctgctccgggaatccggacatctgcggcgccctcaataacctcgccactccttgtcccgcggagacctgcgcatga

SEQ ID NO: 499532 - DNA, 531 bp, Stenotrophomonas maltophilia
atgagcttccctcagccgtttaacgtcctgttcctatgcactggcaattcagcccgctcgatcctggccgagagcgtccttcgcaagatcggcgatggccgtttcaatgcgttctccgccggcagccaccccaagggtgaggtccacccgctggcaatcgagacgctgcgtcaggccgactacccagtcgaggggctgcgctccaaggcgtgggacgagttcgccgtgccaggcgccccgaccatggatttcgtttttaccgtctgtgaccaggcagccggcgaggcctgcccactgtggccaggacaaccgatcactgcgcattggggcatcgaagacccgagccgagaagcgcgcggggacatgtggcagcgcgccgcctttcggcaggcgctggtgtacatggagaaccgcgtcaaggcgttcgtcgcacttccgatccacacgctaacccggacgagcttggccgcgcaggtgggcgaaatcgggaagttcgaggtcaccacgtcgccccgacccgacgtggcttga

SEQ ID NO: 499533 - DNA, 414 bp, Stenotrophomonas maltophilia
atgacgctgacgatctaccataaccctgcctgcggcacgtctcggaataccctggaaatgatgcgccagtcaggtgaagacccggtggtcatcgagtacctgcaggcgccgcccacgcgcgagaagctggtcgagctgctcgccgcgatgggcatctcccctcgtgagctcctgcgccagaaaggaacaccttacgcggtgctgggcttggacaatcccgcgctcaccaacgagcaactggtggacgcgatgatggcgcatccgatcctgatcaaccgtcccatcgtcgtttccggccggggcgcggccctgtgccgaccgtccgaaaaggtgctcgcgctgctggacaagccggtgtcctccttcaccaaggaagacggcgaaatcgtgaccgcagccggggcgtcgacgtga

SEQ ID NO: 499534 - DNA, 3198 bp, Stenotrophomonas maltophilia
atgctcgaacgcctcattgggctgtccatccgccatcgctggctgacgctggtgctcaccgctgcgctggttgcgttgggcgtgtggagctaccgtcacctatccatcgacgccacaccggacatcaccaacgtccaggtccagatcaacacccaggccccgggctactcgccgctggaggccgagcaacgggtcacctttgctatcgaaacggccatggccggcctgcccaagctggattacagccgctccttatcgcgctacgggctttcgcaggtcaccgtcgtcttcaaggatggcaccgacctgtactttgctcgccagcaggtcgccgaacggctgcagcagatcgcctcccagctgcccgaaggattggatccggagatgggccccatctccaccgggctgggcgagatcttcatgtacaccgtggaggccgagcccgacgctcgcaagcccgacggcacaccctacacggccacggacctgcgcaccctgcaggactgggtgatccgcccgcagctgcgcaccacgcccggcgtcaccgaggtcaacaccatcggcggcttcgagcggcagatccacatcactccagatccggcccagctggtggcgctgggcttcacgttgaacgacgtggtcgcagcggtcatgcgcaacaaccagaacattggcgccggctacatcgagcgcaatgggcagcaattcctggtgcgtgtgcccggccagctggccaatctggaggcgatcggcaacatcgtgctggaccggcgcgatggcgtgcccatccgggtccgcgatgtcgccggcgtaggcgaaggcaaggagctgcgcaccggcgcggccacccagaacggccatgaggtcgtggtcggcaccgccttcatgctgttcggcgccaacagtcgagaggtctcccaagcggctgcggccaagctggtcgccgccaacgccagcttgcccccgggcgtgcatgccaaggccgtctatgaccgcaccgcgttggtggaccgcaccatcggcacggtatccaagaacctgatcgagggcgcgctgctggtggtggtggtgctgttcctgctgctgggcaatgtgcgcgcctcgttgatcactgcggcggtgattccgctggcgatgctgttcaccatcatcggcatggtgcgtggcggcgtatcgggcaacctgatgagtctgggtgcgctggacttcggcctgatcgtggacggggcggtgatcatcatcgagaactgtctgcgccggtttggggaggcgcagcacgcgctgggccgccagctcaacgatgaagagcgctatgacctgaccgcctcggccaccgcggaggtgatccgtcccagcctgtttggcctgggcatcatcgcggcggtctacctgccgatcttcgcgctgtccggggtggaaggaaaaatgttccacccgatggcgatcacggtggtgctcgccctgaccggcgccatggtgttgtcgctgaccttcgtgccggcggcgatcgccaccttcctgcgcggccgcgtggccgagcacgacaaccgcctgatgcgctggtcacgcgctcgctacacgccgctgctggattgggcgctgcgtcggcgggtcgtggtgctgacaggcgcggccgtgctggtggtggggtgtggcgtgctggctacccgcctgggctcggagttcgtaccgagcctggatgaaggcgacatcactttgcagccaatgcgcattcccggcaccagtctggagcagtcggtggccatgcaggaaacgctggagaagcgcctggcccagttcccggaggtggccaacatcttctccaagatcggcaccgccgaggtggccaccgatcctatgccgccgtcgatggccgacaccttcctgatgctcaaaccccgcgaccagtggcccgatccgcgcaagcccaaggccgagctggtggaagagctggagacggcggctaaggaaattccgggcagcaactacgagttcacccagcccatccagatgcgcaccaacgagttgatctccggcgtccgttcggacgtggcagtcaaggtctacggcgacaacctggaccaactgacgcgcctggccagccgggtcgagcgggtcatgcgcagcgtccccggcgccgaagacgtcaaggccgagcaggtctcgggcctgccgctgttgaccatcacgccagatccggcggcattggcacggtatggcctgaacccgggcgacgtgcaggaaacggtggccaccgccattgggggcagtgtcgccggccagctgatcgagggcgacctccgcttcgacttggtcgtgcgcctgcccgaatcgcagcgccaagaccccgccgtgctggcagatctgcccattccgctgccggcaaacaccagtatcgatgagtcaagccgcctggccaccggcgccaatggtgggcctcgcacggtgccgctgcgggaagtggcgaagatccaggtggagcgcgggcccaatcagatcaatcgcgagaacggcaagcgacgcgtggtgatcaccgccaacgtgcgcgagcgcgatctgggcgggttcgtcggcgagttgcgcacgcgcatcggccaggatgtgaagctcccggagggctactggatcgactacggtggcaccttcgagcagctgatctcggccacccaacgcctcggcgtggtcgttccagtgacactggcgttgatcttcgccctgctattcatggccttcggctcggccaaggatgcggccatcgtgttcagtggcgttccgctggcgctgaccggcggtgtgctggcgctggccctacgcgggattccgctgtcgatctccgccggcgtcggcttcatcgcgctgtcgggcgtggctgtgctcaacgggctggtcatgatcgccttcatccgccgcctgcgcgaacagggcgatccgctggacgacgctgtccgggacggcgcccttggccgcctgcgcccggtgttgatgaccgccctggtggcctcgctgggcttcctgcccatggccttgaatgtcggcgccggctcggaggtgcagcgcccgctggccactgtcgtcatcggggggattgtgtcatccaccgcattgaccttgttggtgctgccggtgctctatcgttggctgcatcgcgaccgagctccccgcggcgatcgcactgccttggagtcctcgaaatcgtga

SEQ ID NO: 499535 - DNA, 951 bp, Stenotrophomonas maltophilia
atgagccgtttttcctggaccgcactgggcatggccctgttgctgaccgcctgcaatgcgtccgcccccaacgaagcatccgagggcggccccgccgctgagggcgaggagcacggcgagcacgaggaagcgccgctggaaaccaagattgccgccaaggctgcgcaggcggcaggaatccaggtcgcgccggctgggcctggtgagatcgctgacgagcatgaggtgcaaggtctgctcaccccgatcgatgggcgcatcgcacaggtcacggcacgcttccccggaccggtccgctctgtgcgagcgggcgtgggtgatcaggtgcgtgccggccaggcactggctacagtagagagcaacctgagcctgaccacctataccgtcaccgcgccgatcagtggcgtggtgatggcgcgtacggccgctgtgggcatggcggcggctgagggcgcgccactgttcgaggtcgccgacctgtccaccctgtgggtggacctgcacatctttggggccgacgtccagcacatcggtgccggcgtgccggtgacggtcacccgcttgagcgatggcgtcacggcgcagaccaccttggagcgcgtcctgcccggcaccgccaccgccagccaaagcaccattgcgcgcgccaccgtggccaacaccgatggcctgtggcgtccgggttcggcggtcaaggcgcgggtcaccgtggatcgccaatcggcggcgctggtggtgccaatcaccgcgctgcagaccgcagaagaccaggacgtggtctacgtgcagcagggagagacctaccacacccggccggtcaagctgggtcgccgcgacgctgagcgcgccgaagtgctggaagggctcaaggccggtgaacaggtggtggtggcccagagcttcctgatcaaggccgacatcgaaaaatccaccgtcgaagaagaccattga

SEQ ID NO: 499536 - DNA, 471 bp, Stenotrophomonas maltophilia
atggcacagccggtgagggtaaagtccgtagctactacggagtcaagcgtactacgaatgaaaatcagtgaggctgccgacgccagtgggtgccatttggagaccatccgctattatgagcggatcggcctgctgccgcgcccggggcgctcgggcaatggctaccgggtctatggcccggccgacatcgagcgactgcgcttcattgcgcgcggccgggacctgggcttcagcctggaggaggtccgcagcctgctgcagttggcgggcgatgaagagctttcgtgcggggacgtggatcggctggcccgcagccatctgaccgacgtgcgggcgcgcatggccgacctgcagcgcatggccagcgagctggaacgggtgattgccagttgccacggcgggcagcgggctgaatgcaccatcctgtcaacgctgcggcagccggcctcggtggaggccacgcgccagtga

SEQ ID NO: 499537 - DNA, 1272 bp, Stenotrophomonas maltophilia
gtgaccgaactggaccgctacctcgatgcggccacgcgccagaacacggtgcgcagctatgcgtcggcgctgcggcactttgaagtcgagtggcaaggccacctcccagcgacaccggacagcgtggcccggtacctggccgcgtatgcgcagaccctggccaccagcacccttcgccacaggctggccgccattgcctcctggcaccgcgaccacggctttgtcgacccgacccggtcgccgctggtgcgcaaggtactcaaaggcatcaagaccctgcacccgggccaggtcaagcaagccgcgccgctccagattcggcggctggtcgagctcgatgactggttagccgcagcgatcgcggcggcacgcgcgcggggcgacggagcggcagcgctgcgccaccaacgggaccgagcgctggtgctgctcggattctggcgtggctttcgtggcgatgaactgctgcgcctggacgtggcccatctcacgctggtgccgggacaggggatgacctgtttcttgccgcgcagcaagggcgatcgccaggccgccggcgttacctacaaggtgccggcgttgtcgcgattgtgcccggtggaggcgacccaggtgtggctgcaggcggccgacctgcaagaagggccggtatttcgggcggtcagccaatggggccaggtgagcgccgaaggcctgcatcccaacagcttggtgcgcctgctgcgcgagttgctgaccagtgccggctttgccgatgcggggctccacagcagtcattccctgcgccgcggctttgccagctgggccaacgagcagggctgggacatgaaggcgctgatggagtacgtgggctggcgcgatgtgcagtcggccatgcgctacctggacgggcatgacccgttcgcacgggaccgcattgaagcaagcctgccaagtccaaccgtgccggtaccggcgatggcgctgccggcgcccgagggcaaatctgcactgcagctgcgcctgcgcatggtactgaccccatttgcccgcgcgggtcgcggcgcggctaaggcccggggccggatcgaagagatctgcttggcctcgttccaagcggtgcggctgaacaccgccagcagcgagtaccggttgacggttcccaccgatcccgatcgggatctggatgaaatcctggccacgttgctcgatgacatgcaccgcatggccgatacgcaccagtgtttcctggaagcgtctctcaatacagacgacggccggcactgggattga

SEQ ID NO: 499538 - DNA, 2994 bp, Stenotrophomonas maltophilia
atggctacccttcacgagaccgcctacccgcgactgaagcctgatcccaccgccaaggaactggaggagatctatacccccaccgccgctgagattgcattcgccaagcagctgaccacccagccgggaccgcagctggcggtactgattcatctcaagctcttccagcgcctcggttacttcacggtgttggccgacgtacccgagcggatccggaagcacatcgccaaggccgcccgactcgggcgcgtattggacaccgaccagctcgaacgttacgacgcttccggtagccagcgccggcatatcccgcagcttcggcagttcatcggtgtacgtcccctggataaatcaggcttggcctggctggacacggtggccaccggagcagcccagaccaagcacaccatcccggacatcgtgaacgtcctgctcgaagagctggtgcaccatcgctacgaactgcccggtttccgcaccctggaactggccgccatcggcgcgcgtgagcgggtcaatctgggctactaccgtagcatcagccacgcgctgacgcctaccacgcgcacgctcattgacgacttgctgcgcgcaccggaaaactccaggttcaccggctggcaatcgctcaagcgcgagcctggtcggcccaccaacaaggaagtccggttctatctgcagcacatccgcatgctgcagcagttggctgagcagctgcccccgatcgatgtgccggtccctaagcttaagcaattccgtgcaatggcccgggcctatgacgccagcgagctggccgaattggctccggacaagcgctatgcgctggccaccatcttcattcgcgcccagcatgccaagacgctggatgacgcagccgagctattcatcaagcaggtgcgcgggcttgaaaacacggcccagcaaaaactgctggcctaccagctcgaacatgccaagcgggccgacttcctgatcggccagctcaaggaaatcctgcaggcctatcagctcgacggcagcgatagtcagcgcgtggatgccatcgacaacagtctagaagcggaagtgtcgaccttgctggccgaatgcgaagaacatatggcatacgcagggaagaactatctgcctttcatgctgcaaccctacggcacggtcaggccgctgctgttcaatgggctggagctgatgaatctgcggtcaaccagccacgatgccggcatggagccgttgatcgcagcggtgctgtcgctgcgcaaccaacgccgtgagctgatcgaggtcgcatccctcggcctggacccggaaaaggacttcgattggatgtccaagctctggcgtcagcatgtgtttggcaagcgtgccagcgctgccggcgccggctggatgcaccgtaagtacttcgagctggccgtgctggtgcaggtcaaagacgagctgaagtccggagatctcttcattcccagcagcgaacgctttgatgactaccgcgagcagctggtcgatgaagccaccttggcccaggaactggaagcctatggtcaggtgtcaggtctacccaccgacgccgcgtcgtacgtggctgggttgcgcgcacaactgaccgacttggccgacgaagttgacgagcgcttccccgagaatgtgcatgcggacatcttggaagggcgcctggtactgcggaaggggcaacgcgctgaggtctcaagtgccattgccacggtggatcgcctcatcgccgaacggctcccggagtccagcatcgtcgatgtcctgatcgacgccagccaatggctggatctgcaccgttttttccgcccgatcgccggtaccgagagccaagtcgaagatctgccccgacgtgtgatcaccacgctattttgctatggctgcaacctggggccgacgcagacggcgcggtcgatcaagggcttcagccggcgccaggttgcttggctgaacctgaaatacgtgaccgaggatgtgcttgagaaggccatcgtagaggtcatcaatacctacaataaattcgacctcccgggctattggggcagcgggaaaagcgcctcagcagatggcaccaaatggagcgtctacgaggacaacctgctgtcggagtaccacatccgctacggcggctacggcggcatcggctactaccatgtgtccgacaaatacgtggcgctgttcagccatttcattccctgtggtgtgcacgagggcatctacatcctcgacggcctgctggccaacacttccgacatccagcctgagatcgtccatggcgacacgcaggcccaaagctacccagtcttcggtttggcccacatgctgggcatccagctgatgcccaggatacgaaacatcaaggatctgacattcttccggcccgaacctggcaggacctataagaatatccaggcactgttcggagacagcatcgactggcaactgatcgcgacgcatctccacgacatgctgcgggtagtgatctcgatccgattggggaagatcaccgcgtcctcgatcctgcgccggctgggcacctacagccggaagaacaagctgtacttcgccttccgggaacttggcaaggccgtccgaacgctgttcttgctgcgctacatcgatgacaacgagattcgcaaaacgatccatgctgcgaccaacaagagcgaggaatacaacggcttcgtgaagtgggtcttctttggcagccaagggatcattgctgagaacgtccaacacgagcagcgcaagatcatcaagtacagccagctggtggccaacatgatcatcctccacaacgtggaacgcatgagccggaccttggccgtaatgcagaaggaggggattgaactgacgcccgagattctggccggcctgtcgccttaccggaccagccacatcaatcgcttcggcgactaccacttggatcttgaaagggaagtggcgccgctgagctatacagcgaaagtccttgaacaggccccatag

SEQ ID NO: 499539 - DNA, 177 bp, Stenotrophomonas maltophilia
atgagcaggcttccttcattcgccgagctggccgagttcgatatgggccttgcggggtgcgcggcgctcatcgccgtttggctgggagtggcattgctctccatcgtgatcgagcaggcgtggctggggcttcgtcgcctgtggaagctcggcaaggaccgctccaatggccggtga

SEQ ID NO: 499540 - DNA, 1107 bp, Stenotrophomonas maltophilia
atggccggtgatcgcgcggtgctggccgggtcgggactcccctcgtctaacaggggagtcagtgaattcaggaacgccgatggaaccctgacggtcggcattgactggttctccgcttccatcgacctgcgggcagcgctggacgaactcgcgttccgtgatggcgacagcttcgaagaggtccgccagtggatcgaattctcccccgagaatgcgcgcatagcggcccttcaggtgttctgctggttcttcgccgggcttggccttgaactggatgaaacagcgggcggcggtcgcttctacacgtggcgtatcaagatcatcgacgcagccaagaagttcgttgggatgatcgaactcggcggcgaagagtgccgccgcgcggatggcacgtataccgcccacatcgagctaaccggcgacggatgcaaagcgataggcgcagcgagctgcggccatgcgcagcggtggctggagcttcgagcgaagctcgaaagctgcgccggaaggatcacccgagttgacgtgtgcgccgatgacctggtgggcgaatacccattgcgtctggctcagaaatggtatgcagctggcgagttcgacaaccgtgggcagcgccccaaagcgcagctggtggacgactacgacagcggtgacggcaagacgctctacatcggcggcaagaagtccgaaaagcagctgcgcgtgtacgagaagggcagggagcagggcgacaggagttcgccgtgggtgcgctacgaggcgcagttccgcaactccaaccgcaaggaactgccgctcgacattctgcgtgaccccgcctcgtacctgctcggcgcctacccggttctgtcctttctgcgctgtgttgccacgcgtatcgaaatcacgaaagccgccgttgaagcgacgtggaagagcgttcgtcgccacatccgtcgccagtacggtgcggccctcaatttcatcgccaagaactgccctgacgatcaggcgttgcgggcggtagtcgaatcctgcacttcgccatcgctgccgaagtgggtcacaggtgacacagcagcgcactggcccgaaatcgcggccgtacagccaacctcaaaggggtaa

SEQ ID NO: 499541 - DNA, 303 bp, Stenotrophomonas maltophilia
atgagcatcaaggtcaccgtcctcaagaacgaaattgacgaacgcggcggcagcttcaagaacgacgctggcgagaacgtcgagtacaccacccgcaagcagaaggccaagcttgaaaccggtggttttgcgtatccgttcgacgtgcgcctggacaagggccagccgggctaccccgaaggcgagtacgagctcgacgttgagtccatgttgcaggtcaacaagggcgtcgcatcgctgagcaagttcaccgtactgcgcatggtgccgaagtccgcacctcgcgcggctgctcaggcctaa

SEQ ID NO: 499542 - DNA, 138 bp, Stenotrophomonas maltophilia
atgcagccccagtttaatgacgtcaatgtcgatgagtgccaggacgactggtgccccgaatgcggcggcgatgacgtgatcattctggatgacggcaatctgtggtgcacggaatgccgggtggtcatcgactactag

SEQ ID NO: 499543 - DNA, 270 bp, Stenotrophomonas maltophilia
atggacttcagtggcgtatttctcgggctttcagttgcacaagcgctggccgcgattgtgggcgccggcacgctattggcccttcctcttttcgggcgctggtgcgtcgagaagatcgcaggcttcttcgaggatcgggaagagattgacgccgacgagcatgcggacgatcaggcgggcgaggtagatgaagccgtgtgcgacgaagtgggccatgagttcgacggcggcgagtgcgtcttctgcggccaatcagaaagggaggattga

SEQ ID NO: 499544 - DNA, 1071 bp, Stenotrophomonas maltophilia
gtgatccgtgcggctcttcttctgatcgcactcgcgctgggggcacttgtcccaaatgctgcgtttgcgcagtccactgggtacggcatgtgcggaaccaatgccatatggcagacaggacaggtcccagctggttgcgatcaaggcattgccttctctgaatgcaaggccaaagaagatgaaacggctgcattacttgaacagcgatacggtatgcctggcagggcggaaaagcttggttgtcctgctgtgggtcagaacccaacgtacttccgctgctttgtcgtcatccgtggcgttgctgacactgagtgcggcaagtactacttcggttctcagtgttcggctcgcccagaggaaaccagctggaagggcggcggaaacaatgggcttgaaagcgtgtgcaataacggttgcgcatacagcggctcgctctacgcacagtcgccaacgggacgcctctttacgcccactggtgctacgtgcacggagaacgatcaccctgcgcccactacgccggatccgggtgaaggtggaggcgatggtggcggaaccgggccgggtgacggcggcggtgacggcggcggtgatgggggtggcgatggtggcgatggtggaggggacggtgggggcggtgatggcggcggtggcacaggcccgggtgatggtgacggggatggcgatggcgatggcgactgcaaagacccggacggctgtgcgggacccgggccgggaccggggccgggcgaaggcggcggcagtgacggcggggcgccgggacctacgacggggcgcctctacaagaagtccggcaagacggtccagcaggtgatagcggagttcaagacggccattgaaggggccccgatcttgtcgaaggtcaaaggcttcttcggcagctgtaccggcggtggcagttgtccgaccgcaacgtgggacggtggacagtacgcgggcaagtttgacctggcctcgctgtgctccggcccactgctacagctattccagtacgccggattcgtcttccttgcaggcatgggcatcgttgcgctgaggtgggcactgctatga

SEQ ID NO: 499545 - DNA, 399 bp, Stenotrophomonas maltophilia
atgaagcgtaatcatctgatcgtgctggctgcggcgctgcttgtgctcgtgctgtcagcctcgtgggcatatgccgatggggtagggccggtcaccgccctcaccacgtgggcaaaggaacagatcacgtcgttgtgggcggatttctccgacttcatgacggatctacagaccgacttcgtcgagctggtgttgtcgtttgtcaaggccatcgtgtacctgattccagcgcctgatttcctgacgcagatcagcttctgcgcaatgctcaacgctgcggggccatggaccgcgttcatcgttgctcagttgcgcgtcggtgaggctatcgcggtgctgacggctgcacttgtattccgccttgtgcgggtgttcctcactctcttccagtggacgtaa

SEQ ID NO: 499546 - DNA, 1293 bp, Stenotrophomonas maltophilia
atgatcttcggccatgaaggtttgccgcgcagcggcaagagctacgaggcggttctgcatcacatccttcctgcattgcgggcgaagcggcatgtctacgtgcgtctaaacggggtaggggagagcctcgataagatcgctgcccacctgggcatgcctgaagaagaggtgcgcgagctggtgcacgtgatgggcgacaaggaagtggttgattggtgcgtatgcgacaccgacaacgatggcgccatttcgttcccacacatcgagaagcacgcactgatcgtgatcgatgaggcgcacgagtactggccgaccaatcgcgccaatctgcctgagcgcgctgcaaacttcttcgccaagcacggccatatcagcttggacatggtgatcatctcgcaggactgcaaagacctgcaccgcctgatcatccgccgcatggcgaagaagaacacgtataccaagctcgacgccctggggtccgatcagcggtattcggtgcggttctatgcggccactggtaccggcaaatatgaaacggtgggcacagaggtccgcaagtacgacccggccatctgggagctctaccacggcgtgcagccgggcattgaatccaatgaggtctacaaggggaacacgcgcaccctgtggaagaccttgcgcggtccggcaatccttatggcgctcgcgctgattgtcggcgtcgtgatgctggggcggttctttatcgcagatggcaccacgggcggtacagacaagatcaaaggcgttgttgcttcgcagaaggccgcgattccggccattgcccacgcccccggctctcagcctgcaacagtggtgacaaaggtggctgagcctgcgaaggagaaggagcgccttccagcgggcgtgcagtacgtgctggacatgacggccaatgccagggcgcggcatgccggctggtatgggcaacgcgacattgtggagtttcgcgctacgggcggcggccaggtgcttgatcgattcaccactgagcagttgtgggcgctggggtggtcggttaaacgcaccgaatttggcgtgctgctgagcgctaaggggcacgagatcattgccacgacttggcccgtagacccgtttggcgagcagtccgatgctacgaccgcgcgcataaaggctgcggcggggtcgcctgtgacgagcgcgagcgagacacagccgaccaccgccgcggcgaacgggagcaccctaattgcagttgggaagcgccccttgggtacgttcccagagacgccgccttatccggcgagcttctga

SEQ ID NO: 499547 - DNA, 138 bp, Stenotrophomonas maltophilia
atgccagcctacgggagcgctgaggcaaagcagctgggcgctgcctgtatggggggcaccgctatgcgccgtctaaacaacggctgggagcagttgcgaaatgcgaagggcgaatggctgcgctgccgcgagcaatga

SEQ ID NO: 499548 - DNA, 354 bp, Stenotrophomonas maltophilia
atgattgagttcgacccgcaccaccgtatcgacctgaccggcccttgggccggtttttctttcctcggtgatcgcctgatcactcccgaaggccgcgagttgctacctgaagacctggcctggctgtcgctcaccgcctgccaagcgcaggaatggcgtcggatgatggcgcagttgcgatcggtgcccaccgagaagccttccagcacaatggattccgccgaggtgatcgacgtggccacattgatggcacggcgccaacggcggttgtccagggtgatggctggtcccgacgccgacctatcgataggtgtcccgccagcaccggggccgaggcctcgccagcgcgtgtga

SEQ ID NO: 499549 - DNA, 651 bp, Stenotrophomonas maltophilia
atgggcgccgaccacctcccgcgcatgaatggatttcctgcaccgcgtcggcttcgcctggcgctcctggacgatcacgaagtcgtccgtcgcggcaccgccctgcacctgtcaggcgatctccgcttcgacatcgtcgccagccacagttgcagcaacgaactgctctgcagcctgcaacgcacaccagtggatgtggccatcatcgatctcacgcttgcccgtgacgacctgggtagcctcgagctggttgcgctgctccgccgggaattcccgcgcacgccattgctggccttcgccacgctctgccccaccaccaacctcaacagcctgatcgatgccggactcaacggattcgtcagcaaggccgaaccgcttgctgcattgtccgacgccatcgtacgtgtttcccagggcctgacccgggttccaccggacgtcaggctggccggcgaccgcggcgagctcagccgcaacgagcgcgaagtgctgggcctgctgctggaaggcttgacggtctccgagatcgcattgcggcggcaccgcagcatcaagactgtcagcacgcagaaggttgctgtgctgcgcaagctgggattgcgcagcgacgtggaaatctacgcactgcgcgaacgactggagacaccgtga

SEQ ID NO: 499550 - DNA, 942 bp, Stenotrophomonas maltophilia
atgacgaagttgatcgaagatcaaagtgagttggtcaaatgggtgaacgatcaggacggcgacctggacctcgcagtggcattctggggccatgatgcaagcgccttcctcggcctcaaaaaagcgcgaaggcgagtgcgcattgtgctggagatcagccaaggcgccacgaacatcaaggaggtgcgtaagcttctgaagatgccgcaagttgaagtgaaatcctatgaacgactgcatgccaaggcctacattagcgccagcgaggtgatcgttggcagcgccaatgcatcagccggtggattgggaattgtcggcttcgagaacaagcactggaaggagctagggatccagacacgatcaacggaggtgatccagcgagcgaagagctggtttgaggatctgtggcttagcgccgagcaaatcaactcctccgagttagatcgagtagagcgaattcagaaggctcgtgcgaagctcacccttccgatggatggtaaggccaaggacatcttcgactctttcaagcatcatccggaagagtggaaagaccacaatatctggatcaccgtggtcacctccgggctttctgaagagcaaaaagcattgctaaaagagcggcagaacgagcaatccgaaggtgcggtctatgcatacgcagaatggccagctatcccgaaagacgcaacgatcattagcttcacttggtataccggtgaaggcttcgaggcagatgctccgctgatctatcgaacgccaagcgtcgcccaaaaggggatgatgcaatacgtctttcccactgagcttccgggctatggaattggagggctttccaagtgggaagccgctacccagaaggcccgagatgcgaacccgtctaggtggaagaaacagcatggactaaggatgccgctacgagagttcattgagaaacactcctag

SEQ ID NO: 499551 - DNA, 1398 bp, Stenotrophomonas maltophilia
gtgccaaaaacagtaaagaatttccttaaagacttcccgttcaatccagacgccgatgacacgctccaccttaagggcatcaagattggacggttccggattgatgagctggtcatcaccggacgcgaagcggccatccacgcgcaagagatcctcaacgctgcgatggagcgctctcgacgctctcgcatcaatgccgcaggcacgcgctaccttgagccactctctgcaggtcaccctgcccgccttctgtccgtagagatcaaggactacttgggggaccgggaacgccgctgcctcgcacaagagaccatcgactcgacagcacgcacgctgcggcttctccagatgacctgcggcgacatccccgtctcgcgcattgaccacccgcacatctaccgactctgggacctcatgcgctggtcaccaccaggactcttctctgaccctgcctatcgagggatcagctatgacgaagccattgcctgcggcaaggagctagatgttcctcagcttgcccctgccactctcgaacgtcatcgacgcttcttggtctccttcttcaatcagctggtcaagacgaaagccattgatgcgtcccccatggctgcgtttgccgagatcaagaaggacctggtcaccgatcccaacaagcctgagcgcctctttgatgaggaagacctaaggcgcatcttcgacccaaagactttcattccctgggcgagcaagtatccgcatcgctggtggcttcccatgatcggcctgtatacgggcgcccgcatcaacgaggtcgctcagctgaagttggccgacatcgtccaggagggcgatgtctggtgtatccgcatccagaaaactgtggatcctgacctagcgcaccggaaccggctacggagtcgacaaagcctaaaaggcaaggcatctatccgcaccatccctatcccgaagccgctactagatgcaggcttcttggacttcatggatgacatcagggactgtggtcaccctcgcctgttcccacacctatccgctggtgtgaaccgtaagacgggtgagacgaatgctcgctatagcctggcagcgcttagccagttcagccgctacatgaaggaccttggcttcccgagaggtgttggtttccatgccttccgccacaccatcgccacagagctccaccaccagaacgtggcggacgaagacattgctctgatcacgggccactctgtcagcaagcgcgtgccggtgcttcacgaggcctacttccacaagaagcctgccgtgatgcgcaggaagcagatagataccttgaagaaatacagacctgcggtagtgcttccggtctatgccaaggggcagttcaagcgctgcttgaaggacaagaggaggttctatccatag

SEQ ID NO: 499552 - DNA, 1041 bp, Stenotrophomonas maltophilia
atgaaaacattgaacgagctaagcacagcggtacaaacaggcgacatctcactggtgctttcactaattgagatgtccaacatgccatcagagttcgcctgggaagcagtttcctatgccatctcatcggaacgcgaacacattatagactcgctccttcccaagctagttcccaggaagacaccctaccctttggctttcgctgccaagagaggcatggcttcggtcgtgcaaaagctgatacccctatccgatcccgctcccgcaggcgagcaatctctagtgctggccaatgccgcgagaggtggcagcgttgaaactgtgttagctctgttaccggtgaccgatccactggccgacgactcaaaggcgctaggggaggcagcaaaggcagggcatgctgaggttgtccgccttcttattcctgtcagcgatcctaaggcacgcgaaagcagcgcactgagcgcagcagcgcggggcggccatgcgcgcatagtcaagctgctactaccggcatcctcatccatcatctgtgcaactcaagtcttcccggccgtggcggcacttgggcatatacccgttctaaaggtcctcctaaaagcgaggctgccagatgcaggcgacacctacacccttggcttggatctggccgccaggaacgggcatgcatcagtagttgacctgcttatcccagcaatcgaacgcgcgggacggcccaggggatgtggttcgaacgcgatatgtgaagcagccaaagcgggacaccctgacgtggtcaagcggctgatctcgttcgtctcgcgggctgattgcgctgctgcaatggcggtcgcattcaccgaaggaaaggacgccgttgttgtcgcgcttcttccacatgctgacgcaatggaggcggagtcccacatctacggcatggaaagcaaagcagcctttaggcgagagctagatcggatagcagctgaagcgcagtgcagtgcgcttgatatgaccacccccagggcaatcagtaaagaaattaaaagaagccagagactctga

SEQ ID NO: 499553 - DNA, 210 bp, Stenotrophomonas maltophilia
atgaccaagaagccttccaactgcggtcagccctggacccctacgcaggtcaagcaactcaaagagcttgcgtcagggaacactcccacccgggtcattggcctgaaaatgggacgctcccctgaagcgatctacggtcaggcgagcaaggcgggtatctcgctgaagcccaccaaccaagctccctacggcaccaagaagccaacgtaa

SEQ ID NO: 499554 - DNA, 861 bp, Stenotrophomonas maltophilia
atgcaagaagctctggatcgaagaaccaatcacgaatacaccgccttagagatttcattgctcacggacgcccagcgtgagcccttgaagggccacttaaagtgtttgggctgtgaatctaccgcgcactttcgccgaaagactgatccaagtcctggaagaaggggaagaattgcgcacttctattgtctaccgcacgcagccaactgcagtctcatccaacgcaatgcagacccatgggagacaaatgagagtgatgcgaccgtcgcaaaatgggtggaacgcaatcagacactgattgttaggattcagacgccagtcgaatcctcggaggttaattctgaagaagacgaagacgttgacgaaggcagcagagctggtggaggctcggcctcccggacacgccggtcgacgactatatctcgcgggccgcagcgattgcttgaacaattggtccactggccgagcttcaagacgagtccagttcgcatacggcttccagatccagcccagacggaggttccagtccacgacgcctttgtacggttcgaggacgcccgagttgagctacataccgagcgctggcttggattctgggggatagtgcgcccctttagcttctgggcacaaggtggaagttactactccaatttcggcactgaaaatagcagcttccgaatctcaatccatcgaacccacgccgacgccatcgtgcaaaggtatcggctaggaagcattcacgacttggttggccactacctcttgctcttcgaccgtgctcgcgaatctgcctcggggcgcttcaccgcagatgtgaactcggttcatcatgttggatttctccgcaatacagaccaataa

SEQ ID NO: 499555 - DNA, 234 bp, Stenotrophomonas maltophilia
atgggcgtggatgactcaaatacgacggcccctcggatcagccgatatgaacgcgggatgcacaagccggacttggagaccatcgagaagctcgcagagcttctagaccttcctgcggcctacttcgtggcgacatcggatgttgtggctgaggccatcctggtgctatcgcagcttgatgctaggaagcagaaggaggcactggcactgctaaaggagcttgctggaccttag

SEQ ID NO: 499556 - DNA, 1797 bp, Stenotrophomonas maltophilia
gtgtctagcccgttccaagatgtcgcaccccgcattactggaaatccgaaggtcagagaaccgcaacaaggagcctatgaggcgctagcacagcatgtagctgacggcgtggacataagagaagttagcgtagtacttccagtgggttgcggaaagtcaggaactataacgctgactccatttgcgtataaatcaaaacgagcattgatcatcgctcccggcgttgcgattgcaacgcagctggcagctgatttcgactttagtagcgagaagctattctatgcacgctgcgatgtgatggatggccctaattatcccgagccggtggaaataagaggcaccgatgcaaatcgaagtgaccttgacgccgcacacgttgctattacaaacatccagcagatttccggcgatggcaacaagtggttgcgaacgcttcccgccgacttctttgacctgatcattttcgacgagggccatcatagcgttgcagcaacctatgaggccctgaaagcaaaattccctgcagcctcggtcgtgaacttcagcgccacgcctcttagagcggatggccagatgatgagtggtcccgtcgtttactcatacccaatcttcaaggcgatcagagcgggctatgttaaacagcttaaagcaatccaactcaatccgaagaccttgcgctatgtcaggcgaccaggcgattcggaggtagaagtctccctagatgaggtccgtcgcctaggtgaggaggacgcggatttccgcagaagcatcgtaacgtccgaagaaacactgaataccattgttgatgcgtctctccgggagctcgaccggctccgcaacttgacaggggagccacgtctaaaggtaatcgcctcggcattgaattatgagcattgcattcagattgtggagggttatcgcgcacggggaaggaaggccgactttgtgcattcccgtgagagtaaaaagaatgaccaagtcatgcaaaggctggcgaatcatcaactggacgtgatcgtacaggtcagaaaacttggcgaaggttttgaccatccgttcctgtcggtagcggcggtccttagcgtgttctccaacctgtctccattcgtccaattcgttgggcgaatcatgcgcgtaatcaagcaagatgcgccgggggatgttgtaaaccagggcagtgtgatctttcatgcgggcggcaacattgccgccaggtggggagacttccagcagttcagcgaagatgaccaatccttctttgaccagcttcttcctcttgaaggcttggatccagcagatcccacggagttccgtgagtatgcacctcgcgacactaccaatgggaagcccgaggtcaaagagcaatccgaggtggaactgcaggaaattcacctcctaaagcaggaagaggaagacgccattcgcctgttgaagcagagcggaattatccctgcagactttgatcctaccacccaagccctcaagcccatcgctgtccctaaggcagcaaaacgacaggccgccagagacgctcttaacgagcttattcaactccacgcaggacgaattctcaatgagcgcggaattaagcatggcgggcgagagttggatcacagacggcttggtcgcgacaactacgtagtggtagtcacttctctcaacgaggcggcgaataccttggtcggccggaagccaagggaaagaagtgagatgtcacaggtggaactggacaccattcgggggcagtttgatgcccttacagcaagcgtttgcaggaagctgttcgatggcgactaa

SEQ ID NO: 499557 - DNA, 1566 bp, Stenotrophomonas maltophilia
atggccatttatcacaccagagtaaagactttcagccgtgcccaggggcacgcatctaccgccgccgccgcttacagggcggggctgctcatcatcgatgaccgcaccggtctacggcacgactaccgaaggcgagggggcgttgtcgaaacccgatgcctggcgccggatgaggcgcctgactgggctttcgatcctcggcagctctggcctgccgccgaggcttcggagcgccgaaaagacgctaccgttgcccgcgagttcgaggtcgcgctgccacacgaactgagcaacgagcagcgttcagatctggcggctgagatttcgcgctgtctggttcagcgctaccgattcgctgtccaatccagcatccatgagccgcagaccgctgacgggctcaactaccacgtccacatcttggctacgaccaggcgggtggacgcagaggggctgaaggacaagaccagagaattagacggcggcccttcgggtcgaggcgaagtggagtggattcgccagatggtaggtgaagccatcaatgctcacctggccgcagccggtgtctcggcccgtgtcgatcaccgtagccttaaggaccaagcggctgaggccgcagagcagggagatgagctgacagcggcggagctttcccgtgctccaggccttcatttgggcaaagatgcgacagcgctgcatcgccgaggcgccgatacagtccttaagcagggcaatgaccggattgaacaggctaacaatgctgcttgggatcgcgccatcgcccagatcgcaggagagggcaggttgatggaccccgcatccgatcagattgggccggtcgcgccgcgcgtagttgaacctactcccgtcatccagaccccgacgcattttcatgtggttggccctctgggtgtggcgatgggcgaagactcgccgcgtgggatcacggtcgacaatcggatgcggcagagggctacggcgtcccagcctgccttgaaagcagtcttggaaatctgggccgaagcgtggattgaggcgcttcgagataggctcaaattcacgcgcaggttgctgcgcaacagtgccgctttgatatccgctcatgtgtcggcgcccaagctccgtggcgacttggaagaactgctcgtgcgactgaagaagttgaagcgggacgctctacgcttcaagcgtaggctgaaagctgaagaccgtgcccagcacgtattggcccaggcagaatttgccttggagaacttcgaaagccaaaacccaaggccgggcctcttgaatcgctcagactggtcacggcgtcgggcgcgccgggttcgggctttcgaacttgggcgcctggagtaccaacgcgctcacgaagccaccggacctaaggcccaggaagactacaaccgtcgaacaggcgagtcgttgtcgcagctggagaattggagtgaagtgctgctgcgtagatatccggtggaggatgcgcccattgacactcctgaagcccctattccagcggaccccttgctcctaatcaatcctgtcagagagcctggagcccggttgcactga

SEQ ID NO: 499558 - DNA, 2073 bp, Stenotrophomonas maltophilia
atgaccgctgatccaagccgtggctacgtgccgcacattgacggcctgcgcgcgatcgccgtgctggccgtcatcgtgttccacctggacccggcctggttgccaggcgggttcaccggcgtggatgtgttcttcgtcatctccggtttcgtggtcagcgcgtcggtacaccggctgccgccgctgtcgctggggcagtcgatgctgcgcttctatgcgcgccgcatccgtcgcatcgcgccggcgctgttggcttgcctgttgctgactgccgtggcaagcgtgctgttcattcccgagtcctggctcagcgaagccagtgacaggaccggactgatggcgttcttcggcttcagcaactgggtgctggcagcgatcggcaacgactatttcgcgcccagggccgaattcaatccctacacccatacctggtcgctgggcgtggaagagcagttctacctgctgttcccgctgctgttcctggcttgggcgcgcggtgcacgcgggcgctggatcagcctgggcctgttcggcctggtcagcatggcgtcgctgctgcatgcggcggtgctgggtctgcgcgaggcgccgccatcgtgggcgttctatgccaccagcacccgcctctggcaactgggggtgggcgtgctgctgttccagctgctgcatgtgcgcgaatcgctggacccggcaaccggccaggcactgaagcgcgccgcgccggtgttctccctgctggccatggtggcgctgggcctgctggggtgggcgttgtggtccgcgcgtgccgggcggtcaccgtggcctgacggcgtgctgccggccttcgccaccgcgggcctgctgtgggcgctgcatcatcatccgcaggcatgggtggcgcgcctgttggccagcgccccgatgcgccgtatcggccagctgtcgtactcgctgtacctgtggcactggccggtgttcgtgctgatgcgctggaccgtgggcttgcagacacccttgcagatgaccgccgcgatggcgttggtgctgctgctgtcatggctgtcgtggcgctgggtggaacagccgttccgcggcacgttggcgcagcgcctgcgtcccgggcgttgggtgctggccggcgcggtcgtactgctgtgcgccgccggcatccagacagtgctctacctgcaggcgccgcggctgtcgttgagtacggtcagccggcatccggccgattggtaccccaatggcaagagcgtggccggtgactatcccgagtgcgcactggtggtcgccaagcatcgtttcgaaggcggtagtgcgcgcacctttgcgcgtggagactgcgaccgcccgctaccgattggcgcgccgaagcgggtgttcgttgctggtgattcgcatgcgatggcctacatcgaactgctgcagcgactggccctggaaaccggctcggcggtctccctctatggccgcggcggatgcccgcaggtgagcctgcagaagtggcgcggtgccggtgccggttgcgctgatttcgacgccgcggtgttcgccgatatcgcgcggcgtgcgcagccgggggatgccgtggtgctggtgtcgttgcgcgtgccacgcctttccgatcagttcgtgctgttcgatgcgcaggcgcagctggcgggcgaactgacggcagaggccgcggcaggacgcgacgccgaagtggccgaggcggtcgcgcagtggagacccctggccgagcgtggcgtgcgcatcgtgctggaggcgcccaagccagtgctgccagcgcctccttatcgctgctcggaccgcttcaatgcccgcaacgaggtctgccgcaacggcctggacagcacgcgcatcgcgatggaaacgttgcgggcacccatgctgggcagcctgcagcaggtggtcgatggactgccaggtggcgtgctgtgggacccgatgccggtgctgtgcgacgacgcgttatgtccagcccagcgcgatgggcggccgctgttcttcgatggcgatcatctcagtgcgcatggcaaccgggtgctgctgccctcgctgcaacaggtgctgttgcagcgctga

SEQ ID NO: 499559 - DNA, 186 bp, Stenotrophomonas maltophilia
atgcaggccgtttccatacggtctgcacagatgatctatcgtggttggggaatcctgacactgatcacgccgatcgcaccccggcagaagggcgaagtggcgccccatcatttcttcttcgtgccgatgcagtgggctgcactggtaatcgtggcagtgtgcgtggtggtcgcgctgttgcgctga

SEQ ID NO: 499560 - DNA, 687 bp, Stenotrophomonas maltophilia
atgccagggaccctgccgcagcacctcagccgtgacgatgaacgcctcgatgcgatgccaatcgccccgctcatgcggcagcgattccacgcccatgccgatctggtacctcaccgcatccgggccgtcgcgccagtagtacggcgcgccattgctccagccgcaacaggcgtagcgcaatgcaggcatggcaaaggtctcgcgcagataggcttccaccttcactgcctgggtacctggaacgcggtagtgggcctgcatgggtttgatgcaggacgcgtcgtcctggctgcagccgctgtatgccaggcccgcaggcttccggcccatcgcctgcaggaaatcctggcattcgatatccggtcgcgccaggccatccgcacgcccctgcgcttcccacgcggccagcgcctgcgcagtcgtctgctgcgcaatcacgttggcggcgaacagcaatgccgccagccccagcagcaagcgcgcgctacgcagcggcaaccggccaatcgtctcagggcgatccttcgcaggcagtcacaggaatgccaaccgatgccgtgctatcgccgtgccatcgtctgctcgctgaagcgtgccacgcagaagtccaggaaactgcgcagcttgggcgtcagctggcggtcgcgcgggtacaccaggttgatccacgtcgacaccggcacgtag

SEQ ID NO: 499561 - DNA, 1503 bp, Stenotrophomonas maltophilia
atgcgcatcccccatcatttgagccggtcttccaccggccgctggtcgttcgtccagcgtgtccctgtcgatcttcaagccgtgctcgattgccggctcatcaagcggactcttaagaccaaagacctcgcccaggcacacgtgggtgcagtcgtgcttggggcgggctatgctcggctcttcgcacagttgaaggatcaacgcgtggccaagctcagcaaatcggacgctgacctgcttattgctcgactgacgagcgccgagaaccttcaggaactgacgctcaaccgaacccgccaaccggatgggacggtgaccgaacagtggcagatcgacagcccgaaggacctgaagctctatcggcagctgatggagctggaagcaaggggtggggcaaccgcccagccgcgtctcccagtggccgccttcaactcattcggagcatcgcaccaggccagccctgtgcggcaagcctcagtgcctgcacttgaaacgatgacgttgggcagggcccgggacgcgttcctggcgaccctcaagggctcaacgctgcccaagacctacaccatcaagaagaccgcgatcgaggcgctggtggcattcctgggtccaaaggccaaggtccatgccatcacccggtccgatctcgctcgctggtatcaggacatgcgcgagaagggcgcttccacgccaacgctcacgaacaagcagagctatatcggtggcaaaggtggctttttcgaatgggccatggcctcggggcactatccccgtggtgacaacccggccagcggccatgtcagctactcccaacgtgagaagcgtgcccgaaagaaactgggcttcaaggcctacgatagggcgcagatccatgccctgttcgcgccagaagccttggccaagctgtcagagtcggcccgctgggcctcgctccttggtctttacacaggtgccagggcctcggaagttggccagcttctgatcaaagacgtgttcgaagaggacggcatcccgtgcctccgcgtatcggacgaaggcgagcatcagaaagttaaaacggaagtgagccttcggacggtgcccctccatcctgagctgctcaagatgggcttcctgaaatgggtggacgataagcggaaggctggtgaaagcaggctcttcccagccgcgaaggccaccgccgtgaacgggcagggcaactggatcaccaaggccttcagtcggcatctggccgaggtggggaaaggttgggagccagcaaagcgcgggtttcactcgctcaggaagacgtttatccaggagctgcagggagctggtgtagtttctgagctgagggcgcaaatcgtagggcatgagctcgatgacgagcaccactcaacttacagtcgagagtttacggcaaaggagaagctcaggggtatggggcccggttcccgcggtttggacacagttgggtatgggctttttcaccaatccggatccacaagtggccgctcgtcatag

SEQ ID NO: 499562 - DNA, 339 bp, Stenotrophomonas maltophilia
atgagcgcaccgcctcctctgcttgaccagccggtgcccgctcgccgcaagttgatgacccccagggacaggttcttctggtggtattcgggagccctgcttctcactggacctttcgggttcgtcgtcgggccgcttatggcccggcgaggaacacgtaaggtagggcgcctctacccggccgaggcccgcgtggcccaggcgcgggacaagggctttgcgtggtggcagtggtgggtcatgaccgtcctgaccctgatgggcgctgctggagccttcgctgtcctaagcgggctgccgatgttccttttcgtgctttacgcacaactgattcagtag

SEQ ID NO: 499563 - DNA, 312 bp, Stenotrophomonas maltophilia
atgaacgcaaggtctcccctggccggcttggccgttgcactgaccctctcggcctgcggcggaccgccctccaataatgatgcagagcgggcctttgccactctgttggaggaaagcggggccggacgggttggcgacatccgcgacttcgaactgaccggatgcgtcgaggcccaagacatggagggctaccgctgcgacaccaaggggagagtttccatcgatatcggtggccgccaggtgcccattccggtcagcaagaaccttaggtatgcgaaggagtcagggagctggaaggcctacgccaaatga

SEQ ID NO: 499564 - DNA, 777 bp, Stenotrophomonas maltophilia
atgaagaagaatcggacgtgggctgccgctggactggccaccgcgctcttgctgacggcatacggagttggtgcgcagacccatacggagcatgaagaagcacccaacaggccgggcttcttccggcaactggggaagagcctgaaagatgctggcggccagatgattggggtgaagcccactggggccagcggagctcagtctgccagctccggtgccatctacaccccggtcagcggggccggaaagattcaagggctcttcatgggtgacaaccaccagttggcccagcagggacggctcgactggccccgggtgtcgctgacgttccaggaatggggggcttctctgccctgctggacgattgaagcgcgtgtgtggaccagcccctccgcgtcgaccacggaagtgttccgcacctgcgccaacgcggcattgaccgaggtcgacgacttgggcgacatggccgagctcaacaccgccgccctgtggaaaggcagggataccttgactggcgttcgggtgccctccaacaaggccaatactggggccagtcggtctaccggccccaacccgcccagccagccgttcgtcctcaacgtgagccgaccaggtgtgtctgacaaggccgtcgacgtggcgcttcgcgtggcctgggtctctgggttcattcggaccgccgacctgcaccctggggcttccgggatcctgacgcccttcaaagattcgaggatgtggctcgctggcttcaagccggaaggcaaccgagaccgctaa

SEQ ID NO: 499565 - DNA, 294 bp, Stenotrophomonas maltophilia
ttgagaaagggtctcacgcaggccgcgctgggagcggtgttgggcctggaggaggagaacactgccgctcctaggatttcgcgatacgagcgaggggaccggatgccagacaacgagagcatggcaaagctagcagaggcgttggagctgcctgtggcttacttccacgcggtgagtgagccgatggctgaggccatcttgttgatgtcacagttgccggaaggggcgcaggaggagctgctgcggcagatgcgcgacttcgcccgaaacagcttgcgggggcgtgaggggtag

SEQ ID NO: 499566 - DNA, 1341 bp, Stenotrophomonas maltophilia
atgagccgcctacaggtgacgctggacgctatccagcacgtcgctcatcttcacttagacgtggatctttccacgagcggactgatgtgcctggtcggccgaaacggggcaggaaagacgaccttggttagggcgcttcggaacctctcgaactcagacacgttcgtgagaacagcaacgccttacgcgttctcgaaggggagccgcattgtctatgatttggacggcgaacaggtaacttttgcctacaacgacgttgttcgctctctcgactgtcgtgagaagatccccaaggagctacgcgagctaattgctgccgaacttccgatgccatacggggctcggttcaactacttcagaagcgccagcgaggcagaccaagacattcggaccgctattgcgcttggaacttatgacctcccagatgagcttatctcgtttttgaacgccgtctacgagactcagcgttactcagcaatggtcgaggttcgactcagggggaaaagctactacgctctcgtcagggaagacggcacatatgtccgagaggattatctaagctctggggagcacttcctaatcaatctcttccggacgatcaagggtccctcaaagctgctggtgattgacgagattgacctttcgctagacgcagcagcccaagcgaatcttccaggctggctacgcgggttctgcgaaaaatacgaccgcaagataatctttacaactcactcccttgcgcttatgcagcagctagagattgaagagctattttatatggaggagcaaaatggtggcgtctcgatcacgcccacctctttcagccaagcgatgctgaagctgttcggctttattggatatgaccgatatatcgcaacggaagacaagaagctcatagccctgatccaccatctagtcaagaagtattgcccaaccaccctactcagctacaaggtaatatacatcggaggagcatctcaggtcgcaggcttcatcgagagcaacgatacagatcgtttcttagctgcgccggaaagggtaatcgcgatcctcgacggcgatcaatgcaaagagaaatacgctcagaacgaccgtatccatatgatccccctgaagagcgtcgagaaagcactctgggcagctaggcaagaagatgcagcgtttcccttcgtcaccgagcgagataactttacaggtgacaaagattttgagaactatttgaaagacaagaagattgccacacaagagcagattttcgattacctaatcgcaagacaagaggcagattttcaatctattgctcgagtcttgactgacctgctgccaccgccgcatgtctga

SEQ ID NO: 499567 - DNA, 957 bp, Stenotrophomonas maltophilia
gtgatcccgcagccgctatctaagctgttcgacgccatgtttcacggcaaatatcggtttgaagagtttttgacccttcatccccaagacaactacactccagttccttggaagcaccgcacaatctacaagccttccagcacgctcaaggacttccatgtctttctgagtcgggtcgtcctggagcacctaccactcgatacgtcggtttcttttgcttaccgcagaggcgcgaccatcatccaagcggtcgaaccgcacgcgaagagccgggcatttttccaaacagatctggaacgctttttcgacagcatcaccaccgcgctgattcgcaaggtgttggcggaaaaccagactccagtgactgatttacaggatcacctggagcacatcctcaatctcttaactgtcgaagggaagctgcccattggcttctccacctcccccattctaagcaacgcctgcctcctgtctttcgaccagagcttggcacagatcagcaagacgcggggatggatttacacccgctatgcagacgacatcatgctgtcggcagacgatcgagccaagctctcaaacgctgacactgtcatagaggactgcctttctgctgagatcggcgacgatttccgcctcaatcccgccaagagcaagctgacaactgtcggccggaaggtcaagcacttagggctggtcattcttccgagtggagatgtgtctgtcgatcgtgaagttaggaatcgaatagagtcttggattcacttctacctgcgagacagggctaagttgctcaagatatttgaagagacccccaatcaagggatggaggaggggttggagcgccttagcggcctcgtcagctacgctcattctgcggacccggcttatctcgaaaagctgagaagcaagttcggcaccaccgtcattgacagccttctgcacaggtctgcgcaatga

SEQ ID NO: 499568 - DNA, 654 bp, Stenotrophomonas maltophilia
atgtcgaggacgttgagagcttttgtcgcgatgattgcagttaggtctatggctagatcaatcctgaagcttcccatccttcaatcggacgacagggagagtagagaaaaaaagcttctacagattagaatggacgcgctgactgcagcgtttatctactcaagaaacctctactggattgctatatcctcgagctcgctcgtgctggggtcgatcctgaccccgatattcatacttcttgcgctgagtattccggcggggcaggcgcacagagagttttttgaggtcgcttctcagctatcctccgctatacttttgttgtggtcggttgccgctttaatactgaaggtcgaagttaaaaaggaagctttcattgctggaagagctgccaataactttattgctagtgaggtgcttaagctcttggctgatccgcagcaagatctgggttggttcattacctatgtttcgcgtcaggatactgttgatcaagacaatcttggcggtctcagtgaacggttgcgaaagaaggcttacaggcagagcttaaagcaactatttccgggtgacgcgtcagttgtgtgtggtgtgtgcgggctatccccatataagttcaagaggggcgattgccagctttgcggaaataaaacttag

SEQ ID NO: 499569 - DNA, 1401 bp, Stenotrophomonas maltophilia
gtgaccaccctaccctccgcatcactcactgattacatcgcctcgccatttggcactctgcatctggaaggcatccacatcggccgctttcgtatcgaccgggctgtcatccacggccgcgaggcggccatcaatctccaggaatgcatcttggcggccttggatgagaccggccggaaccaagccatgaggcgcggcactcggtatcccgagccgttgcctatgggaaccccggctcgccccctagccaaggagatcgaggaccatttggaggacatgcgccgccgggaactggatcccaaaaccgtgctcgccaccgagcgcacgctcaagctattgcttcgcacctgcggcaacatttcagcagctcgagtggactatcaccacatccaagatctctggaagctgctgcgctgggctccgaggaacttggtgtcagacccactgctgaaggaccttaccttcgaagaagccatcgccctgggcaaagagcaagacgtgccgccgctggccgccgccaccaaagagcgtcacaggcgtttcctggtcgccttcttcaatcacctggtgaacggacaagccattgtctcttcgcccatgaaggccttccgcaagcccaagcaggatcacaccattgatcccgaaaaggccattcgtttgttcgaggacgcagacctgcaggccatcttcgaccccgcaaccttcatcccttgggcgaaaaagccgcagcactggtgggcaccgatgctcggcttgtataccggtgccagggtcaatgaagtctgtcagctgaagctgaccgacatcatcgaggagcgcggcgtttggtgtatcgccttccaaaagacactcgacccagacctggccgcagatccaaagcggcagcggcgaagccgacagagcatgaagggtgcaggctgcatgcgcgtcattcccatcgccaagcctctattggaggcaggctttttggagttcgtggaggacatgaaagtgaccgggcacccccgcttgttccctctgctctctgctggcgtgaaccgcgccacgggggagacaaatgcccgttacagccaacagttcgtcgtggacttcggccgctatctgaagagcctaggctttccaagaggggtcggattccatgccttccgccacacgctggcaaccgaactcgatgtccaggacgtgccggagcgagagattgccttggtcacgggccacgcgactgacaagcgggaccgggtccaggttctccgcacccactaccttcacaagaagccgcaggtgacccgaggcaagcaaatcagcgccttgcagttgtatcagcccaaagtagagctgccccgttaccagcgcgggcaatttgccaagtgcctcgcaaatcggaaaacgttctatccttga

SEQ ID NO: 499570 - DNA, 2286 bp, Stenotrophomonas maltophilia
gtgctggacaacggtcatactctccgcaacagcttcggggggagtgtaatgattagcgagatatcgattcttaaccacaagagctttcacccaactcagtcgacacgcatctttttagagactgagaaccgaaagccagtgttcttctatggccagaacggggccggaaagactgcaatcggtgaggtcatacgcggacttgctgtcggtgacccgaagttcaccggctgtaaagtcacaacggtgggggaggggcggttcagatttcatgtctacaaccacgagtttgtccagtccgtgattggcgaagcggatggcatgccagggatttttaccattggcgagacggatgtagcaacccaaaaggaaatagagcggcaggagcagataagcagggatgcagacgaagcgactgaagcagcgcgcgtcgccatcgaggcgattgatggccgccttgacaaggcgctgattgctgcccaggaagaggtatggaaggcctttaaggcctacgacaccggcgagtttgcgggctacctgaaaggctatgggcgcggaaaacccaagttcttcgaggatctgcggaagctggaggtttcgcccgacgaggatctggatgacataggtgagctgatcaggcggctggctgatgtttccggtgacgagcaacctaaggcgaagcactcactctctacaggtagtttctcattgatagaggcccgtgagctttggcaggaagtagtggaggtctccagtgacagcagcctgtcagcactaattgaagcgctcaaaaacgcagactgggtggataaagggcggtcctttgtccaggacgatcaatgtccgttctgccaacaaggcctgcctcatgggttcatggatgagcttctaagtctgtttgaagggaccagacaggaaaagattgaatccattgcctcctacgtgaccagctacgccactgacatatctaatctagagagccaaatcgcgtccgctttggccgagcccttggctaaagagaccgatctgaaggttgcgtccgaagctgtgattgccaagctcaaggcgaatctggcaacaatgcgattgaagcaagagcgtcctggagaatccttcgaggttgtcagcgttgacatgggtttgatgacagcagcgctggatgccctcaacacgcgcataggtgacttcaatcgacggatcgcgaacaaggaggaggagcgcaaagcagtcggggaggttttctggaaaatcctgtatcgcgatcgagcaaatgcatacacctcttacgatgcagcggtggcaccgctcaatgagcaaaggggcgagtgggtcatcaagcagaaggccgcctccagctccaaaggcgatgccgctgccgctttggtggggctaaagaagaaccaagagggagtagacgcgtccgttgccgctatcaacacacggctcaaagggctcggtattgataccttcaccattgaccggaaggcaggagagggcagcctctactgtttgaagcgtcccggtcttggtgaaagcacgactcagtctctcagcgagggtgagaagacgctcatttccttcttctattttatggagcttttgaagggggcggccgagcaggggcagtccattgacttggcgcggaccattgtggtcatcgatgaccccatatcgagcctttcgcacaactacgtctacgacatcgcgtcagtcatcgtgcaggaattgatcaagccgcccggtgggcagaaggttcgtcaagttcttgctttaactcacaacctcttcttcctgcacgagctcgttctacagctaggctatcgtgagtgggccactgtgccaaagaagtgtcaattgctgcgagtcgtaaagaatgattgcagccaagtcatgccgatgagcggtcaagagttcgccaatgactacgacgcactttggcaaacaattcgcgatgtgcgagacggccgagtccctgtgcaagtcatgccgaacaccatgcgctgcgttgtggagacattcttcgcattcaccggccgtaggaaagaaatgagcgcagtgctgggcgaaatgtcgaaggcggatgcgacattcaagcccttggagcgatatttacatcgaggtagccaccgagatgacgtcaatatcgctcatgtggactggggccagttcgatctaaactactatttcacgaagttggagatgctatttgacagagccgggcaccaagaccattacaaaatgaagatgggcttgttagagaatgaagcgcttggagttgacggagattga

SEQ ID NO: 499571 - DNA, 1170 bp, Stenotrophomonas maltophilia
gtgggaaaaagtcctgtcaggcctgacgctaaactagagaagctggtggctcaggttaaggcgatcaccgaagcgtggggcaacaagcatgacttgcttcacgactcgggtcacaaggatccgctgaagcactacgactccgaaccaggtgacggtgagccattgttgaccttttggtcagagggagaggcccgccgagtcctttacgaagggatggcagaagccgacgagctttcggatgagcttgagaaggtcggcgtatacatggagtttgatgactcggtaactgccaactactacctgattgaccaggagtcagaacttcagcgtcagtttgatgcgtgggctcaatggaggtggacatgtcgactgattgaggccgacgtggcggacgtgtcaggcgacgtctactcctactttgctcagaggccggaagacttttaccgcctacctcaccgaaagtttgaggaactcatcagcagcatttttgctgcgcgtggctggaagacgaaggtggggccgggtagcggcgacggaggcgtagacgttcgtgtatggcaagagtctcccttgggggatagccttaccctgatccaagccaagcgctatggtgcgcataagccgatcggacttgaagccgtcgcagcgcttgaagcgcactcgaagcgggagggggccaatggtctgttcgtcacgacatcccgttacctgcctggcactcgcgactgggcaggccgagagggcttcctccagctggcggatacgacggatctacaggaatggtgtcaggaggcgacacatctggcagtgaagcaacgcgcccacgccatggcaatggaatctttccttccactgctgaagcgaatcagggatggagcggaactcaatcgggtcgtatgttgcagtccacgtggcggtttctgcattgtgctgcgggagacaaccaccggggcgttgctcgttcacatcccttccgaggtggtcgctggcgacgcgtatcgcggttcaaaggtgcccctgctggacggcaccgtcattaatgaaatgccaggcggccccgtcttcagggcgcttagaaaggagagtggcggcaggctccattactggggtaagcgtaactactatgctccttgggacggcctgcccgtgggatatgatcactgggattag

SEQ ID NO: 499572 - DNA, 183 bp, Stenotrophomonas maltophilia
gtgaccatattcaaggtgtttgacattcgttgggacgcagacgacgaggttgcctcgcttccgtccgaggtggagatcacgtgctcgggccccgaagcaatagcggaggccctttcgcgtgaatatgactggctggtcatcgatttcaaggccgtgccgatcgtgccagggtcgccggagtag

SEQ ID NO: 499573 - DNA, 255 bp, Stenotrophomonas maltophilia
atgacagagcacacccactaccaccagagaatccaaagggccaccgaacgcctggcccaactacaagcgcgagaccttctggctaatcatcgccagaccgccaagatgaagaacgaaaagaaacgcgcagaaattcgccgtcgaggcgaaatcgccgacatcgtttttgccacaggagcgcacatgctgagcgacgaaaatcttacccaagcccttcaagacttcatggagagacagcatcacgtcacgcactga

SEQ ID NO: 499574 - DNA, 1587 bp, Stenotrophomonas maltophilia
atggcgatctatcacgcgaacgtaaagaccttcagccgggccaagggacactcgtccatcgcggcggccgcctaccgcgctgggcttcttcttgaagatgagcgcacagggctccgtcacgactatcgccggcgagacggagtggtcgagacgcgttgcatcgtgcccgacgatgctccggattgggcgttgattcctgcggcgctctggacggaggccgaggcggcagagcgtcgcaaggattccaccatcgcaagggagtttgagtttgcactgccgcacgagctctccgacgagcagcgctcttccctcgccacagaggtgaccagggctttggtcgaccgctacggctttgccgcccaagccagcatccacagccctggcagcaaagaaggactcaactggcatgtccatgtgctggcgactacacgtaggatcgggccggaaggctttatggacaaaactcgcgaattggatggcgggccttccggccgggcggaggtggagtgggtcagagagctggtggccgccaagaccaacgcacacctggaagccgcgcaccttgacgttaggatcgatcatcgcagcttggaggttcaggcgaaggaagcgctggcccggggtgacctggttgctgccgcagtactctcacggactcccacgcggcacttggggaaggacgcttctgcaatcgagagccgcggcgggcgttccgagctcggagatcgtaaccggtccattgaggaggacaaccaagaagccttcgacgacctccttagccattttggacaagaggggcgggtcatggcaacgccgcacggccatggcgaggagcaggccagacgcgagatgaggcgctcagcatcgggcaagacgctgtctttctccgatggcgaaatcgtgatgtcagcgggaatggccaacgccatcgaccggcgccggcccagtagtgcagacgacgtcgtggcggtgtcggtcgaagcgctcgggagcgaagtggtccagcaaggcacgctgcttcaggatgatttggctgcgaatggcttgcaggtcactatcagggcggtcagggcgctggcgtttggggagattgtgccgcaggactgcaaggagcaccgtgcggcgctcagtcgattgctgctgtgcctaaagcgctttgcggcagcgttggtccgctttcccaaacgtctccaagcggttcgccgcgcgatccggctacgccacatggccgagcagtcctggaatgacttcgtgtccaactgcccagagcccggtgtgtcctggcacggcggtgattggacgcagcgacgtggtcggcggttggctgccttggagcagcgaacgagggagttggcctacgctcaggctgcggctgggccagaacaacaagcgtcacttgccaacgagctggccctgcgcggaggtgagctggaggtgtccagcaaggtgttcttggagaggtgcacgattcgcttggcggtgactcacaatgcgccacagggcaggccgcaggtagcgccagcgccggcactagccgcaagccctccgacaccgagcccggcgcgacgcggtcccaggctccactag

SEQ ID NO: 499575 - DNA, 1323 bp, Stenotrophomonas maltophilia
atgaccaagaagggactcacggttgaggatgttctgcgcagcgtcgcggagaacggctcccggcgttatgaaattgacttgccgggcttccgtcttcggaccacggatgcggccgaccatgctcgagcaatggaggcgctggaagaaatcggcaagttccacttccgtgatgcgggtgcagttccggcggcggctgggccaaacccgttggaatcagcggcggcgcagcccctgccatctgagaccatcagcctgatcgatgcgaagcgaatctggcaggataaagtcgccgccgaggacatcgaggtcaaaacggtcggcatcaaactgcttcccgtgacagagctgatcgagttcttgggcgccgagcgcgagctgcacaccatcacgcggcctgagatggcccgcttctacgaccatttggccaagcgcgggttaacgcgttctacgctcaacaatcgccagagctacctcgcaggaaagagaggattcttcacttgggcaatggcttcaggctacgtgctcaagggagacaatgtcgccgcaggtcacgtcagcgtttcgatggcggagaagcgcaagcgcagaaaatttggcttccaggcctttaccttggatcaggttcatcaactcttcgcgcctgatagcttcaagcagctttcaacgggagcgcgctgggcggctttgttgggcctgtatacgggcgcccgggcaggtgaggtggggcagctgtttaccctcgacgtcaaggaagaggagggaatcccgtgcatacggtttaccgatgagggggaggatcagcgattgaagaccgatgtttccaatcgggtcgtcccgttgcatcccgacctgatcaagcttggtttcttggactacgtcgccgaacgaagggagagcggggactggcgattgtttccgcaggctgacagtaaggcgaagaatggtgcggggaactggatatcgaaggcgttcagctactacctccaaaagcacagtggtgggtggtcgaaagcgaaacgtggtttccatagtctccgaaagaccgtgattcaggagatgcagggcagcggtgtggcctctgagatgcgagcccaaatcgtcggccacgaattggacgacgaacaccacgcgacttacagcaggccctttacggtgagtgagaagctcaacggtgccggaggaacgccagctttgggtgtcctagattacggaatcgacctggaggcgctgcgcaccctgccggcgcgcaaggtcgggcggcgcagcagcaatgctgccgcgcgctcttcaaaggtcggccttaaggggagcgagccgaactaa

SEQ ID NO: 499576 - DNA, 963 bp, Stenotrophomonas maltophilia
atgcaagtgaatcccgacctctctcgggctctgcccgagtttcccgacgtgttggccaagctgaccgatggcacttacacgctccatggcggcgtcattcgccacgcagccggcactggcagaggaggacagatcgtaggccacttgatcttcccaggagatgcgctccagacgcagcagcgacttcaagagctccagtcagccttgtccaagggcatgaacagcatccaaaccggaatggatggcctccagcagagcatgaatgttctgcagggcctacaggtcgcgaacttggccatgacggggttgaatcttgcggtcacgacagccgggttcgtggtcgtatgcaagaaattgaacaagatcagcgcccagatacaagagcagtccgaaggcatcgcgcggacacttcacttggtaggcgaggtgcacgagagaagcctgctgaacgatgaagcaaggttccgctctctccttctgtccgcccaacagttttgtggtgagggtgacacgcatcaactccggacgttgatccctaggttccacgaggaatacgagttcaccaagctcatactggagcgtcatgctcccatcggcagcagcaatctggatcgattcggcgaaattcagttgctgcaggaacgcttgatccaccttggccttggcttgactcatgttcaactgaagagcggctctccagactatggaaaagcatcgctcgtcaatctggccgagaccgtgagcgccctcaacgccaagcgcatcgacgcaatgcttggcagcgaagttgcaacacaggtacgcaagagcgatttcagcgagatcacctcgttcttgaagtctgggaaggagatggtcccggcgctggcttaccaagccgacgtcatcgacttggaaatccgtcgtcgcggcctccttgagcaggcctctgaatccgcggaaatcaggcttgtggctgcctga

SEQ ID NO: 499577 - DNA, 717 bp, Stenotrophomonas maltophilia
atgaacatcgaacagcggaggaacgaagtcgttcggatggccgaagagggaagatcagctcgggaaatagcggcgcgctttaataggtcggtggtgaccattcacgctgaccttagggcaatgggatttccgagaaaggggcgcagagcgctcgggctgaaagtccgctatcgctcatcggcgtatgagttggcccacagaagggcgatcgttccagcgttggtggctcaagggctcagtgcgcgtgcgattgcagaaatttttgatgtcagtcctgactcgatcgaggtcgacaagaaagcgaccggatcgttgaagaaaagcttcagggcgccggtcgaagtaagtttggctgctcttgatgcatggcttgctcagggaaaaagcatgaaggaaatggcatgcattcttggagtgacgtcgggacggctgatttatgcggcaaagaagttgggctgggtgcgtccgggaccttctcgtcccatcccagagaacctgcgtgggctcttgcccagcagctgcggcccggagcgcttgcaaggcttgatcgatgaagggcattcacttggcgagattgcaaggcaccttggggtgaccaggcaggggctctccgactactgccggcgaaaaaagttgaagatcaagccagttttcaatgggcgacgcttacgaacaagagcgaccccttgcgcatttccagaatcgatctatgcatag

SEQ ID NO: 499578 - DNA, 558 bp, Stenotrophomonas maltophilia
ttgaaaaccactgttctggcccttgcgctggcgttgtctgctccggccgcctttgccgccgattccacatccgctcgccgttacggttcgtccgaagccctgtcggtccaggacgcccgactgggcgaggtcctgatggtccgcacgattcaactgaagtccgaccagcgtctcaacgccggttctgccatcggggcggccgctggttatggggctgctaaccgggtcaagaaccgggactaccgcagtgcagcccgggtggccggtggcgtcatcggtgcggttgccggaaccgcggttcaaaagggcctcagcggccgcaccgcagtggagatctacgtgcgcgatttgtccgatcgccgccagcgcatcctcgcggtggtccaagacgccgacgtggacgtgcgcgaaggcgatcaggtgttcttggtggggaagggcagtaaaacacgggttgtcccgattgcgcggatggatgtttcgccgtggggaggtggtgagaacgcaagtgcgtgcggggtgggcgcttgtggcgtgagtttaggggacatgcgctga

SEQ ID NO: 499579 - DNA, 264 bp, Stenotrophomonas maltophilia
atggtccgagagggacaccgccgggcggccatcgcccaagcactgggcgttccgtcgcccgtggtgagcgccgacctcgctcacctggggttgcgtcaaaagccccggcgcccactggctgaccaacacgccctggtggtgcgcctcctggagcaggggagcaacggccctgcaattgccaagcgcctcggcgtgacccgacaggcagtccacgcttacctgcaggcccatggcctgctccgaactcagaggaggatcccatga

SEQ ID NO: 499580 - DNA, 339 bp, Stenotrophomonas maltophilia
atgaccgtttttctggtggtcgtgctgtttaagctcgtcatgtttgcgatcaccttcggaatcgcatggctgtgcgcctccaaggcacgcagcgcacgcagcggctgggaggcgttccaagccggccaagaggacgccccatccgtggctgcattgctgtggccgttggccctgttctacgcgtgcttggcattgctggcctaccaacttcagcacctagtgaccggggtctggttggatccttccaacccatacctgtcatcctcgctggctcttgtcgtctattcgatcacgtgtgggctgcttcacggcagcgggctggcgcggaggcgggcatga

SEQ ID NO: 499581 - DNA, 402 bp, Stenotrophomonas maltophilia
atgttggtctgcgtagcactcccgctgagtggccgggttccacccccgatgttcgtccaggtagcgctccagggacggcctcaatggccgaccaatgttgggcaagggcaacgcccgatcatggcgttcgtcttgctgacgggcataggcgacttgctcgggatccccaaacgcctctcggtgggcatcgagcaagcgatcaaccgcgtccacgtccccgcgggcgtggagcgattcggtgtaaagcgcctgaagcaacggatcgcgctcttggtgaacctcttcgcccgtgccttcgccctggaacagcccgtcgtggcgagggcgggcgtcgacggggtctgggcgcaaccggccgtggctgcttctcatgcccgcctccgcgccagcccgctgccgtga

SEQ ID NO: 499582 - DNA, 480 bp, Stenotrophomonas maltophilia
atgaagcgagccaacgacatgcgggcccaataccagctggccgtggacgaagagggcatcctcctggccgcctcgcacatcctggagcgtcgcctccaccgccaaggggccatcaccgaccctgccagcgccagcagctacctcactgcccgctgcgcgcacctggaccacgaagtgtttggcacagtgttcctggacacccgccaccgcatcctggccaccgagcacctcttccaaggcaccatcgacgggtgcgaggttcacccccgcatcgtcgccaagaaggctctggaccacaacgccgccgccgtcatcttctttcacaaccaccccagcggaaaccccgagcccagcgctgccgaccgcgccatcaccgaccgcctcaagcaggcccttgctcttctcgacatccgagtgctggatcacctggtgatcgcgggatcatcgcacgtgtcgatggcctcacgggggtgggtgtga

SEQ ID NO: 499583 - DNA, 312 bp, Stenotrophomonas maltophilia
atgagcgcagccgtcacaaccaacgaagccgcgatgaccgagttggggttgaaccgcggtttgattgaagattatgcagcggtctccttggagcccgtgagctttgaagaagaggacagcttgggctgggcgaccacttggacggcggttcatgctgtcgagctccacaacggcgggaagatctacgttaacggccgatccttccacgtcacccaagccaagcccggttacaagcacttgctcaagtgctggcgagaagagcaggggcggcgcgcggaattgccttattgggaggctcgggatgggcactga

SEQ ID NO: 499584 - DNA, 456 bp, Stenotrophomonas maltophilia
atgggtgactcgattccccggatgaacggacattggggggagggagagctcggaaagagtgagagggcaaccgtgcttcacggcatccatttcatcagtccctcggtgggtggcccgctgttcaatacggtgtggcttcccacgctggccgacttgcgggcgctgctcgctgacgctgacctctgcaaagcagccgaaaccgaggtgggcgcgttcattgacacgcgcgttgatccgttgccttctgagctcgatgaggtcatttaccagccatcgataaggcagatttccagcctgccggataactatgggatcggcgtgggcgtttttgtgactgacgcgtttgcgtttgtccttcagcgcatgattcaggaggcaatggctcagcaccgggcgcgtgagctggatcgggtatgggaacagtcagccaccggtggcaagcgccccaggctctaa

SEQ ID NO: 499585 - DNA, 501 bp, Stenotrophomonas maltophilia
atgacacgcaagaccttccttcgcgccctgctgcccatcgccatggcttcgctggcggtgcccgcgtttgccgccgacaccaccgcagacctgacgattcagggcaccctgaccaacacctgcaatttgtccgtttctccggtcacggacatggattggtcgggcacttctgacaactccacccgaacctctgcgttgagtatcgtgtgcaaccagggaaccacttactccatttctcccgggcaggggcagaacttcggagcattggcgggttacgaggcctaccgcgccgtcagcaacggttcgggtgccttcatcccgtatggcttgttcaaggacattcccggcacccaggcatggggcgatgatgccgatgcgtttgcgggcacgggtaacggtgctgtgcaaacccacgaattcgcgttgaagttcttcgccctcaagcaggccgtgggtggcaactacaccgatacggtcaccgtcaccgccacttacaactga

SEQ ID NO: 499586 - DNA, 660 bp, Stenotrophomonas maltophilia
atgacccatccccaacgttttttggccgtggccgccgcgtccttgctgtccttttcggcgtccgccggttccatctccgttggccccaccaccctgatggccgatacctcggccaagcacgtcgccttgacgctgcacaacagcggggacgcctcggtgcgttaccaggtgaaagctgtggggtgggatcaggccacagggcagaacgtgttttcccccaccacggagatcgtgggggcgcccaccttcgtggacgtgccaccccaatccaagcgcaccgcccgattgatgcgggtgggcgcattgggcgagcggcgctactaccgcgtgctgctgatgcagctcaaagaccccaacgcccagggcgtccagttgctggtcaaccaagacttgcccgtggcctttgaagccgccaacgcgcccgtcccccaggtgaccgtccaagcggtgcccaatggataccgcttgacgaatcacgggcagaccgcggcccgcgtgtcgtccatcggcccggccaatgggaagccgtggcgcgacggtgcattgggttggacgctaccgggggcctcgatgacttacgagacccagcctggccagcgtgccgaagtgctttcgatcaccgtcaacggccagcccgtcaccgtccccgtggggcggtga

SEQ ID NO: 499587 - DNA, 2196 bp, Stenotrophomonas maltophilia
atgcttggccgggtcctggccttggtgttgctggctgcatcgtcggccagcgcagcggtgcccgacggcgtggcgcccgcgttcctggtgccggtcatcggcggcaaggccaaggcggatccgctcacgttctggcagcaagacggccaatggttcgccgagccggccacgtggcgcgaggtcggactccaacttcccccgggtcaaacggagccgatgagcgcccaagcgttggctgtgggctttgttgtggacgaggccaccgccacggttgccctggatctgccggccgatcggcttaaggcccaacgcgtggcccgtgatcgcaccgagcgcggacccatcgcgccgcccgctcccggggtgctggtgaactacagcgtggccggcatggcctccgagcaacagcaggcgctctcgttgggccacgaggtccgcaaggcggggcgttggggcgtgatcagcaccagcgggcaggtcaacacagacacggccggcaccggctacgttcgcggcgtgacgcgctggcagaaagatgatcccaaccgcctggtgacttaccaggccggcgatgtgttcgctggtccttcgtcttctgcggtcaacctgggaggggtgcgcgtggccaaggacccgcgggcgttggacccgttgacgcccacgtatccggtcccgatgctcggcggcgtggcgctcgatccggccacggtcgaagtcctggccaaccgcgcccgcgtgctgcaaggccgggtggggaaaggcccgttcaccgccgatggcagcgccttgggcaccggtgcgcagcaaacccaagtggtggtgcgagacccttacggccgcgaaaccgtggtgagcgatcagcgcttctacgtcgcccccacgttgctccgcaaagggctcaccacctgggaaatcgccgctggccgggtgcgccaaggggagagcgattacaggaccttgggcgcgaccgggtcggtggcttggggcctcaacgaccggtggacgctgcgcggcaccgcccaaacttcaatggacgggaaggtcaacgtggcgttgggggccgccacggtgcttggcacctacggcacgttggatctggagttgggcacttccacgcaaggcggccaacgccaggccttggcctacgattaccgcggcccgaggtttggcgtgcgcctggagcacgagcgccaacagggctactggcgcctgcgcgcccccagtgcggtggaggtggagcagcgcacccgaggttcggtgttctggcggcccacgccccagtggtccctccgagcagggctctccgacgtgcgcacaccgcgctttcgcaccgcttacgccgacgccgggctgacctggcgtggcaacgggcacaccgtggccgtctccgccttgcgggaccttgagctcaaggaaacccgggtggaggtgggctacagctacgatttcggtcgaggcaagggcgtgagcgttagggcccggcaagcccccgctgccaccgcctgggccgtccaaggacgcgcccgccccacggtgttgggaaccccggtcggcttgtccgcttcggtggacgagggagcggctggccagacggcccgggccaacgccaactggaccacccgggcagggtgggcccagatcaccgtcgagcacgggcccagcagcacttggacttccggttcgatggccggtgccgttcacctggatcgccagggcgtgacgttcctgggtccggccgaatccttcgccgtggtggacgtgcccggccaagccggggtgccggtgagggtgggtggccgcttggtggggaggaccaacgcccagggccgcctggtggtgggcgaggtgaccccaatggtgcccacggaagttcgggtggacgatcgggccttgccgctgggcacccagttggccgagatcgagcaaaccgccaccgcgggccgccaggctggcatgcacctcaccttcccagtcctgaccgagaccgcacgaaccttccgcctcaagggcccggccatcgaagcgggcacggtggccaagacggcgaccgagaccacccaggtgggctacgacggcgtgctctacctggagcagccgcgccccagccagacggtggaggtggaaggggtctgcaaggcccaactgcctgcggaccttggggctgcgcaaacggtggccgaggtggcttgccggtga

SEQ ID NO: 499588 - DNA, 297 bp, Stenotrophomonas maltophilia
atggcgatgaaaatcggcagcaagtacaagttcagcgaagttcaggcgcggcactgggagcagtttgcagaaggcgtgtgttttaccaaggcgcaggccaaacggcgcattgtggaattggcaaagttactgcccgcgacggcgcgcaagctccagtctgacccggggcacagttttgctggcaatgccgtggttgagcaaatcaataccttgattgaacaacgctgcgccctgacgattcggcagctcaccgaccccgccgccgacaatgacgcagccgtcgaaccctcgatctga

SEQ ID NO: 499589 - DNA, 1008 bp, Stenotrophomonas maltophilia
atgcaacgccggacctcttgccaatcatcgaaggagaaagcgaggcgcaatccgcatgaggtggacgcaggccaggaacgaggcaaacaggaggccgcattggaactcagactactgcgctatttcgttgcggtcgcggaagaactgcatctcgcgcgagcggccgagcgccttggcgtagaacaatcgcctgtgtcgcgcgcgatgcgcaatctcgaagccacgctcggcgtgcagttgttcgaccgcagcgcgcaccagacgcgactgacctgggccggtcaagtgttcctcggtgagtgccggcgtgtgctggccactgtggagcaggcggtgagtgccgcaaaggcggcggcgcagggctatcagggttatctgcgcatcgccatctgcgacagcttggcgcagccccacattgccaccttgctggcgcgcagccgcgaggaagagcccgaactggagattcgcgtattcgagctgcctttcgcgcagcagctcaagggcctgcacaacgatctgctggacataggctttgcgctgtcggacgcggtgagcgaaggccttgtcgccgagcccgtgtggaccgatcctctgtcggtgatcgtgcccgtgcgccaccccttgttggcgcacgcggaagtgccattggatgaagccttgaagtttccgttggtactgtgccatccggacgcgggatcgggctgccaccaccagatccaggcggtgcttcaaggcgcgtccaagccgctcaagctggtagagcaggtgacgagcctaggcgtgatgctgactctggtcggtgccggttatggcctaggtttcgccattgcctcgcaggtgcagaccctgaaccgccccgacataaccgttcgccccttggccggcacgccgcccatgctgtccacctacctgctgcgccgcagcgccgaaccctctgagcccatgaagcggtttctgcagcgcgcccgcgaggagttcctgccaaagggagatgaaccggcctcgtga

SEQ ID NO: 499590 - DNA, 1152 bp, Stenotrophomonas maltophilia
atggcctaccccgacccgtacccacgccccgcaccggcccccttcatccggcgctggctcttcatcaccgcctgtattgccacgctcatgctgctgtggcagttcctgcccgccatcgaggcctggttcagtccgcgcgaggcggcagatcgcaccgtgacggcgcgtggcgatctggcggcggacgagaaagccaccatcgaactgttcgaagaatcgcgcgcttcggtggtctacatcaccaccgcgcagctggtgcgcgacgtctggactcgcaatgtcttttccatgccgcgcggcaccggttcgggctttatctgggacgatgccggccacgtcgtcaccaacttccacgtcatccagggtgcttctgaagccacggtcaaactcgccgatggccgcgactaccaggccgcgctggtggggacgagcccagcgctcgacatcgccgtgctcaagattggcgtcggtttcaagcgcccgccggccgtgccggtcggcaccagtgccgacctcaaggtgggtcagaaggtgttagctatcggcaaccccttcggcctggactggacgctcaccaccggcatcgtctccgcgctcgaccgctcgttacccggagaagcgggcggcccggccatcgatcacctgatccagaccgacgccgccatcaaccctggcaactccggtgggccgctgctcgattcggcaggaaggctcatcggcatcaacacggcgatctatagcccctccggcgcctcggccgggattggtttcgccgtgccggtggacaccgtcatgcgcgtagtcccgcaactcatcaagaccggtaagtacatccgtccggcgctgggcattgaggtggacgaacagctcaatcagcgcctgcttgcactgaccggaagcaagggcgtgttcgtgttgcgtgttacccctggttcggcagcgcacatggccggcctcgcgggtgtcgaagtcacgccgcaaggcatcgtgccgggcgaccgcatcatcgatgttgatggcaaggcgacggacgatgtggccaagctgctcgcgcggctagacgacaggaaggtcggcgatgtggtggtcttgtcagtggaacgggccggcaaatcgcgcgaggtgcgtgtggagctgcaacccgggaattga

SEQ ID NO: 499591 - DNA, 699 bp, Stenotrophomonas maltophilia
atgacccgtcatcatcccagtgatccgcgcatggcgctgttgcaacaccgctggctcaaccgcctgcagaccgggctgttggtcctgaccctggtcgggatcgcagccgcagcagggagactgccgtttggggaatgctgcctgtggctcgcgctgtttgccgttgcaggtgcgttgctgctggaaccggtagccgcgtcggcgctgagcttgcgcctgtaccgcgtacgggccttgcacccgcaagaagcccacgagatgtgggccctgttgcgcgagctgcccgcccgtgccggtttgcccgccacgccggtgccgcactatgtgcccagtgccgtcgtcaacgccttcgccaccggatcgaagcaggaggcatcgatcgccctcaccgatggcctgctgcgcagcctgagcccacgcgagctggcgggtgtgctcgcgcacgagatcgcgcacatcaccaatgaggatctgcgcgtcatgaggctgcggattccgtcagtcgcctcacgagcctgctggccctcatgggacaaatcgcgatcctgctcaacctgcccgcgctgctggttggcgcggcggaggtctattggcctggtctattgttattggccgcatcgccccagctggccctgctcgcacagctcggcttgtctcgcgtgcgtgagttcgacgctgaccgcctcgcggcggaactga

SEQ ID NO: 499592 - DNA, 1716 bp, Stenotrophomonas maltophilia
atgcaggacttgctcggcgccaccctgatcctgctggcggcatgcagcctcgcggcggtggcgacggcggcgttcagagtacccgccttgctgggttacctcgccatcggcgccttgctgggcccgtcggtcagcggtgtagtcgcgccgggagaagcgcttgattttctgtccgagctgggcgtggccctgctgctgttcatggttgggctggagttctccctcgggcacttctggctttcccgtaaaaccgtattggcgtccggcagcttgcagatgatcgctgtcgccacgccactgaccttgatgttgatgtggctgggacagccagttcagagcgctgcgttgctcagcactgcggcggccatgtcgtccacggcgctggtcagccgacagctggccgaccaaggcgagctcaccacccgccacggccgcagcgccatcgccgtgctggtctttcaggacctggccagcgtgcccctgctggccctgctggcgatctgggcgcgcggcgagtcgccgaagatcgagagcgtgctgctcgaagtgttgggcgtgctgatgttgttcgcggcagcggccctcgcctcccgtcgtctgttgcatggcctgctgggctgggtggcgcggcagggccacgaagaatccttcgtgctggtttccttgtgcgtggtggtggctgccgccgctgctgcacacgcggtcggcgtatccgccgccctgggtgcgtttttggccggcatggtgctgggcgagagcgacttccgtcaccacatggaaagccacctcaggccgtttcgcgatgtgttgtcgggcgtgttcttcgtgaccatcggcctgcaactggacgcagcacagattctttcggcaccgctggcggtgctggcgtggctggtggtgctggtaccggtcaagatcctgctcaatacgctggccttgcgggcgacgcgcctgtccgccctcgatgcctggcgcacgggcatagcgttggggcacggcggcgagttcgctctgctgttgttgggcacggtcttgcagcagcatctgatccccgcgaccgtcgtccaacccatgctggtcgcgctggtgctcagcatggccctagcaccgctactgatccgccatcacgatgtacttgcccggttcttgagccgcaccggcggcgtcattcagccaccccaggctgaagaagtcgagatcgccgcgcagacgacgcgatatcgagaccatgtcatcgtttgcggcgcgggcgagcttggccttacagtcagcgagattcttcgccacgccggcgtggcgcatctgctgctggaggcggacgcgcagaaggtcgaggccgcgcgtgccgccggcgcgccggtgttccatgccgatgccagtcggcccgataccttgctggctgccggcttgacgcatgcgcacttggtggtgctgacgttcgcccatgcccagcaagcgttgcgcatcgcccaggcgattgccgagcgccgtccggcgctgaccttgtgggtgtcatgcagaagtacgaccgcggccgatgcatttcgcgccatgcccaacgtgcgcgtgtatcagcaatcctttgccgcagctattgggctggcggaacaggtgatgtcgacgcttggcatgtcgaccgagctgattgaaggacacatcagcgcaatgcgccgccgtctcgacagcagccgttttccagggagttcatcgtcatga

SEQ ID NO: 499593 - DNA, 441 bp, Stenotrophomonas maltophilia
atgaagaatgatcttcacctcgtctgtccgcattgccagtccatcaaccgcgtaccgactgcgaagctatcggaacatcccaactgcggccgctgccagcagcccttgttcacgggcgaacccatcgagttgaccacggcgacgttttcgcgccacgtggagcgcagcgacctgccactgttggtcgatttctgggcaccttggtgcgggccgtgcaagatgatggccccgcaattccagcaagcggcgcgccagctcgaacccagggtcaggctggccaaggtcaataccgaggcagaaccccacctggccgcgcagttcggcatccgcagcattccgacgctcgccctgttccagggtgggcgggagatcgggcgtcaggccggcgccttgggcgcgcaggacatcgtgcgctgggcatctgcacaggtggggcgctga

SEQ ID NO: 499594 - DNA, 570 bp, Stenotrophomonas maltophilia
atggacattgatttcaagaaattggctccctggaactggttcaagaaggagcaggaagaacaacagagcactgcctcgctcccggtgctgcgcaatgacctgccggtggcgggtggacccgtcagtcccatcctgcaattgcatcgcgagatcgaccgcctgttcgacgacgcgtttcgaggcttcggtttcccgacgctggccatgccacgctggccgtcggactggccaggcatgctgaagccggcgctggacatccaggagaccgacaagcagtacaagatcgccctggaagtacccggcatcgaggaaaaagacatccagatcacgctcgacaacgacgtgctgctggtgcgcggtgaaaagcgtcaggagcaggaaacgaaagacggcggttttcaccgggtggagcgctcctacggcagctttcagcgcgctctgaacctaccggccgatgccaaccaggacacgatcaaggccgctttcaagaacggcgtgctcacgatcacgatggaaaagcgcgaggccagtacgccccagcaggggcgctcgatcccgatcaacggctga

SEQ ID NO: 499595 - DNA, 402 bp, Stenotrophomonas maltophilia
atgatccggatcgctgcccgtttcgattacttgatcagcgttgccctagacaatgggccggaacttacggccgaggtcttcgtcgaatgggctgagcgccacggcatcaagctgctgttcatccagccaggcaagcccaaccagaatgcgttcattgaacgcttcaaccgcagcttccgccaggaggtgctcgatgcctggctgttcaatgccgtcagcgaggtgcagaccgctgctgacgattggctcaccgactacaacgaatgccggccccacgattccctgggcagcgtaccgccggccgtgttcaagcccagggtgttcaaccaggaagtctctagttctggactgtccgggggagcttacgaatcggccagcagatcgctggatgttgactcttga

SEQ ID NO: 499596 - DNA, 963 bp, Stenotrophomonas maltophilia
atgaaacagcagacgttggcgatggcggccgatcagggcagtggattcgagcaacatcgtcggccgacgcgccgagacgtattcctggcgacgatggagcagatcgtgccgtggtcagggctgtgcgcggtgattgagccgtactacccgaaggcgggcagtggccggccgccggtcggcctggaacggatgctgcggatgtatttcgtgcagcactggttcaatctggccgatgaggcctgcgaggaatcgctactggacagcacggcgctgcggcggttcgtcgggatcgatctgggccgtgagcgggttccggacgcaacgacgctgttgaagttccgtcgccttctggagacgcacgagctgggggcggagctgttcttgcaggtgaaccgggaattggaagcacggggcctgaaggtgggaacgggaaccatcgtggatgccacgatcatcggcgcacccagttcgacgaagaatgtggacaaggcccgggatccggagatgcaccagacgcgcaaggggcagcagtggtacttcgggatgaagctgcacgtgggcgtggacagccgtacgggcctggtgcatagcgcggcggtgacggcggccaatgtgcatgacaagcacctgctggaagagctgctgcacggggaggaacgccgggtgtatggagacagcgcctacgccagccagaaggcgctgattggcgcgcatgcaccgcacgcccgggacttcaccaatcggcgggttcgcaagcgcggcgaggtggacgaggtcgagcgccggcggaaccgcaacaagtcgaagatccgtgcccgggtggagcacgtgttcgcggtggtgaagcggctgtggggctttgccaaggtgcgttatcgcgggctggacaagaacgcgaaccgcagcttcgtggcgctcggcctggcgagcctgtacctggcgcgggtgcgcttggtgggatag

SEQ ID NO: 499597 - DNA, 522 bp, Stenotrophomonas maltophilia
atggtcgacgaacaccatgtgtcccgcgtgcgcgcctgcatggccgtgggtctgccgcggtcggcgttgtacaagcccacgacggaccgggcgggcaaggatacaccggtcatcgaggcgatcaatgcggtgcttcacaagcggccgcgctggggcttctggaagtgcttcgacctattgcgccgcgatggccacgtctggaatcacaagcgggtgtacagggtgtattgcgcgatgcggctgaacctcaagcgcaaggtgcggcggcgagcgctcacgcgcgaacgccagccgctgctggccagcacgcagctcaatcgggtctgggctctggacttcatgcgcgacacgctttacgacgggcgtgtgttccgcacgctgaacgtgatcgacgaaggcaaccgcgaggcactgcgcatcgagtgtggcacctcgatcccctcggcgcgggtggtgcgcgtgatgaaccaattgatcgaggtctacggcaagcctgaggcgatccgcctagggcaatgctga

SEQ ID NO: 499598 - DNA, 126 bp, Stenotrophomonas maltophilia
atgtcggtcaacgagctcaagcgggtcaaggagctcgaggccgagaacgcacggctcaagcggatgtacgccgatctggcgctggagaatgcggccatcaaggacgtgctgtcgcgaaagttgtga

SEQ ID NO: 499599 - DNA, 234 bp, Stenotrophomonas maltophilia
atgggtacttccaagccgggcaaagatttagaacgggtcaccttgtcggtgggagagcacgtttacacctccgagatctggcggctcagtgaaagccgttgggttcttctcgctgtcgaggtccacggcgtgggagggcgctcggatttgagcatcaaagcgtcgtcgtgcctccatgcgttggacgcgggagagcggattgcgtctgagattctcaacaacccctatggctga

SEQ ID NO: 499600 - DNA, 615 bp, Stenotrophomonas maltophilia
atgagcattttgaacgtgttgctgagtgccgatcacttggctgtgaccgtcgatacgcttgcgcaagatgctcaaaccggggcgcactcagagggcgccaagttgcttctgctgcctcagcacaacgccgtcttggccacgcgtgggtcggcccagttcttcctaagaatctacgagctctgtctccaagccagttttcgagcagacttcacgatagagcggctgtccggcgagcttggcggcgtgattgatcgcctctggccaaactacgtgagcgcggcggcagccgctggcatacccatcagcgctatgcacaccgagttggttttgggcggctggtcggcgcacgcccagcgcatggttgccaccgcttatgcaaagtccgaagatggccgtcccgccgtggtccaagcgctggtgggaggcttggcgtctccaggagagcccttgcggaatcagccagcaggcatgggacgggcggagttgatggcagcaggacgcttgcaagccgcttacctcaacggcgacagcgagcggccattagcgggcggtcgtctgttggcagcaattctctcaaagggccaagcaaccgttctcgatctgggaggtctctag

SEQ ID NO: 499601 - DNA, 270 bp, Stenotrophomonas maltophilia
atgtcgacgatcatgggcatcaggtgggcccatgcaaggcgcaccgcggtgggattggcagaactggccaccaaagccctgaccgcatactccaaggcattggtttcgccctcagcgttgggcaggcgcctctcgcactcgctcaggcggagctccaacttgaccaacgcctccgtctcagccttgtgcatacccctcctccattggctggccaccgaatcgcggtctggcagcagggtggccccaagctcaagcgttggaaaccggtga

SEQ ID NO: 499602 - DNA, 1461 bp, Stenotrophomonas maltophilia
gtgtgcctcttggcgatgctcgcggtcgcccaagccatcctctacgtgcgtgacaaggaaggggcggaggcagtggcggaagccgcggtgacgcgcgcggaggccatatctcgtaaccggcgcgtagcggccgaacaagcctctcgcatcggacagccgccttgctccgacaccgacatcgactcactaaaggagatcgcgttccgctccagctacatgagcgacatcggtcgcatccgtgacggacgccttgtctgcagcgccttgtggggacgatcgcgacctttcactctccctgccccgcgtttttccagcggcgctgtccggctttggcacgcatcggatctcgttggctccccctacaccgggtccaatctgatcgcccaaggcgacacattcaccgtgtcctccccgtctgccttcgagagcttggaccctgcgcgcagcagctccatcagcatcgaaacgaaggaccgatcgtttacattccgcaccttgtccccgaccagccgcgtcggcaccccgtctctcgtccaagctcaacattgcagccgggtggccgacgtttgcgcgttcgttaccagccctaggcacgtggtgtccgaactgccctcggcgttgctcaccaccatcctggcagcgggtgcctcggtagggcttttgctcgcgttcttgctgatcaaacaccaaatcacggctcggcaaaccatccagcaacggttggtgcttgcactgaagcgcagcgagatcgaactggcctaccagccactgcgtcgaattggcacgcgggagctcgtgggatttgaagcgctcagccgctggcgcccgccgggagacgatgaaatcccgccggccatcttcgtgcccatcgcccaccgattcggcctgagtcctgatctttttcgatacgtgctggcccgtgccatgaatgatctcgcccccgcgctgagggagcataggaacctctacgtgagcatcaatgccgagcccgtggacatggcccaagagtgcgtcgttcgctacatcggcagcgtcaccaacgattttggcgtgttgccagagcaaattcgcatcgagatcaccgagcgggaagaactcgtgtccgctgccgcaaagagcaacatgcaggccctctcagttctgggataccggttcttgatcgacgacttcgggacgggcagcgcgaatttctctcacctcgcccagtcgccgtttcgaggaatcaagatcgatcgcatgttcgtggccgctgtcaacgaggactcccccctgcggcccgttttgccagggatgtatcgcatcgcacgtgagcttgggctggatgtcatcgcagaaggcgtcgaatcagaggcgcaagatttgctgctctaccggattgctccagaggctattggccaagggtggcactatggctgccctctctcaaccaaagacgcgcttgccgccatccaagttgggtag

SEQ ID NO: 499603 - DNA, 189 bp, Stenotrophomonas maltophilia
atgaccgctatgaccattgattttgagtggctgtccatcctctccgggtggtccttgctcaacgacagcgcggccttgctgcgcaccccgggccagcgctgggcgggcttggagggattgctcattggctacgccctcatcgctggacagtggttcgtcctggccaccatggtcggagcgctggcatga

SEQ ID NO: 499604 - DNA, 300 bp, Stenotrophomonas maltophilia
atgcgtttggcaaaacagctggtggacatgggactgagctttgatcaggccaactccatcgtttcgaacgaagaaatgcgtgcgcttttcagcgaaggcagtgccaccacagacgccgtggtcatgtgctggccaccttttcaggaatacatggtcttcgtgggtgaggaacgacgatacctagccgatcacttggcacaggcaaacggaactgctcttgtgatcgaactgaaggctattgcccagaccgtcacgtcgaagctcaaggaaatccggaatgagggggtttcggctctttaa

SEQ ID NO: 499605 - DNA, 498 bp, Stenotrophomonas maltophilia
atgagcgaagaagcaagcacaacaccgcttgaggaaatgagctgggaggaaaagcttgaggaactttttcgaaacggggtgcagttgtcgcggcttgggctgaaccttaggtcggacgacgttcagcgctatgggcacgtgtgggtggaggcaaccgagattgcacttctttccgataacttcattcgcgccatggtgactgcactggagggcagacgagatgctccagagctcgctagggcgctttatgcagaggtagacgctgttatcgcgttgcagcgccatgctctcagagctgttggctcctctccgcctagcgagactaaccgcaggaaagaatggattcgccggtggattgggccagggaagcgagcgggcgacgccacgcactcaatttctggaagcttccgtgaggctttgggtgacctgttgccagattgggcaaagggcactctgaaggtcggcgaggaactctgggaaatctacggtaagaagtaa

SEQ ID NO: 499606 - DNA, 201 bp, Stenotrophomonas maltophilia
atgcccgacgaagcaaccatggaacgcttggccgaagaactgggactgccagtggcctatttccacgccgcgtccgacgtgctggcggaagtgatcttggtggtctcccggctcccacccgaacgccagcgtgaattgctggcgcgggtgagaacctacgcggaatctttagagctttcggaacgggaaaccaagtcgtag

SEQ ID NO: 499607 - DNA, 852 bp, Stenotrophomonas maltophilia
atgctgtgcgtagcgggggctgttgcaatcttttggtgcaccgctgagcaggcccgggccgaatcggatctgcttcgccagatcggccgagccatccaaggcacgcccaaggtggtcagtgatagggcaaggagcccttacgtcgagccgaccgggacctactgggacctggatcaggacgtcttggaaggggctcagcacctgcgggccggggtgacggctgtgggtggtggcggcgtggacacttgcgacatgcagctgctcgccatggcccattcgtcctatcgcatcgacgccgacaagcgccaatggtgcctgaggcaatggtggctgatggacacgaaggcccagggcgccaacggcatctcaggcgatgatccggctgccatcgagcgccgttatggcccggctttcgacgcgcgcctgcagcgcttcaaggccatccgacggtttgccgttcgtcccacgttccaagccctgggcgatgtcgcctatcgggccgaccgtggcgtgctggaaggattcatcccgatgtctcaggtgtccgcggcgggacaaagcgtcaccggcaagggctttgtgccgtgggttcaccgcacctccacgggggtgtccagcccacccaacgccggccgcttccacctgctcatccgagtgggcgcccaagaggccgccaacttggcgcgacaaggtcgcagctaccgagacgatctggtggtgttctccgtcaaccgggtctgggtggagggcacggtgccgaagatggacgtgacgatagagagggttcggctcggataccgcgacgaaaccatcgacgttgatttaacccatacgcaaggagcaccggcatga

SEQ ID NO: 499608 - DNA, 363 bp, Stenotrophomonas maltophilia
atgaaagcaacccacgtttccctcgccctgatcaccgcaggcttggccgcctgcagcagcaaggcggatttgcccaccatcgaacaagtcgcccacgcttacgaggcgcatgccaacgccaacctttccagcgaaatgggccaacgaatcgaggtttggggttggaaagacctcaccgcggattgcacctccagtggtccccagcgggccacgtgcgtgaccggtggaacgctggacgtggtcgggttccagggcgggcagcagttgaagcccgatcccgttcccgtgccgtcggcttacgacttcgtctttgagaagcagcccaccggctgggtgccggtcggagcccagaagaagggctga

SEQ ID NO: 499609 - DNA, 483 bp, Stenotrophomonas maltophilia
atgtcttacaacgctcaccacacccccggcggtcacatgcagtggggcttgctggcaccggccaccgtcatcctcggtggtgcaggcctgctgtttcttgccggggcccaagagatcggccagaacgtgggctacggctggcaggccggcctggcagtcgctggtgggacagccatgctgctcttgctgctcctgctctacgtgttgaactggcgcgcggcccgcgtgcgcgcggcaagggccagcgggctcccggtttcgccgggtaaaggtggctttggaaagggagccctggtgggcttgctcttcgtcgttgccctgcagctggccagcgttgccgtgggcctgctctacccggggttggaggagggtgagcgaaacttcttcacctctgtgcccccgatggttctgacggcgcttatgcccgtggcgctgatcgtgggtggcatcgcaggcaagctctggcgctccaccagcctgtaa

SEQ ID NO: 499610 - DNA, 498 bp, Stenotrophomonas maltophilia
atgaaaattcatcacctcgtcagcgacggaaaccaagcggtcgccatcacgcaatcggcatcgagtggtggtggttacgcgcacccggtgaagctctccgccattcgcttcaacgtgcaagacgctgaagcggcgcttggcgagctcaacaggtctggccaccgtcatgagaaggcgttcgaagtgatcgagcgttgggacgtcgatgctcgcaaccaggggccaaagtccaagttcggtcgaacccttgccgcccttgtggacgaagcgcagggtcacttgaaggggccggtgatctacgaagccaaaagcatggaggagggcaccgcgcgtgcgctcaacgccgcagcgaagcaagccaggctttcgcaggtccttcctgctgcaggtgctccgagcatgatcatcggtgggcaggtgtggaacccacgccgggagtcgcagagcgaagctccggcggctgttctcgaagctccccgtcagcgcgtgcgcctgtaa

SEQ ID NO: 499611 - DNA, 360 bp, Stenotrophomonas maltophilia
gtgcttcaacctgtcccttccccaaaacttgtcacccttccgtcctcccggggctactcccgtgatctggagcgcttgcaggcggccgccgcgcgcgtgcaggtcacgcgaaacgaagccgtgcgccaagtgctcgccatgtatgccgccaaaccttacccactgagcatgcgtcggctgggtggggaacgggacgtgcggctggcctaccttccgctgcagcgcagcgtcttggaggcggtggagcagggcgcggtgaacgcggggatttccaccgcagaagcggtgcgccagatcatccgagactacgtccaaggacatctcattcggaaccaggttcggggcagccgccatggctga

SEQ ID NO: 499612 - DNA, 762 bp, Stenotrophomonas maltophilia
atgaagcctcaggaactggaacaacgtattcgccaaatcgatggattcgttcgggtgctcacgcaggagtgccacatcctcgacgagcgccggcacattctgtccccactcattcaagaccccgagattcaggcagggctgaaagccaagctggacaagacgccgggtgccaatgcctggaaccacctggcgccgcttcttggacaagacctggtgcgcgatcagtcacggctttttctggataacgatcccaggtcgggtagcctgaccaacctgtggagaaagctgcaagcagatccagccatcaaggagcactaccgggagcgctacgggcacatgttcgatcacttccacgatgaaccgatcagtgacctgccgcccgaaagcacggctgttttccaggagaagttcagacagagcgatcgggacgagaactactcgcgcttcgatagtggctgggaaaaggtctccgctgctatggcgctcttgatggccgacccagtggctgagaagatcaaaacgctccgggacaagcaccacgcccacctggaaatgcgcaagctggacgaggagcctggcgcgtttgacatcaacacgcttgggttgaccttcaatgaggtcttggcttttggcgatcgctgtcaggccatcgtggcagagctggggctgctgctgaccgggaccagctgggatccacagcaatacgcatcggttcacgaagcccagggcaaggcgatgtggaaaaccttggctggggtttga

SEQ ID NO: 499613 - DNA, 1092 bp, Stenotrophomonas maltophilia
atgaacaccgctgacctggacgcgtttgcccgtcgcgtgctggccttccatgccgcccgtgggcctgccaccccacgctgggcgctggacgtggcccgccgctctgagaaccccgcgtgcgctttctgcaccgcccctttgaacgtggatcatcgccattcgtgggggctttcacccctcgttccgttgaaccagggcggcccggcggacaccgaaaatctgctcatggcctgcaaacgctgcatcgctgaacgcggcagccgagacctgttggcctggcccgagttgagccagcggctgccaccagaacccttggacgccctgctggccgaccggctgcttgtcctccagcgctccgacaaccacctggtcgaggtggggcgctttgccaagccagccaccgtccttgcccagctccaagagcgctggatacacccccggttcgtcgttcacgcccagaggcattcggacggctggatagtggggtggccactggcccaccgtgcccatctgacgcgaaacgacttggccgcgctcttgcgcaacgtgcaccaaggcgaatggctggaacaccccgaggtggtggccttccggttgaccgaggatgtttttcaatcggcggtgtggcaactgatcgccctccacgcgttggtcgtccccctgcatctggggactgacactccttccgaccgctcctttgagaaccggtggatggcccggtatccaagcctgcgccagatccgactgcggcgacagggcacgcacgaagcaccgtggcctagccaggccaaagaccacattccggcttacagcgacaagcccaacgcggttcgcatgcggacacagcgccaagccgctcgtcaggaggaaatcaaggcacagtggctcaatgcccggcgccgtttagcgaaccgggacgctggggtggccagtgggacgttgagggcatggctgcctggggaacggtccgcgctgcaggccgacgtggacgatctggcggcggcgtggttgaaagcccgcaagcgccagccgaaggggcgcccggacaccaggtatcccttaccattgaggcaagctcagacaaccaattga

SEQ ID NO: 499614 - DNA, 1188 bp, Stenotrophomonas maltophilia
atgaccccagaagaaagaatccagcaacgcaagcgcgaagaattgctgaagcgtgccaacgcaaccccgaccgcttcgcccacgcaggaagagcggttggtttccgacggcatgaaagaaaacctgaaagcggccagtcactgggccggggtgatcagcaggcgcactgccgagttgacccagaagggcgttgctgccgctgcagagaaggcgaaggaggtcaaggcgaccgtagacgccaagcgggcaagaagcgcagaggaaagagttcaggcaacagaagccgagtctggccccaccgtccagccgaccgaagccgaggtggcgacaaagtctttgaagggagaggacgcgggttctctcgtggttgacggaatggctcaggaccttgtgcttgttgatggggaggtgggggagggcaaagcacccttcgccgaaatggcagccgaggacctggtcgatgcgttgtccgcccgggagccagcggcaattgccgtcgaagccgaagcggttggcgtgagcgaaacgaatcttgagccaggagtgacggaacagcggcctgtcgtggaagccgccagatttgcaccggaggcggacgccccttcgtatcagccagcagatgctgtcaaagagccgcaggtgaccgatgacgtttcgacagggcagggaaagttggccgccactgccgcagaggagcttggcccctcacccgacgcccaggctcgagaggcagcgcaagcgtcactgcattccacgccccgctctcgttggcccagggtcttggccggcgtagtggcggtggcattggtcgtgggggcgatctacttcttacttgggaagagcgatcaggtgccgccgagcacaccgcagcccgtggcaccggttgccactccagccgctcccgagcagttgcccgaggtagtggaagcccccgtggttgtgcctgctccagcagtgcttccagagcgggccgagccagaatctgcgatagagaagccagatccggtcgccactcccgatgtgaaagcgtcagctccgattgcgacccagcccaagccttcgccgaaacgtgcaaccgccccgttgccgaggaaggcacccgcacccgccgccgaaccgcggaacgactggcagcaaaaagccaatgcagacctagacgcttgggcgaagaagtcggggatcgactga

SEQ ID NO: 499615 - DNA, 333 bp, Stenotrophomonas maltophilia
atgttcaagtggctgttcacgcaataccgggagcccggaaaacttcatttcggctcaaagtggctgaacctgcacgggcaatcgttcctcggcagccctgaatcgtttggcatgggccacctgagcgaaggcgtccgccgcactttctactacttgcgcgccgatcgcaggcctccggtcagagacgacgccgcgtatgaggcatggaccaaggatcggctctacgcgagcaaggttgagcaggtcgcagagcgctgggtggccaaggcgggctttctggcgtgcgcgccgctttgcttggtgcttgccgtcttggcgcattggcttcgttga

SEQ ID NO: 499616 - DNA, 828 bp, Stenotrophomonas maltophilia
atggagatggacactcaagaatccctgttgcgccttttgcgtcccctggacctccaacgagcggaggccttggcggccgcgctcgctcgcgaagccggcgcatccaaaggccttcacgattcgcaagtgttggcgcgcgcccacgccctgagcgttgcccctgttgagggtcggttgggcggtctggtttggcaggtgcgccagcgggagcacgatgatgtgccccaagtggacctgcgctggggcttgcatcgcctggggttcgacgcgcccacgcgggcctccacccgggacctggtgcgtgcttacgggaggcgcttggcagaccgtgacgagccgatggtatacagcaccttggcagagagggtggctgggttgtccatggcagagcacgtctcgctcttccaaggcatggcgatggcggtggaggaagcgcgggcacggaagtccgatgcaaaccggttgcgggagaacgcaccgtggcagggctggctcgtgggggcgtcccgggcgggccacgaagcagcactgctggcctgcatcggcatgggcgcggacgcccggttgcccgatgtgagcggcaacacgcccctgcaccacgcggcccggtttggtcacgcctcgctggtcacgcctctggttgaagcgggctccgacgtggcggccctcaacgcccacgggtgggcaccgctccaccttgccgcccttcacaagcacgcccgggcctgcctccacctgatggcccacggcgccaatccagagcagccagggtggcgagggcggaccccgacgcgcatgcaccgacatgagcaaacccaagccctttga

SEQ ID NO: 499617 - DNA, 1872 bp, Stenotrophomonas maltophilia
atgagcaaacccaagccctttgatgccctgggcgacgtgcccggcagcgttgcgccttcccagccggtccgatactggcaccgcgccgttcttgcctgtgcattcgtctttggcttggtctacgtggggagcatgggcgttgcttggctcatcccgaatcccgatggctcgctcatccgtttcgccgatgccgtgaaaggcggtctggtcaccgcctatcacttcctgaccgtcggcatctcggctcgcgctccggcacgggagttcatcgaactggtggcctatcaccacccagtggcgacgtggacccgcatcggggcgtcgcttctgctggcggcgggccttggccttcgcatgttcctcaaggcagctgagccagtgagcaacacctggcacctggccggaccgcggctattggaaggaaaggaggccgtggacgaagcccggcgccgctcggtaactcctaaagacgccgaggcggatcccttcgccctgtccctccatccggatctgttgttgccaaaaaagcattgggcgcgccatgtcctgatcaccggctcggtgggttcgggcaagagcgtcatcctcaagcacatcctggaacaactgacgcgaaagagggacgcaaagctgttcctttacgacatcaagggtgatttcacgtcgattttcaaaaggcccatcatcgtgtcgcccttcgatgcgcgctcccacgtgtgggacgtcgccgccgacgtgcggaccccgacccaggcggcggcgttcgccgcctctctcatcccagagggcgacgggaacgccaaattttggagcatggccgcccaggacctgttgatcgggtgcgtgcgcgaactccagaacacccggcctggccagtgggggtggcccgatctggcggccttggtgcgccgcccggctgcagagatggccgcaggcatgcgcccgcattacccccgcggcgccgcactggtgcgtgatccggagagccaaaccacgtccagcgtgctgtcttccctcgggggcttcacccgcctcatcgacgacctggccaccgcatggcccaaggttggcaagcgccgtttctcgatgaccgagtggatacgggacgactacaccgggcgcaagcaggtcatcgttcaatccggacccgacccaaccctgacgaaggcctacatcgccgccatgatcaacgtggccgtgccagatctcattgggccaggtttgccggacaacgagggcgggcgtgggctctacttcgtgttcgacgagctgaccagcgccgggcgcttgaacatcgatcccttgttggcgttgggacgcagcaaaggcgtggtggccatcatggcggtccaggatcactcccagattgagttggtttatggggacaagaccgcccaggccttctcatcgctggtgggcacccacgtggtgtgccaagtgcagatgggggcgacccgggacaagctggccagccagctcggcaagcggagaatcgcctggcgtgggcacgaagacaaggcccagattcacgaagagagccgcgcgttggtttccagcggtgagctcaccgaccggttgggtttccgcaaaggcaatcgctacggttccgagaagtggggcatcgaggcgatcgtccaaatgggcggggacgtgctgttgctgacgtggcccggcaggagccatccaacggttcgcgaagggcaggtggccgccgcgtggaccaccaagccggccggtgtggtgggagaagctgaattgccccctttgaccggtgacgcgttggccttcccaaccaccgcagaaggcatcgacacggtccagcgggtgctgaccatgacacccgaggaaatcgacgcgcttttcaagcggtga

SEQ ID NO: 499618 - DNA, 2829 bp, Stenotrophomonas maltophilia
gtgatcaattgcacccgcatcgatgcccgcggccacaacaagcgcaacggcaacatgttcgactacatgctggccaccgagcgcctgtccatcgatagcgccgtggcttactacgccggcagcggtcctgatccgcggcagacgctcaattggggcggcagccttgccgccgaactcggcctggaagggcagccggttacccgcgaggtgatggaaaagctggggaagggcttttcacccaccggaaggccgttgtgcaaaaacgcgggcaaggaggcccgattggtcatcaagacggatcgctggggaaacgtgcggttggacgacgacggcaagccgatggagaagtgggagggcggccaccgggtggggttcgatctgaccatttccgcccccggggacgtgagcgtggcgtttgcccttgcggatgaacgcgagaagctggccatcttggaagcgcaccgccaggcctgcgccgtggcgatgcgctacatcgagagcaaggtagagacccggcgcggaagagcggggaaagacgttatagacacccagggattggtgtgggcagccgccgaccacgtcagcaacaggaacgtgcagtgcgacctgcacacccatcacctggccttcgggatctccaagggggaggatggccagtggggcacgttcgatgccatcgagatctaccgccaccgccacgccgcggatcacctttacaaagtggagctctacgccgcgatgaaagcgctgggctatgggattcagcgggagcgcgaggtggacgtgatggggcgcgagacgggccagattctcaccacgattgccggcatcgaccgtgagctggtgcttcagacgaagacccgccgccaggaaatcttggactacgtcaaagaacaccccaacgccagccacgacgaggcctgcaaggccacccgcaaaaagaaggaagaaccgccgttcgagcaggtggtcaaggactggcagcaaaccttcgccaacattgctaaggaaaggcctgacctggttccgaccacccagtcgcttaagcagacccaaggccagcacctggacccgcatacctttgacgaggtcttgcagcgcatgcacgagaacgaggcgatgttctgcgagcatgacctggtccgggagctggggatggagttcgccgggcaaaagaacgcggaggagatcctcaaaatggtgaaggagttcaccgaacaggacgacctggtgcgcgtgaaagccgaacacctccacaaagacgaccgtggcactcgtttggcacgcaagcaccgggaggatcgcttctgcgccacctggatggtcgaatgggaagccgagatcatccgtcgctcgaaggagcgggagaacgagacggacctgaagctgttccgctccaccgtagaccgggagatcgccgcctatgagaagcgaaaggggttcaccctcacagaggagcagaaagccgccatcggtcacctcacccacggcactgccggcgtgggggtcatgtcggggttggctggcaccggcaagaccaccgtggccgaggtctacaagcagtgcttcgaagccgaaggaaagcagttgatgggcttggccgtgtcgggtaaagccgcggctaagctggaagaagagtccggcatgccctgcatgtcggttgcaaagttcttttcccagctccggcagggcaaggttgctctgacgaagaatgttgtggtggtgctcgatgaagccggcatggtggctaccgatgacaccttgaagctcatgacctactgccagggggtgggcgccaagctgatcctgcaaggagacagtgaccagcttcagcccatcgccgcgggcaacggctttgagctggcgaagatggccttgggggacaagaagctgaccgagattcgccggcagaagaacgccggtgacctgatcaccgccaacagtttctacgagcgggaccaccaggggaaggtcaaggacatgcgccgcgggcaccgcagccgccaaggcacccttgatatgggtgcgcagacccttcgcaatctcaaggagggaaattgcatcgacgacttcggaacggaaaagcaggccatcaaggcgttggtggacgactacctgaaagaccccaccccgatggacgagaagttggttctggcccacacgcgctctgaagtcaaagcccttaccacgggcatccgaaaggggctccaggagcaaggcgtgctggacagggaggaattcaccttccgctcgatcgtgaaagggcagtgggaggacctgacgctctcccgccgggaccgggtgatgttcaccgcgaccaacaacgacttgggtgtcatcaacggcaccgagggcacggtggagagcattcgaaaggacaagtccggcggctacgacgtggtggtgcgcatcgagggctcgaatccgaaggagaatgggcgcatcgtgcaattcaacacgagcgaacacaatgccttggcccaccggtatgccatgaccgtccacaaggcgcaaggacaggggaaatccgaggtttaccacttggccacgaacatgggcatgctcgatcagcagtcggccttggtggcgttcacccgcctcaccaagggcagctaccgcatgtatacgaccgacgagatgatggagcgcatggccgaacggctgggcaccgaacggcacaaggaaatggcgctgagcgtcggcttgtccgagacccaggctgctccggtgcgcaacctggtccaggacgtagaagagctgttggcaggattgaaaccgcaacctcaggtgccagcggtgaaacaacgcgggatcgcgcttacccggtga

SEQ ID NO: 499619 - DNA, 456 bp, Stenotrophomonas maltophilia
atgacccagcaccacaacctgggacgcagcgagaagtatcacgccctgccccgcaccctttacgccctgttgttcgacgacgggggatgctacgttggccaaagctcgaacccgcagcagcgggagaagcagcaccgctcccccaaaggcggctggcaccgtcccttccggttccatgcgctggaagtggtgaccgccaccagggcggaagccgaagtgtatgagcaggcgtggcgggtgagggcctcccgggaggggtggcgcatctacgccaagccaccggggatcgtggtcaacccccaccggcgggccacggcccacgtgcgcgggttggcccaccaacggcggtggcagctgggaacaccggtgaaagccccctccgaacacgtggggtggtggccgtggattgcggtgggggccattgtgttgctgcttgctcgttgcgtcaccgggtaa

SEQ ID NO: 499620 - DNA, 177 bp, Stenotrophomonas maltophilia
atgaaaaagaagaatgttgtaagaaagacaattgaacgctttaagagcacgatttatcgcttgaagaagcatccgcttggtgtcgctatcggcgtggcacacgaagtggtgtatcagacgaccattgcggtagcggctagccagctgcccaccgcacacccggtgaacgcgcgttga

SEQ ID NO: 499621 - DNA, 339 bp, Stenotrophomonas maltophilia
atgaggaagcggtccaccggattgcttcccttttcggcggagagtgggggcgaacgggtcatctgccctgatcgcgccggtttggagaagatcgagattggcgatcccaagggcggcaaaaacggctggatccgttgcaccgcaaggggtatgctcatcgcgggcacattcaagggcacctcccagattcgtgaaacccaagccgtccaaggggtgagggcacttctcaaggaagtcccactctctccgccaagaagttcggaagagcccctggaagcaggggcttttctgtttctacggcccttgctggccagccatccggcaaccaaggtcaggtga

SEQ ID NO: 499622 - DNA, 1914 bp, Stenotrophomonas maltophilia
atggccaacggtgttgcgacgaaggcaggtgcccgccgagcgggcttcaagtttagtctgacccacgcgcaggtgatgcagctttccaccggcgtcgtgcctgaggtcgttgggggcgggcggatcaagttggttccccgtcccaaggacgacctgggcaagccctacaggatcgtggacgccagtcagggcgcccccgtgggtttcggcttctacgtgggcaagacgaaggtgacctacgagatggtccgccgcggccccaacggggtgcgccgcttcgccctgggcaacgtaacggacatgggcctggccgaggcccacgagaaggcccgggagcaggtggcgattctgctgagcacgggcgagaaccccaaggtccaccaggccaaggccagagaagctgcccagagcatcaagcagctggcgaaaatcaccgttcgcgagtgcatggctgcctatttggcggacatggaagagcgcctggcccaggggcaggtcaaggcgaacagtgtggaggcgtatcgggacagcatggcgcggttagctcggccggaggtggcaatggccgaccgggtcgtcaaggaactgcgcgaggcggatatcaagacggcctacgtcgcgatgcgaaagagtgccatggtccgctccaaccgcatccccactcacatgagagccgtccttgaggactataaggactgggcggagctcgacaccgccaagctcgaatcgttgggcatcacgggcaaatacatccagcgggtgaaagccgccggggtggccgcggcagagcacaccttcaccgacgcctaccggggcgtgaagcacatactgcgcaaggagctggagttggccagcatcgaggggcgtcccctcgttctgtcctttaacccgttctcagtcgtcttcagcaagaagctggtgcgaggcgcgagggaactgcggaaacactacgaacgggctgaagtccgtaatcctctcgatgacaacagcctccccaaggtgctcaaggcaattgtggcccgacgagacgagcagggtggtcacaatgccgccgcttcggactatctgctgctgacgctgctctggggatcgcgccgcagcgaagcggtgcaactgcgctggttcgatcgctgttccaagggcgagctgtcccagcgggaagtttcctgggtctggctgggtgcagcggatgcggtgaatccctacaccggccgaaccggcccgcaggtgttcatgagcgacaccaaatcgggcgagagccgattcttgcccgtgacctactttgcggagcggatcctgcgccgtcgcttcgaaggccgtttggacgacaccacggccaagaaggaattagccgccgctcggcaactgctggagtcagcgcgcaagagtggtgcgagcaaggccgtgatcgcggggctccaggaggccgtggaaaaggcggagctagaggttcagcgaacgaaatatgtgtttcccgcccgctccagccgaagcaagtccgggcactactccgatagcaagtcgatcctggccaatgtgcgccgggatgccgggctcattgaccttcgggacgaagtcgaccaaggcctgaccacccacgatctgcgccggaccttgggacgctacgccggcctccacctgggagacagccgggtggtctcccagatgctccaccaccacgtgtcacagccggacgataagggcatgtcggatgtgagcttgcgttacaccgaccaggagtggaagcgtctgcgcgaggcgttctccgaggtggaggagttgatggtcgccagtagcccccgggtctggaaccggctcaagggcgtggacaagccccggctggacgagtcgcgggacgaaccggttaccatctttgctccccgcaaccagatcacggcgctggatgacgattga

SEQ ID NO: 499623 - DNA, 780 bp, Stenotrophomonas maltophilia
atgacgattgaacttcaacgcaccgaagaacaatacctggcgctgcaggccacggcggtagaccgggagttggaacgggccgcggctggcctgccgcctcctacggtgagcaccaaggccgcggccaagttcctgggcgtccatttcgacacgctgggcgaatggcggcggcgctcgcctcccctgggccccccgtttcaaaaaggggtggggcaggttggggcagggttgaaccagcacgtccgctacctctacagcgacctcgtcgagtggcagaacgcccggttgggtaagtcaccgaaagaacgccgcctgcagaacgacctggatctggcgcagcagcgcgtgcgcgagctggaactggagctttccctccgccaggcaaaggaagaactggccaagctccagaagaagctgggccgcatcgcgaacctggccaccctttcggacgtggcggtggtctcgcacgactgggcgctgcttggggatcgcattgcgggccatgtcctggccgtggacgacgccacgctcgctcaggccttggccgagggcggagtatgggagggcaccgtggaagttgccttggcccagccctggatcaacaccgagagccgacagccctaccaggacgcgttcctgggcgtcctcgccgcaacccagcatgccatcgaggcgtcacggtcgcgccaacgcgccagtgatctggaagagcggttgagcggcaatgtggtggaaggcaacgcggtccggccgtttgagaaagggagcggtcggctttga

SEQ ID NO: 499624 - DNA, 555 bp, Stenotrophomonas maltophilia
atgggtggacggcctggccgttcgcggaaggtgcctggcccacttgcgttgaccgtcaccgaagaagaagagctggccaaagcgaaagcaggcgcgcgcgaatgggtggggccaggggtcgcggcctacatgctgggcatctccaaggatgcactgaagaaacgtcgtcaacgcaacgaagggttgatcccggagcaccggcaagcgaaaagcaatcgccagggcgcgcaataccggtggtcatcggtggtgcgatgcgccggtgccgaacgcattcaatccgacgtcttggcgcagcgcctcgaggacatcgtggccgcgctgaagaaacgtggccttgaaggcctggagcaggaccttccctgggcctacaaccacacccatcgcctggtggggtttgcgtcgcttcatccccagttgccagcgcgtgcgcttacggtgcttgaagctcttgatgccccgtgggtgagctgcgaagcacgtcagccgtttcatgactgggtcatgggcgtgcttcattccgccgccgagagcgccgcgaaagccgccgactaa

SEQ ID NO: 499625 - DNA, 654 bp, Stenotrophomonas maltophilia
atgcagtccaatgttcttcagttcaaaccggaattgcgccacaagcgcctctcagcgcccaaggccgcccggctcaccaccgcttgctacaaggcctgcgacaaagaccactcgaccgtcgattggtataccccgccggtcatcgtggaagcgctgggtggcaaggaagggtttgacctcgatccttgcacgccggaagacccgtcccgtctgccggcaccaacggcccgccggatgatcccgcccagccaggatggcttggcaacggattggtggcccttggctttcgtctggttgaacccgccctacgggaaggggatggacaagtggatggccaagctggccaaccaccccggtggcggcgtcgcgctggtgccggcgcacatggatccgggctggatgcacgagttcgtgctcaaccaccccaacacgactgccatcctcatcacgcgtggccgcctgaagttcatgcgtcccgatggaaccaccggaactgcggcgccgaccgggtcggtgttcgtggcctacggccaacgggcggcccgaaacctcaagcgggcgcaggaagacggtgtgctgcgcgggaagttcttggccatccagcgggtggcgcgggtggccaataccaatcaggggagtgccaacgatgagtaa

SEQ ID NO: 499626 - DNA, 816 bp, Stenotrophomonas maltophilia
atgagtaagcaaactaaaaacagctatgaagcgaagctggaagctcgccgatgtgcgctggaggaacgcgcaaagaaggctactgaatgtgcgaacaggtattgggagcaagagcgcgaactggggaaaaactttccttccgggcagccggtccttgtgggtcactactccgaaaagcgtcaccgacgctacattgaaacgctgagaacgctggaccgaaaagcaattgccgaggagagcaaggcgcagcactaccgcgagcgtgcagttgccgtgggtaagggtggtgtttcaagcgaggacccggaagccgtgtcgaaacttgaagagcatctgcgtgagcttgagcgccaacaggtgatgatgaaggagttcaacaaggcttatcgaaagcacaagtcagagagcgatttgagggccgctttggccgggaagcttcccattgaggctgtagagagtggtttggcgcttgacagtttcggcagggtgaagttcccgtttccctcttttgagttgaccaacaacggcgcgaacattcgtcgcatcaaggcccgactggaagagcttcgagcactggacaaggtggagacgaaggaggtggcaggatctggttatacctacgtgcaagatgctgacgatcacagggtctatttcgttttcgatggcaagcccagcgaagaagtgaggtcgctgttgaagagttgtggttttgtgtgggcgcccagccttggggcctggtcacgaaaactgtctgccaacgcgatggcaagtggacaacacttgcgaacaaggctggacgcgatgatggcgagctaa

SEQ ID NO: 499627 - DNA, 1863 bp, Stenotrophomonas maltophilia
atgtctaccaacaatttgtctccgaatggggatgctgtcaaccctccgcccgccgattcgtccaacgtcgtgcccttcgatgcggctcgattcctcggtgctgaagcgtcgcagaggaaacagaaagtccaggtcgaagaggacaagcagctctaccgccactcggtcgatcgagaaggtcagcgcaagccaccgtctctccccatcctgtttgcccgccgcaccaccgaatgcgtcgatcgtttgtgggcttgccaagccaccagcgggacgggcgagatcgtccaccactggaacggcacctactggcaggcgatcagcgatgcggaaggcgtgggcgtggcatccgactggatcgaccgcaacgccgattttgccggcagccccaagctcgccaaggactgctgggacatggctgccctgcggctgcgccagaaaaaccccatgccgacccaagccaagcgggccatcgtgccggtggccgacggctacgtggaaatcctccgcgacggcttccacgtgctcgcacccgacccggccttgggcatgacacacgcggtcaaagtggcgtgtggtggcaaggagggccaagcctacaaacctaagtccttgccggccgactcgcgctttgccaagttcctcagccaggcccacgacgaccctaacgtgatcgcgttgctgcaggaacagtgcggaatgaccctgttgccgggtgtctacagccaggccgcctggtggcacggtgtcgcaggatccggcaaatccaccctggcagaaatcgtggaagccatgcatcgccaggtggcgcgctgcaacctggaaaccctgggcgaccgcttcagccttgaacccctcatcggtgccagcctcatcctggtggacgaggtggagtgcgagaagtgggccgaaggccggttcaagaccatggtgtctggcaatggcattggcatcgaccgcaagaaccagaagcagctggcgagctaccactccacggcgaagtggatcatcacgtccaactcggcgcccttcatccgggacaagagcaacggcgtgtggcgtcgcctgacgatcgttcactggaagaaggcggtgcctcagcacgagcacgatcctgatctggtcaagaagattctggccgaggaagggcagctggtgctggactggatgctcgaaggcgcccgtcgcatcgtggcccgtggccgcgctctttcggagaatgatgcggacatgcctgaagccgtgcgcgccgccaagctggccgcccgccacggcagtgaccaggtcatggcctgggcgcaagccgagcgcgtggtgcgcgtggaaaccgacgaatgcaccctgccgatgcgcgaggtctacgagaactacaagaactggggctaccgccaagggctggccgatatcgatctcctcaccggtcgccagttctggcgtggcctcaaggagatgggcctggacgacggggtgcgctccaaccgccgcgtcaacggcaagcaggaagaatgcgttcggttgcggatcaacggagcggtgttgcaggccgctgtcaccaagccctctgccagcgtcacggtgatgccggttccgggagtgggcccgacgatctgcggcccctgggggacggaccccaagctcagtgagaagaagaagggcgagcaccagcaagccctggaaaagaagtgggatgcattcagcaccgacgagcggaacagggaacttgccatgctctacggtcaagcgctgattgaagacgccacccatgaggaacgccggaagatcgatgccgcggtgcatcgcctcttctatcccgaggtgaccgaggacgagatgtcagtggcgtccgttgaagtggaggccccatga

SEQ ID NO: 499628 - DNA, 1110 bp, Stenotrophomonas maltophilia
atgacgacttcccctgatcgccaatcccgtctggcccaggccgccaaccagggtgacatcgacgaatgccgccggctgctggcagcgggcgccgaccccgccttcgctgacgccgacaagttcaccccgctgcatgaagcggcccaaggaggtcatccggccgtgtgcgccttgctcatcgaggcaggcgccccactggacgcggtcgacaagacgaacaacacgccacttcactatgccgcgcggttcaaccatcccgaagtggtgcgcaccttggtgaaggcaggggcagagctggagcgtccagccttcgaaggtcggactccgctgtgccaggccgcgctctacggttccaaggacgcactggaggccttgatcgaggtcggcgccgacgtgaacgcccgaatcgaccacgtcaccagcaggagcgagtccggcaaaaagctgggctatctgaagctcgacatcggcgtggcagtggagacccagttcagcggcacgacggcgcttcacctcgccgctcaagccggaatgaactgctcaacgcccaaccgtcccgaccacctgggttgcgcggaacgtttgctcgcggcaggggccgacgtgggtgcaaaggatcgaaccaccgaaaccctgaagaacctgcttcccaccggggacgtgctccattcggccaccgctctgatcccactcaactacgccggcacgatggacatggccaaactgctcgtcgctcacggttccccgttgaacgcctcccactcacccttcgccagcgcggtgggtgtgctcaagggccagcaaggcttggacatcgcggcctttctgttgaaccagggctacgagccgaacgaccgcgatctggcggtcatggcgaaggcgggggtggaagagggggcggtccaccatcgggcctacgagatgcgcgccaccgagcggcagaagcacctgcaagaacggttgaaccaggccccatccgcggctccccgtgcgagcagcccctccacgccttccctggtgatcggcggtgcagtctggaacgccgctgaggacgtccgagcgcaaccgttcgctgcccagcatgcgcatcgtcagcgaatgcgcttgtga

SEQ ID NO: 499629 - DNA, 216 bp, Stenotrophomonas maltophilia
atggactattccgacgccctcaacgaaaccgccctcgatcgccaggacgccctggctgcgtccccccgtttcgtggtcctgaagacccccggcggcatccgcctccagctccaagatgacgatggggaccccgacacgcggctgaccatcgaccgagcgatggcattgctggagagcgcgttggaacacggacgagccgtcaccctccacggttaa

SEQ ID NO: 499630 - DNA, 1026 bp, Stenotrophomonas maltophilia
gtgtccgattcaaccaatgagagcttcctccagcgccactcgcgtgacgtcgtcgaacgcctgatccgccagatggaggagggcaccggccccttcgtccagccctgggatgcccgcatagatttggggctgccgatgaaccccacgaccggtaagacctacaagggcggcaacctgctgcatctctgggccctgcagaccgcttgggacgtgagggacaaccggtggatgacctacaagcaggcctcttcagtgggtgcccaggtgcgcaagggcgagaaggccagcgtcatcgaattctgggactggtcaccggttgaagaagcgaagaagagcggcgatcccgagctcatcgccaaggcacaccccaaggtgttcttccctcgcgtgttcaacgccacgcagatcgatggcttgccggaactggtgctggcggcgccgcggcccgacccagagatccatgaggcctgcgagaaggtcatccaggacagcggggccaagatccaccacgacggcggcaaccaggcgttctaccgcccgatgaccgacagcatccacctgcccgagcgcaacgccttccactcggccagcggctactacgccaccgcgctgcatgaactaggccactggaccgggttcccctcccggttgaatcgcccgatgaagggcggcttcggctccgttgactacgccaaggaagagttggtggcggaggtctccagcatgctgatgggcgaacgcctgggcatcggccacgaccccacccagcacgcggcctacatccagcactggatccagatcctccgcaacgacccgcgggagctcttccgggctgcagctgcggccgagcgggtggtcgagttcctgaaagtgcccgagctcgtccacgaacccttgccgaagattgagcgggagcggcagcccgtggcagtcaatcagcaggagcttgaaaaacctaacatcgaaaaggctcgcaccaatgggcgttcgaagatcaagcagcgggaacacgtcatggtggcgtga

SEQ ID NO: 499631 - DNA, 837 bp, Stenotrophomonas maltophilia
gtgaacatcgagcaacgcagaaacgaagtcgttcggatggcagaagaaggtaggtcagttcgggaaattgcccagtttttcgatagatccgtagttgcgatctatgcagacctcaagaccatgggtgttccgagcaatcggtctatcaataggaaatcgatcgagacaaagcggaaggtggacgagcgattgaagcagggtgttaggaatcgctcaattgaaatggagtttggtctatcaagctcctacgtttcgtggcggcggagaaaacttggactgaaagtgcgctatcgctcgccgccagaggttgtgacccgcagaagggcgattgttccagctttggtggcgcaaggactgagcgaggatgcgattgcaggagccttgaatgtcggacgtcaatcgatcgcgcaggacaagagaattacgaactcattcacgcggtgcttcaggaagtcgattgacatcggcgtggctgatctggatgcatgggttgctcaaggaaagagcctcaaggagttggcgagccatcgcggggttgagttcggccgtctgatgtatgcagtgaataagctgggttgggtgcgtcctggtccatcacggccaatcccagaagaattgcgaggcgtcttgcccagcctctgcggtccggagcgcattcaaggcctgatcgatgaaggacactcactcggcgaaattgcaaggcaccttgggttgagcaggcaggggctctccgactactgccggcgaaagaagttgaagaccaagcgagtttttaattggcgacgctcacgaaagatggtgaccacttgcggttcgcccgattcgagttatgcatag

SEQ ID NO: 499632 - DNA, 558 bp, Stenotrophomonas maltophilia
ttgaaacccatcgttctcgccatcgcactggccgccctcgtcccctcggccttcgctgccgacaacacctcctcacaccgctacggcacctccgaagccctgtctgtccaggacgcccgcctaggcgaggtgctgatggtgcgtcccgtcaagctcaagagcgacaagaaggtcaacgccggttcggccatcggagccgcggtgggctacggcgcgacccgcaaggtggacggggactaccgcagcgccgcacgtgtcgctggtggtgtcatcggtggggtcgccggcacggccatccagaacagcttctccggccggcgcgcggtcgaaatctacgtgcgcgacgtgagcgacaaacgccagcgagtcattgcgatcgtccaggacgccgactcggacgtgcgccagggggatcaggtgttcctggtggggaagggcagcaagactcgggtggtgccaattccgcacgaggagatgccgcttgaggtgatcggttcatgccttgccccttgtggcactacgccaatcggtttcaccagtggcagcgaggccaactga

SEQ ID NO: 499633 - DNA, 375 bp, Stenotrophomonas maltophilia
gtgagctcacttcttctgttggttttgttcggggtgatggccatacctgccttcttcattgtgccaatcctggtgggccgcggattggcacaaaccatcacttacgcttacctggtcttctcgagcgatgcgccttcctcgctcaagccatcgtatggaaaaggactcatgacgttatcgtggagggtggcggttgatctcctgcgccttctgttcgtcttgttcgtcgtttcatacttcgcctttcaggcgattgcagtgggaactacttacgctttcatcgcggtcactttcgcggcattgatgtttttcacgctcttgatgatggccttcagcgccaccatgagtgagcctctccgcagcgttgtccgatga

SEQ ID NO: 499634 - DNA, 384 bp, Stenotrophomonas maltophilia
atgatgaatagaacaccctcccacggccatctccgccccgacccggtcgacctgcgtgacccatccgatctcctgttcgaagccaacgggcagcgcgacccactgctccaggccctctacacggaatcgctggtcaaccgccgggacgtggacaccatcgaccgtctgctggacgcccaccgactggcctatggcgagcccgagcaggtggcctacgctcagcagcgggatgtcctacatgaccggccattgcccttggtgagcagcgattggtgcgctgaggatgctgacctccagcgctacttggaggaacaccgcgcctggaatccggtcacccagagggagcgcgagcttcaggaccggctcggggtaggcagcgcatga

SEQ ID NO: 499635 - DNA, 507 bp, Stenotrophomonas maltophilia
atgagcctgtctgcctaccgtgtggctatgaatgacatgcgagcactgcgacgccagacgttggccagggtattccgtcccgggatgacggccattgaggcatcgcacgcgctcgctatggaacttggctacagcttcactgacacaaccattcattccgacctgaaagcgctcgggctcacgcctgtatcgggcaccgaacggatgagggcgatgaccaaggctcgccgactggaggtgaagaatggtgtgctcgcgggtgagtcggttcagtccctggccgagcgattgagggttccggtgcacaccatcaaagccgactgccacgtcctggttgaagccggggatctccccgccgacatgcttgcgaggggtcgagtccaacgtcgcctggccgcgatgacggcggacatggctcgcttggggccggaagcccgagctgcctatgaggccttgtgggaagcggtggcggacgatccctatgggttgcctgggagctccccatga

SEQ ID NO: 499636 - DNA, 276 bp, Stenotrophomonas maltophilia
atgaacctcattcgtagcgccgcgtcctggtggaacgcacgccgaagcccttcgcttcaaaggacattcgacgagcagcagcgcaaccttgataaggagcgttggcggaagaatcgtctggctcggggctctgaaaatgcaccgggctggttcaatcgcggtggcattgtgcaggaggtgctttattttctgcttattctcaccgtcattgggctgcgctatttcgtcttcttcatggcggccctactggtcctcactctattcttcggtcgctga

SEQ ID NO: 499637 - DNA, 501 bp, Stenotrophomonas maltophilia
atgaatcgcaagtccatcctccgttccatccttcccatcgcgttggtcgctctggcggccccggcctttgccgacgacgtgaccgacaacctccagatcaccggtcaggtcatgccgggctgcgaactccagatcaccccgctgtcggatctcgagatccactcgttggcgttgtcccagacggctgcctcgccctcgggcattggagcccgctgcaacaccggcaccgcttacgacatctcgccgggtgacggcctgaattacggcctcaaccccgactaccccaaccaccgcgccttggccggtcctggcttctacctggcctacacgctccacaaggacgcggtgggcggggaggcttggggccctggcgccgaccagatctcgggcgtgggcaacggcgactggcagttcatgccttactccgtggtcttcttgggggccaacaaggccaacaacggcttctacagcgacgacatccaggtcaccctgacttactga

SEQ ID NO: 499638 - DNA, 684 bp, Stenotrophomonas maltophilia
atgcgcttcagttttcgtttgttcaccgcgctgctcgttgcagcctttgtttctgccccttcggcgttcgcctcccgcgtctcgctgacgcccaccaccttgctgggcgagcccgccaccaaggctcacgccgtcacgctgttcaaccttgacgatctgcctgtgagctaccaggtcaaggcctatcggtggacgcagcaggacgggaaagatcagctggtggaaaccagtgacgtcctggccgcgccctccatcgttgagctcccaccgaaagggcggcgcgtcgtgcgcgtgattcgggtgagcggccatggggcggtgggctactaccgcgtcatcttccagcaactccccaaaccccgctcgggaaccggcacgggtgcgaacgtgtcactgctggtgaaccactccattcccctcggcttcgaaacggggcagcccgacgtgaggttaactgcgtcgttgtcgccggacggttcgggcttccgcctgaccaataccggcaccaccgccgcgcgcgtgaccaccattgggccgtcctccggccagtcgtggcgcgaaggcgcgctggggtgggttctgccgggcttgagcaaggacatccccctcaagccggaacaccgttcctcggcgttgaccctgaccgtcaacggtcagccggtctcgctcaccgtcgccccttga

SEQ ID NO: 499639 - DNA, 2199 bp, Stenotrophomonas maltophilia
atgcgccgttggggagtgctgctcgcgatttgcttggctgcgcactcggccggcgctgctgtgccccagggcgtggagcccagcgtgctgctccccaccgttggcggcaaacctgcgaaggagccggccatcttctggcagcaacagggccggtggttcgccgatgccaccacctggtctgccttgggcgtggtgttgaaggaaggcgagagcggtccgctgtctgctcaagcgttgggcgtggtcctggcggtgaaggaagaggacgccaccgtggccatcaccattccccccgatcgcgcgccggttcaatcggtcaagcgccacgaaacgaccggcgcactctcgcccgcggcgccgggtgtgctgatcaattactcgctgtccggccgggctaccgaacaagcccagggcgcgtccctgtcccacgaggtgcgcaccgccggacggtggggcgtgctctccaccaccgggcagctcaacgtggattcaacgaggggcggggagtatcgccgcggcatctcgcgttggcagaaagatgacctgtcgcggttggtaacctacgaagccggcgacgtgttcaccggaccgccgtcgtcggtggtgaacctgggcggtgtgcgcatcgccaaggaccccaaggccctcgacccgatgacgcccacgtatcccatccccacgttgggcggcttggcgttggatccgggcaccgtggaggtcatggccaaccaagcccgcgtgctccagcgggacgtggagcgcggccccttcgtggtcgaaggcagcccgctgtcggccggtgcgaaccaggcccaagtggtggtgcgcgaccgattcggccgcgaggcggtggtgagcgatcagcgttactacatcgcgcccaccttgctgcgcccaggcctcaccagctgggacgtggccgtgggccaagtgcgcgaggacgagaaccgctatgggaagaccggtgccagcgcctcactggcctggggcgtttccgatcgctggaccctgcgcacgaacgcgcaagccgatggggaagggaactcgaacctggccctgggcgccaccaccacgttgggcaccctaggcacgctcgatctggaagtgggtcggtccagtgggggcgggcggcgcgtggccgccgcttacgattaccgcggcccgaccttcggtgtgcgcctggagcacgagcgcaacgaggactactggcgcttgcgtcccgaacgggcggccgacgcgcaggagcgcacccgtgcgtccctgttctggcgacccagccgcgacctgtccctgcgcgccggctacaccgacctgacgaccgaccgggcccgcgtcactttcgccgatgtgggggtgaactggcgcaaggggcctcaccaggtcggcgccagcgtgctgcgcgatatcgggcgcggggacacccgcgtggaagccggctacacctacgccttcggggccaaccgggtgggcgtgagggcacgctcggcgcccaatgccgatgccctggcgcttcgttactccggccggcccacggtcggcgacaccccggtcagcgtggccgcggaagtggagcggggcgagcgcggcaaccaagtgagggcagccgcttcgtggaacacggacaccggcatggcccgcctcgacgccggcaccgggcacggcgtgccttacgtcagcgggggctacagcggagcggtccacatcgaccgcaagggcgtgacgttcctgcgacctgcgccccagggcttcgccgtggtggacgtgccgggccagcccaacgtgcccgtcagggtgggcggccgggtggtgggccagaccgatgccaagggccgcttggtgaccggcgacgtggcggccctggtgcccaccgccgtgcgcatcgacgacaaggccctgcccctgggcacccaggtgggcgagaccgagaagaacgccatggcgggccgccaagccgggatgcacgtggcgtttccggtgctcaccgagacggcgcgctcctacaccctgaccggcgccgccatcccgcccgggacggttgccaccactccgcgggagaccgcccaggtgggcttcgatggagcgctctacctgcagcacgcggagccggggcaggtgatcgaggtgaagggggtctgcaaagcccagctgccctccgaccttggatctgcgcaatcggtggtgtcgctggtttgccagtga

SEQ ID NO: 499640 - DNA, 1947 bp, Stenotrophomonas maltophilia
atgaaatacgaggaactgcccaggtcagcgctgatcaagctgctgcaggaccacgacgctgagcgcgctgaagcaggcaaggacggcattgtcctgaactacaccggtcgcgctgcgccctggcagatcgtgcgccgtgttaagccccggatgtgcgaactcaacaagcgagcaaccgttggcaacgctgctgaggaagtcgccaatgagttgtgggacggcgaaaacctggcggcaatggtcacgctctacaagtatcgcggccaagttgacctggtgctgaccgatccgccttacaacacgggcgaagatttccgctacaacgacaagtgggacaaggaccccaacgacccggatatgggcgagttggtggccaaggacgatgggtcgcgccacagcaagtggctgcgctttatgacgccgcgcctttggatgatgcgcgagatgctcaagcccggcggcgtcatcgccatctgcatagaccaccgtgagctatacaggctcggcatgctgatggacgaaatcttccacgaagaaaaccgcctggggatcatcaattggcaaaaagcctcccccaaaagccagtctacgaaggtttctttaacaactgagtatgtgctcgtttatgcgaagtccgcacaacttgccaagacgggcgaagtcgagcggactgcattgtccgatgcaagattcggaaacattgaccgggatccattctctgattggaagcaggacaaccttacgggtaagggtaagagtagattggcagattacgcaatacagtcgccgtttacggggctgttccatgatcccggcgagcggcattgggcaaacaagcggagccagatgcgtgcctgggcagaagaatggggagtcaagtatgaagacatggatatccatgacgggcggggtaaagcactagccttgaagggatggagctcagctaccaccaaagctgccaaagagaatttgatctcgcaggcgtcgaagaaagccagaaaaaggctagatgagggggcctggcccgttctctattggggaaatgatgggctacagaagcctgttaaaaaagtctacaaagcattggtgaagcagggagcagttcctacaacgttctggcttgaggacgatgaagcgcccacagaagtcgattcggtatcctggcttcgcaagatgagcggccgctcccgtgatggaatcgaagagctggacgcagtcgttggcaagggacacaactttgaaacagtcaaaccactgcgcctgataaagaagattatccagatttggtgccggaaggacggtatcgtgctggatccgtttgccggctccggcacaaccggacaggccgtgctggagttaaaccaggagcaagaggccaaccggcggttcatcctgatcgagcagggcaacgacgcgaagggcgacaactacgccaaaaccctaacagcggaccggctcaagcgcgttatcacgggcaagtggaaatctggggatcgcgagcccttgggcggcggcttccgatatttcactctcaaacgggagaaggtggatgccaatgctgtgaacgccttggcccgcgaggaaatgatggacctgttgctggtcagctactgggatcgcaacgacaagaccaagtcttacttgcagcggttgcccgtgggcgagcacaagcacttgttcgccgtgaacaaccgcaatgagggtttcttcctggtgtggactgcaccggaccaaccctccacgctcacgcgggccgttttcaaggagatcgttcaggaggcgaaggctgcgggactggcagggcgctaccacgtctatgcgtctctggcgccttacacaggcaacgatatcgagttctacaaaattcccgacaaggtgctggagcacatcggcttcaacgcccgagcggacgcatacaacaacgaaggtggcatggatgcagattga

SEQ ID NO: 499641 - DNA, 2385 bp, Stenotrophomonas maltophilia
atgcagattgagctaaaacccttccaggtccgcgccgcaaagcagatcgccgaccgctacgcctacttcgctggccacgcctaccgtcccacctacaaggggtcgttgccgcggccgttctatcaggcgctgtccgccattaccggcgctggcaagacccctgtgctggccgaggctgtgaccctgatgcggttgcatatggatgtagagcccatcgtcttctggatgagcaaggccaagtcggtggtccagcagacctacactaacttctccagtggcggtaagtatgcggagatcgtagacgccttccgagtcatccgcgccggccaattagagcctggtttgatcgccgatggcaccacgccgctcatcgtgatggccaccaccggtctgttcaacaacaaggaacaggccgatggtgcactgaacatctacaagaaggatcaggacctgttcggcgaccagtcgccgtgggaacgcctcatcgctcgcgatgctggtggcgtaaggcgcccgctcatcatcgtctacgacgaagggcacaacctctctgagcaacaaacgaagattctggctgaactggagccggaggcctacctgctggccagtgccactctcaagttgcccgccaactttgccaagaccgtgctggtgccccaggaagggtgggtggaagaggcagcggacgagggcgacggacttgagcggtttgcaaagctcaaggcggtggacaaggacggcaagccggatgccaacgcgtttgccatcaccgcagtcgaaagcagtgcggtcatcgatgccgagttgatcaagacctcgatccagttcgacggcaccacggcaccgatggagcgttgcctggacgacctctacgatcgcctgcagctcatcgagcaggagatcgatgcccgagctctagggttcgtgcctaaggcaatttacgtgtgcaaaaccaacatcaccgacgacggcgataaggatgaccacaccaagccttttgagcaccgtaacgctccgcccattcgcatctggcgctacctggtcgagcagaagcaggtggatcctgcgagtgtcgccatctacgcggatttgaagtttgccgagggcaacaagccggaggacgtgaacctgttctccaagggcgagagcgacttcgacgagttccaggccggcaacttccagcacatcatcttcaaccaaggtctgcaggaggggtgggatgatcccgcctgctacctgggttacatcgataagtcgatgggctcgcagatcaaggttgagcagatcatcggccgggtgctgcgccaatacgacgcccagcactacgatacccctctgctcaacagcgcccacttcttcctgcgcgtggacaagaagaacgtgtttaccgagtccatcgaagcagtgcgcgccaaactccaggagtccggcgccgctattgagatcgtccacacctatggaggcggcgagggcggctccgaggacctggagccaaaggaagacttggcagtcgttctccaccaggtccacgcggatgccgacgacgcggtggatgccatcgccgccttggtggccaagtttcccaccttcaaggagggggacaccgacacgcaaggggatgcccaccgcaagaccgagacggtggacattgccaacctggacaaggaaggtgatcaggactggatcaccagtggccacgccaatcgggtgcgcctgcgctggctcgttagcaacgcgattcgcggcaggtcccgggcagccctggccgtggtcgatctcaaggcgtcgaagttcgacgtgcgggtggaggcgggcagcaacgcggccagctacgcggaaagtctcgccaaggagatcgtgaacacttactaccaattgacctccctggtctacgagtcggagcgagagttctcgttcaccacgatgcgcgtgcccaagaaggcaaccgccttcaataacgggctctacgagcgctacgccggcctcaacaagttcgaagccccattcgctgccgcgctggacaaggtgggtctcacttggcatcgcaacccgagcaatgggggctttcgcatcccgctgctgtcggagggcgacagcgcctcgttttcgcctgacttcctggtgtggaagggcaagctcgtgttctgcctggataccaagggcgctcacctgctcaccgatgctgtggcccgtaagctgttcgacatccaagatgagggcaccaccaagctgctcacacgtttcatttctgagggcaagcaaaccaccatcggtgggaaggcgaccaaggatggcttcaccgtctggaagatgaaaggtggatcgccgacaccaatccacgtatccagcatggaccaggcggtaagagagtgcttgaaaccatga

SEQ ID NO: 499642 - DNA, 561 bp, Stenotrophomonas maltophilia
atgacaggattggacgcgcccgaccatcggttgttgggaaagctattcgggtttcccccatgctgcgtcgagttctacagtcagcgggcgggcaccacttttttccgccagcgccaacccggtttgcgggcaatgggcggcctgcgtttgtgcccggcctgttcccgtcttcccgacgaagcgatcatcaacggcatccagtctcgccgcatagcgccgacactgtttcccacggagcctggccccgagcacctaggcgccatcttggagcacccggcctggacgcaggccgagcgtgatctgttgctgactcagcgcaggtttctagcacatcacttggcggaagacgacgcggccgcgctggagttctccaccgccatagcagcagtcgaagcagcctacgcagccgaagtggctcggacgcctgagcggcagccctacctatatgctcagcgtgagctggcgaaggacgaattgctggtgaagctgatggacaagctgcatgcctttatgcgccagcggatcgccgaacaggtgaaatccggagcactgacgctgtga

SEQ ID NO: 499643 - DNA, 1293 bp, Stenotrophomonas maltophilia
atgtcgaagttcgtcacgccacacactcctatgttcggcctcgttgacggaaacaatttctacgccagttgcgagcgggtgttcaatccctcgctgcgcggccagccagtgtgcatcttgtctaacaacgacggctgcgcgatcgcccgcagccaggagtgcaaggacctgggagtgaagatgggccagcccatccacgaggtgccaccccacatccgccgccaactgcgaatcttctcggcgaacttcggcctctacggggacctgtcaggccgggtggtgtcggtgctgcgggagtggttcccgcgcgtggaggtttactccattgacgaatcgttcgtgacgttcgacggtgtgccggcggagcaacgcgaggccatggcccgccaagcgcgtgcccagatcctccagtgggtgggcattccgtgttgcgtgggcatcggtcccacgaagaccttggccaagctcgcgaacaagctggccaagaagacatcgcacggggtggtcaccgctttgcccggttcgcccgagctcgaaacctatccggtggaagacgtgtggggcgtggggcgcaagctcacggccaaactgggcgccgaaggcatcctcaccgcggccgacctggtcagagccgatcccgacaccctgcgggcccgttacggggtgacgctggcgcgcacccagcgggagttgcagggggtggtgtgcagcgacctggaggaagtggaaccagagcgacaacagatcgtggtgtcccgctcattcggccaggaagtcacctcgctggaggacctccagcaagccgtgtccacgttcgcccagcgggcgtgcgagaagttgcgggcgcggtccttgcaggccagcggggtgtgggtgtggctcaacaccaaccccttcaagcccggcgcggcgcagtatcaccccagtaaagcgttcaacttcatcgcgcccacgagtgacacgcgcgaagtgctgttggtagcccaagggctggccaaggccatgtggaagacgggttaccgctacaagaaagccggcgtgggcctgctggatctgacgcacggcgacgtccaccagggcgacctgttcgccggcatcgacccccgctcgcaggcgctcatgaaggtcatggaccaggccaacgcgaagttcggccggggcaccatgggcatggcgtcctcggcctggcgatccaaggggccggcgctggccaagcccgtgtgggccatgaaccagaaaaacttgtcgccggcttacaccacccggtgggaccagttggtgcgggtgcggtaa

SEQ ID NO: 499644 - DNA, 405 bp, Stenotrophomonas maltophilia
atggacgacgcgagccgctggagcaagctcaaaccgatggagggcccgcgctggccgatccggtgtggccatgtgttcacggccgatgacctggtgcgcctgcgcgagggcctctggccgcgcgacatggacgacaagtgggcggtgcacctggagggcgacacgctgcgctgctggcgctcgtggaccggcacgtgcatctacgaaagccaggtgaccccggccgaggacggcaccggcgtggtcgtggtggtggacgtgctcgacgacggggacacctaccggcgggccgccaccgacgaaggcgagctggaacggttcgagggagttatgtcccaggtgcggcggactcaccttgggtccgccgagcttggatgggcgccagtccagccagcagttacatga

SEQ ID NO: 499645 - DNA, 462 bp, Stenotrophomonas maltophilia
atgctcgacaccacgctcccgcccggttacctgggcgccgcccacctccaccccctgcccttgcacctgccattgctgccggttcgggccacctgcggcttcccctcccccgccgaggacttctacggctcccaggacgtgctggacatcaaccagcgggtcgtccgaaacccggtggcgacgttctacgtcgaagccgacacgggcgcgtcgatggtcgagtttgggatcttcccaggggacaccctggtggtggatcgctccctgaccgcccgccatggggacatcgtcatggtgtgctgggaaggcggcttcaccgtcaagcagctgcgcctgcgcgcgggccgatacgagctccactctggcaatcctgccaacgcccccatcctcgttccggaggacgtggagctcgacgtgtggggcgtggtgacctggtccttccgcaaacaattgaggcgctga

SEQ ID NO: 499646 - DNA, 3012 bp, Stenotrophomonas maltophilia
atgggaggggcgggccgtgaaaccgatggggcgccggtgggcggcggttccacgcgcaaggaagggggggaggggatgccaacctggaagccatcgcggctgcgaagctggttgttcagtgggagcggctggatcttcaactccgatggggaagcgttcgagctgtcccttgatcggggacggcgtgtcgtgaaaggcccgctgatcctcatccatgcgctggagtgcaagccgcggcacaacttctccacgacgctcgaatgccactttaacgtcatcggaaccggttggatcaccgtggagggcttgggcgaagacaaggccatcgagctccagcgattcgtccaggaagaggtgaccggcagcctggcccactacgggtcccgggccatcaaggtcctggacccttggcagcggcaggtggatcaacggttggaatcggtgggcgaggtcgatcccgcgttgctatcgcaactcaaggccaccattccttcgccctctaccgtcggattgcccagttggggcgcactgctcgaacacccggccttggccaaggaacggaagaagaaaaacagtttctaccccaagctcgaccagaccccagagacatacctggacagcctggacgagcggcgtcgccgcgcagtctttaccaaagcgctggctgcatggtcgcagcggcagacggcgtgggtgggtgagcagggatggatcggtcgccgctgtcggcaggtgcgcctggcgagcgacacgcctccagtgcttcaaggcgttccatggctcgacgcggcgccaccgtcttatcacccgacggctcacgaatggctggcccgtcaggtggacgcgcacaacgcagcgttcgaagcagatcagatggaggccaaacgggcgttcttcgaccgggtggagtcgaacccgttgaccgaggagcaggccaaggcggtggtgtgcatggacgacgagctgttggtggtcgccgccgctggttccggcaagtcgtccaccatcgtggccaaggctggttacgcagtggaggagggcctctgcgcgcccgaggacatcttgctgctggccttcaacaccgacgcagcccaagaactgcgccagcgcattgccaagcggttgggccacctcgacggggccgatcgcatcaccgccaagacgttccatgcgttcggcctggaagtcatcggcgccgcgacaggggaaatgccgacgcctgcgccttggttgaacaatggtcaggacgaggcattcatcggccacctagtcgatgagctgtgcgctgaaaatccagctttcgcagcgcaatgggatctcttccgcctgctctatttcaaggacgtggggcagtgggacgcgcgcgaagagccagaggactacgacccagagagccagcgcaagcggggctttcgcacgctgcgcggggagatcgtcaagagcaagtccgaacgcctcatcgcggattggctgttcctccacggggtgaactaccgttacgaagagccgtatccccacgacacccgcaccgccaccaagcggcaataccgccccgacttctactaccccgacatcgacgttttccacgagcacttcgcgctcaatgccaagggcgaagcacctccagccttcaaggattacctggagggcgtgcattggaagcgacaacttcatcgtgaccaagggacgcgactgttcgaaacgaccgcgcatggcctgcgcaccggtgccgccttggcggcgctcaaggacttgttccagtccaagggcatcgacctggtgttcgaccctgaccgcgtccctccggacacggacccggtgtcgccgcaggccatcgcgaaagtcatgcgcgtgttccagcagcacatgaagggttcgcggcaatcggtcgagcaggcccgtgaacgcatcgacaccttgccgggtgctttcgtgccgcgcatggagttgttcctcgacctctacgaagaagtcgcccagcgatgggaagaccgattggtcgcggacggtctggtggacttcgacgacatgctcaaccagtccgccgaccacatcatcgccggccgctttccttgcagcgtcaagatggtgttggcggacgagttccaggacacctcccgtgcgcggatgcgtctgctccaggcaatcgttgacgccagcggtgcgcagttcacggcggtgggcgacgactggcagagcatctatcggttcgccggtgccgacctggcgatcatgtcggggtttcagaaggcccatccccatgcggccgttcggcacctctcccagacgtttcggtgccctcagtcgttgtgcgatctcacgtcggagttcgtgtcgaagaacccgatgcaattggccaagaaggtcttcaccagcaacccattgaagggtccccgggtgagcgtggtagcgctgcctactgtggaggacatccccggacggttgaaggccaatatccagtcgctctacgacaagctgccggaggctacggaggggaaaccgctgcggtccatgctcatcctgggccgctaccgcaacgacaggcccagggagctggaagcctggaggcagcgattcggcgacaagatcgagctccgattcctgacggttcatcgggccaaggggctggaagccgatttcgtggcgttgctcaacgtggttcaggacaccctgggatttcccagccaggtgcaggacgatcccattcttcaactggcgatgcccgagccggagacgtttgccttcggcgaagagcgtcggctcttctacgtggccctgacccgtgcgaagaggtccgtggtgatctacaccactcaacaccaaccctctcaattcctggtggagctccaagaaaaccacggcgtggagatcacgcaggtggagggggcgccgccagaagcctgccccctgtgcaggaaaggcgtgctggtggagcgcgtcaatcgcaccacgaaggaaatcttctattcctgcagccgtttcccccggtgcccgccgaccaaggaagactga

SEQ ID NO: 499647 - DNA, 510 bp, Stenotrophomonas maltophilia
atgcctgtctctccgcccctcgcctaccgcttattgcacaccttcggggcaattgaggccctgctcaagcagcagcacggcttcctgggagcggaagggaacccagcaggccccgggcgcacgaaagcaaaggccaactgggacgcggtggatgcagcagttcgcaacctgcgtccggctgacttcttcgatcacatttcgcagcgcacgaaggacaagatgctgggcggagcacgcaaccggccacagatgcagtttgtgcgcgtgaatccggacgggacctggcgagcggagttcgaagacagcgaccttccagcccaagactcattggctttggtggttgccatgcggcgcgtgcgcaacaacctcttccacggcgggaaggctgctaaccaaccaggccgcccattgggcgacgacgacgaatgggcccaggctgcgctggaagttgccgagcacctgcatgacctgttgaatcgcggtgaacttcggcccattcaagcaccctga

SEQ ID NO: 499648 - DNA, 1878 bp, Stenotrophomonas maltophilia
ttggacgcgaatacccgtcagctggaagctatcttcgacccgaacgttttctttcaggtgccactgtttcagcggccctatgtctggaacgaggcggagaactgggactacctctgggaagacatccatgcgctgctcgacaagcagctgcgcaccggcaaaacccgggcgcacttccttggcgccatcgtgcttgaacagctgcctcattcagccgggtccatcgagacgcgtcaggtcatcgacggccagcagcgcttcaccacgttacagctgtttctcatcgcggcacgcaatctggcagcgggaaggggtgctgataagtatgcagaacggttctcggcactggtcgagaacaacccatcgcgggtggaggaccccatcgagaaattcaaactctggcccaccaacagcgatcgtgttcctttcaagaccatccacggctgtgcctcactgaaagagctagaccaggccgtcaagggcaagcccgcgctggcggggagcaacctggtgggtgcctatcgctacttccacgacaagcttgatgcgtggatagcgggcaaggacgacgacgtcgacgaccaagctgaattggcgggaaagaccgttgaagatcgcattgaagcgctgtggcaggtggtcaagggaggtctccagttggtggtgatcaacctcgatcgcgatgacgaaacccaggtcatttttgaaacgctcaacgcccgtggcacggaattgttgccggcagacctcatcaagaactacctgttccgcaaggcgctggttcaggacgcggacgttgaagcgctctacgaggacaactggagccggtttgaaacggagttctggcgggaggaggtccagcagggtcggatcaagcggccccgcatcgatctgttcatcaaccactacctgacgctcatgacgcgggatgaggtgaggactacccacctgttcaacgccttcaaggcgttcgtggaaagtggtgagccgaatccagaatccagaatccctgtgcccactgacgcggcggggcacatccgacaattggcccactacgctgacgtgtttgaggcattccaccgccccgaagggcatccagcgttggcccggttcctgcgcaacttggaagcagtggataccagcacggtgtatcccttccttctgcatgctcacgcagagctggtgcccgacgaccgcgccgagttcgacaaggtgttggcggtgctcgactctttcctgatgcgtcggctcatcaccaactacaccggcaagaactacaaccggctgttcgtggacctgatcaaagcaatcgagcgcgctggcacggtttcggccaaggccgtggctgaacaacttgggaagggatccggcgaaagcaccaagttcccctcagacatggagctgctcaccgccgtgttcgagtggccactgtatgggcgcatcgcgcaatacaaggtccgggcagtccttgaggcgttggacgcggcctcccagtctacaaaaagtcctgtgctatcaattccaagcaacctgacgatcgaacatgtgctacctcaaacatggcaaacgcactggccgttgccagctgatcttaaggacgatccagtggccgaacgagaggcaatcgcgaagcgccaagtgatcctcaacacgttgggcaacctcacgctcataaccggtccgttcaattcatcgctccagaatgcagcttggggtgccaagcgtcccgaactgctgaagtattcgaagatcaatctcactcagtatttccacggccccgaggcggacgagtgggacgaggccgccattcgaaagcgcaccgagcacctgttcaaattgctactccaggtttggcctgacgccagcaaggtcgcctga

SEQ ID NO: 499649 - DNA, 975 bp, Stenotrophomonas maltophilia
atgtgttattccgccgaagcctggaccctctacgacaactacgtgaaggaatttggcgccgacatcgacatccgcgagttctgggaggtctacctcaagcgggacgaggcctaccgcgtccgcaagcccgccaagttcacccccaagattcccaagggcatggatctgaatttcttgcccccgaaatcggacctggagcggcagatccaggagttcatctccgagtggaacgggcgaaagctcgctgaaagcgagaccgagctcgacgcgcagagggcgcgcctagccgcggctgaggcgaagctggcgaagaaggaaaccaaggccgcgctcaacgatcagcgcattgcggggaacaagatcaagcagatggagcgctggattgccgacgcgaagcgcaccaagctggagccggccaaggacaaccgtatttttccggactggtatgtccccgtcctgatctcggagaacggccgcaaggtcgtgcggcccatgcgctaccactgccgccccgccggcatggatccctcgatcgactggaccaaggacgggcgcgtgtcgggcacctacaacgcccgccgtgacaacctccagcgcttctggcgccaccagttcggttacacccacggcctgatgctcgccgaaacgttctacgagaacgtggacgacgggaagggcggatcgaaagaaatccagttccgcccccgcaccggggagaccatgtatatcgcctgcctctactcccactgggtggacccgaacggagaagagcccgacttgtggtcgttcgccgccatcaccgacgagccagaacccgaagttgctgcccagggccacgaccggaccatcatcaacatcaagcccgagcacgtggacgcctggctcaacccggatccgaacaacctggatgcgctgttcgccatttttgacgacaagcgccacccgtattacgagctggtcaaggaagccgcgtag

SEQ ID NO: 499650 - DNA, 288 bp, Stenotrophomonas maltophilia
atgcacctgaaaaagctgggtctggccgccgtgctgctggccgtgtccaccaccgttctcgccaagcaaggagaggtctgctcttcgaagcccgtgctcaaggacggaaccctcaccaacgacaccgtgttcgagtgcaaaaccgccggctcgctcaccatcccgcagctctacgcccaggggtggcgggtcatcagcgtcttgccgcaggccaccatggggacggacccgagcaccggattgccgcaggccagtttcgcgtggacggtggtggtggagcgcgactga

SEQ ID NO: 499651 - DNA, 537 bp, Stenotrophomonas maltophilia
ttggccctgaccacccttcagtccatcaacgcggaaatcaaacagctcgaagcccagaagaaactggtggagaaacgagacggcgaagtgcccaaggcactggccgtgctccagaagttcgccaaggtgctgagccccgcccagcgtcgccaggtggccaagctcatcggtgaaacgctcgacgacaagccggcgcgcgcgcccaaggccgctcctgcctcccgtaaaggccgcaagctcggcaaggtggccccgaagtatcgccttcctaacggcgagacctgggcgggccgtgggctgacccccaaggcgtttgccgcgtgggcgaagtccgccgagggcaaggcctgggcccaggccaaccccgggtcgaagttcccggcggccgatggggcgaggaagacacctgcgaaggcgacccagaaggtggccaaggccgcgaagaaggcaaccggcaaggcggtgaagaagccggccaagaaggtggcaaagaaaacgggcaaaaaggccgtcaaaaaggccgccaagaaggcttga

SEQ ID NO: 499652 - DNA, 354 bp, Stenotrophomonas maltophilia
gtggtggcggccaacgtgcttctcgatgccgtggaagggaagatcgacgagaagatggccggtgttcgccttcgcgaagcgatcggcctccagtggtcgtttctgacctgtatccaatacctgtcagggcaagaagccctggtggcactgaaagcgttgcccaacgactgggccgaagaaggacgccagaagcgtcacgtgttggctgctgccatccttgcggcacacatggtggccaacttccgctcgaagggcccgatgttgtgtgccagtcacctggcggaggaactcaagggcaagaccgtggagcaatggctggcggaaaagtccgaaggggagcggggagaagtctga

SEQ ID NO: 499653 - DNA, 1239 bp, Stenotrophomonas maltophilia
atgggggaacacatgggtatcgaacgggagtttcagagctacggcgcgcagctcgtcaatcgcgcatgggcggtttccgcgatcaccgacgatccacgcgaagtggtggtgagcatctggcagcacaacatcgccgagcgcgatggccggtggatctacgatgactccctcgcgcggtggaacggcgcgggcaagaacttgctcaaggaacacctcggtgtggcctacacggaaggcctgcgactgcgcgccgtcgtcgccacccaacacaaccgggccgaacgcgagcgaaatccggacaaggctccgcgcaacacgttcaaggcccgccccgactgggtgggccgtgtggagttgctggacggcgaccacttcgtgttggtgttcgagcacatcggcgatctggccaccgccccgaccggtgccaagtattggcgggttgccgaagcggtggaatcaatgggcggtggcacgctggccgaggtgggcgagtggctggaaacccacttcccctcggaccccatcgccgacttgcgcgccaacctggagcacctgacggtgaactcccccagccggccccactacaactacagccgatccgattggcgcaccgaccgcggccacccccacgaccggctgttcaagatcgtggacgccggtccgccccggcgcacccgctacgtgccgttcaacccagccgtccatggtcacctggatcttctgaacggcgacggtggaaagtgggtggtggtgccgttggcccaggacgaccaaacgcgggcggaggcgcaaggccaggccgacgcgttcgaccatgcgccaccgctcgacaatgagcacgacgcccgcgtgtgggccatgcgcgccgttgcacaacgccgcggccagccgctgttccgcgcccgcttgctcgacgcttacgatggaaagtgcgccatcaccgggtgttctgcgctggaagtgttggaggcggcccatgtgcttccctaccgcggggaccacaccaaccgtgtggacaacggcctgctccttcgcgccgatctccacaccctgttcgattgccagttgctctggatcacggcggagaacacggtggccctcgcccccgctcttctggccaccgactacgcgtcccttcaaggccaagcgcttcgtctgccggcgtcccgagcgaatcaccccaacccggctcacctggccgagcacgccaagagctgcaaggaacgagctaccacctaa

SEQ ID NO: 499654 - DNA, 207 bp, Stenotrophomonas maltophilia
atggccaagaagaaccagcccgccaacgaccgcctcgatgcgttcctggtcgaggaatacgaagtccagggcgagaagcgcagcaactggtcgaagatcggcgcggcttggccgcaccaggatggcaagggctaccgcctcgtcctcaacgcggtgccggtgagcggcgtggtggtcctgcgcctgcccgaacccaaggaagactga

SEQ ID NO: 499655 - DNA, 192 bp, Stenotrophomonas maltophilia
atgacgaccatcaccgcgacctggcgcgacgccttaaacgccgctcttcaagcgcacttcgccatcaccaccgacgacgctggcctgaccgacaccgagctgtcccgctacgcggatctggagccgaaagccgcggcccttcagttcggcgaggactacgaccttgaccgagtcgacctgggttggcgctga

SEQ ID NO: 499656 - DNA, 372 bp, Stenotrophomonas maltophilia
atgttcatcgattttagagtgacgcgccgattggtcgttaactttatcgttgcagccatcttggcccggctgttcttcatgggagtggatggattcgatcgattctccagcgattggaacagcgtgaccggagccagcatgcccggttcaagtggggtgcgcgatgtcgtcactgacatgcgcgccaccttgcccagcgagctggacgagttcgtggcgcgtgctgaagcagacgccagcaacagtcgatccttgctggacgtgctcaagagcgtggccggcatggctgacgcgtccaccacccctgatcaacccttgccttacggcgccgcccaacagatggagagtccctatgaccgctatgccgaatga

SEQ ID NO: 499657 - DNA, 219 bp, Stenotrophomonas maltophilia
atgaccgctatgccgaatgaacacaagccttcagcgaagccgtggtggtccattccttcggaaggctgggcactgctgacttggtgtgggcaaaccgttgccaacaagcaggccccattctcccaacggcgagacgcatcgctgggtctggttggtgcttacgcggtcatcgcctcctggattgtgttccctacgatgattctggcaggtgccgcatga

SEQ ID NO: 499658 - DNA, 192 bp, Stenotrophomonas maltophilia
atgatcaccctgggcgccgttctcaccaccgcctgggtggtccagttccttttcatcgtcttctgcatcgccggcatccactggatgagcgccaagcgacagactggaactgcccgccgcggttcgctcctgaaagccgcgatcattgcgggcctggccgtggcggtggtgctgtccttggcgttgccatga

SEQ ID NO: 499659 - DNA, 186 bp, Stenotrophomonas maltophilia
atgacccggccggcctacgtccaaatggccgtgcgcgtgcccagggacctgaaagcgcagatggagaagctggcggccgaggagagcatgcacgtcagtgagctcgtccgtgagcttctgacggagggaatgaaggacaggggagcccccatcaagccgccggtgacttcacgatccggtggttga

SEQ ID NO: 499660 - DNA, 1002 bp, Stenotrophomonas maltophilia
gtgctgggtttctccaagggcgccacgcagatcgctgccgccgtgggagggcagttcgatgcggtagctttcgcagggatgcgtccgcgtttgaaggcggtgctggacgggcttggcctggatctcgatgggcagagcatcgacgaagcagtgtcagcgggcgggcgtgccttgggcgcggcatcgctgatccgttgcgggctgtcggtgatggagaacgggcagctcaagagcagtggcacgatcatgcccaaggcggcgaaggccagctttccactccaggccatgaagacgtgcatcggccgccacctggcccctcttccggagagcgtggaaacggtggtgatgctgggcaccaccgacgcttacgtgaagggggtgaaaggcctgatgcgagaacagttctccgactaccaagacgtcaacgaggtggcctttcgcgcgcagggtcgcacctgggtgttcgcatcgcaccccagcggggccaacggcacgttcggggaatgggtggccggcgatgggtcgaccgagtcgggccgcaagcggttgctggcgctggccgcgctcgggaaatcggctgacacgctcccgactcgtgcgtccgctcctgcacacgtttcagcgatagagacccgacctgtcaccactcctccaccagttcgccccacacctcctaagcccaccttttccgcatcccaggcagcggcgcccacccacctggacgcgcgcttcgcccagacctttcatctggtcagcaacgagggacggaaggttgtgccggtgcgcatgaagaatcaggacaccggcctggtcgcttttcgcctggcgaagatgggcaacaccaaggatggacagcgggaagtcaccgacgaagccgaattgctgcagttgtgcgagaccgggcaataccaggtcagggcgcagccgttggacaaatcgggtcccgcgaacttcgttcgccccctgctcaaccaccggatcgtgaagtcaccggcggcttga

SEQ ID NO: 499661 - DNA, 1521 bp, Stenotrophomonas maltophilia
atggaaagccctgtccgatacgttccagcctcgaagcgttcccatgaccttgtctgggacagggtgagcggtgacaccctcaccctcgacgacttcatggaaggccgggactacggggaggtggtccgggatggtcgtctggctgcggagcttgagctgctcgacggaacgccgcgctacgtctgcccgcactgcaaggatgcgatgggggtcaggtccaaggccattcgggcgcgcaccgagatccgcttctacttcgaccacctcacggcgcgcttccgagaaacctgcaccgggcgcaagggccactctcccaaggccatcctggcccgcaagttcgggctgcacaaggagggctccctccacaaagccttcaagcagtgggtgagggacagcctggatgccgacccgtcattcttcaacaccgaagtggagcggcggtggtgggacgtggacggcgcgaagtggcgccagcccgacgtccagacccaatggaacggtcagcggtgggccatcgagatccagctatccaccaccttcgtgcacgtcatcgccgaacgcatgaagttctaccgcgagaacaccgggcacatgctctggctgttcaaggatctggacctgtcgaagttccggctggcggaagacgatctgttcttctcgaacaaccgcaatgcctttcgtgtcaccccgcaaacggtggcccggtcccagcgggaagggcgcttctacctggagggggcctggctggagccccgccttgcaaacgggttggtggaggatgtggaggtgcgccgggaggtggccttcgacgagctgacattcgacacctgcagccgcggcgttcccagggcctacgccttcgactacgaaacgcagaaagcacaggccgagcaagcccttgaggcctggcgggaggagcagatctgggccaagcgacggcaggccttcgagacgttctacgtggcactgctgcgcggggagatcgaggactacaaggagcgggatcggcggtgggaagaactgcgccgctccttcgcgcaggtgggaatcaccctgcctcaatacgtcaaaggccaaggagagctggaccggctgttggtggccggctattcggccaagcatggccaggggaaacccatcgggatcgggttcgagaccttggccgaactcggtcatcacatccacaaggtgtggcccaagacgctctggttctaccgctgcatgctccgcgcgcacggccagttgaagaccgtgttggagcaggaccgaaccagaaaactccagggcaagatgaaggacgtgttgtccagcctggccaagggcgagagcagctttcagcccgatcgcacatgggacgggttattgatgcgcctgttccccgaggtggcggacgtatggcgggctgatccatcgcacgtcgccaaagcggtgttgcgcctaccgccctcgcagggcgctagaaagcgagttgtcgaagggagcggtgaagatcgcttcgcagaagctcaaactcgccgttga

SEQ ID NO: 499662 - DNA, 342 bp, Stenotrophomonas maltophilia
atgtggaaatggatttcccgtctgctgagccccacccccaccgatcaggcgcaaccctcccccagggtcgatctcgccgcactcgttgatctgaacatggtcgagctcaacgcggccgaagcccgggcgctgctcgcccaggacctcgcgttgccggaccggctccgtcagcgcctcgttgtgttttcaagcacggctgacgcgctcctggataaagcacggacgacccctgcgcaggcccccgactgggaggccattcggcgaacggcccggttactcaacggcgagtttgagcttctgcgaagcgatcttcaccgctcccttcgacaactcgctttctag

SEQ ID NO: 499663 - DNA, 285 bp, Stenotrophomonas maltophilia
atggggttggacaaggacaccgcgtccgcgcggatcagccgttacgaaagcgagagcatggccatcagcctggaatcgctgttcgagctggccctggccttggacgtcccacccgcctacctgttggccagttctccggccatggccaacgccatcctggccctgggcgagcacaacgaggcccagcaagtccggttggcggaggttttggagaagctttcagagttgccaccgaaaaagcgcaacgtgctcattgagcagttgtcacatctcaccaaggaatag

SEQ ID NO: 499664 - DNA, 858 bp, Stenotrophomonas maltophilia
atggcaagcaaagggtgggccggcgcgctgacgctggccttggcgttccaggcccaggccggggacgggaaggggttgctggagaccatcgggagggcactgggcaacacgccacgggtggccgctgaaaaggcacgcagtccctacctcgacccggcggggacctactgggatctggaccaggaaacgctggagggggcgcagcacctccgggtgggccagacagcaaccggtggggcgggttcggacatgtgcgacatggacctgttggcgatggcgcactccaactaccgccaggacgccaagcggcggcagtggtgcctctaccagtggtgggtggccgacaccaagatcaacggctccaacgggatcgagaagacccaaacagatgccatcgaaaggcgctatgggccagcgttcgacgcgcgacgggagaagttcaagaccacgcaccggttcgccgtgcgcccgccgttcgtgtcgctgggaggcatcgaatacaacgctggtcgcggcatgatggaggtctacgtccccatgccgcagatctccgcctcggggttgtcggtgacgggcaaaggcttcgtgccctggcatcgggtcacccccacgggtgtctccagtccacccaacgccgggcgttacgagctgctgatccgcatggacgcagccgaggcggccaacctcgctcggcaaggccgcgacgcccgcgatgacctggtggtgttcaccgtcaaccgggtgtgggtcgagaacaccgtgccgaagatggacgtgatggtcgagcgggtgcgcgtcggctaccgcaacgagacgatcgaagtggatctcaccaacaagcaaggaggaggcgcatga

SEQ ID NO: 499665 - DNA, 363 bp, Stenotrophomonas maltophilia
atgaaaaacgcagcaatcgcactggcactactgacgctgccgctgtcagcgtgcgggggcaaggcagacatgccgacggaagaacaggtggccaaggcttacgaaacgcatctgaatgcaaacctggtcgcccagctggggcagcggatggaggtccgaggctgggacgatttgaaggtggattgcacgagcagcggtcccgaacgggtcacctgcgtgaccggtggcacgctggacctggtcgggttccaaggcggcgtgcagttgaagcccgagccggttcccgtgccggcggagttcgacatcacgttcgccaagcagaacaacgcctgggtgccgatcagcgcgcagaagaagaactga

SEQ ID NO: 499666 - DNA, 501 bp, Stenotrophomonas maltophilia
atgaccatgaacaccattgccaaccacgaacgcacaagcagccacatgcgttggggcttgctcgcccccatcaccctcttgctgttcggcgtcggtgtgctttgccttggcgcagcccaacaagcgtcgcaaagcggtggggcgccgtgggcggtgcctatggcgctggccggaacggttggcgcatggggcttcctggctctgctctacgtcatcaattggcgggcagcccgtgtgagcgcggccatggcccgcaattccttcgtcgtgccccggaagggcggattcttgaagggcgctctgatcggcacgttcctggtcgttgccttgcaggtggccagcgtgctcatcggcttgttctaccccgggctggatgagggcgagcgcaacttcttcctggttgtgcccacgttctacctgaccggtctgtataccgttgtgccgattgcgcccttgctgggtggatggttgggccgcgtgtggcgcgccacgagcgtgtga

SEQ ID NO: 499667 - DNA, 345 bp, Stenotrophomonas maltophilia
atgctgcctctacgcaacccccgcctggacaaccccatggggcgtctgccgacgtccttcatcaacgcccacgatgccgacgagatccgggggttggccgagcgtcacggtatcccgttcaacgaggccgtgcggcaaatgctggcgctctactttcgccagccgttccccttgtccaacaagcggatggggggcgacaagacagaccggctgccccagatggtggccccacgccacgttgtcgaaggcatcggtgttctggcgtcgtcgttgggccacactcgcggggaagtgttgcgccagatcatccggggcacgctgaggaaacgccgtggccgtgattga

SEQ ID NO: 499668 - DNA, 498 bp, Stenotrophomonas maltophilia
gtggccgtgattgaccgctctccgccaccgccgggcagccccagtgcggaactgatccacgcgtgtatcgagggcaacctggtgggggtgcttgaggcactccgggagggggcaaaccccaacgcatggcgggagaacgaaggtccggccatccattccgcgctggcctggccgcgcatcgtggaagcgctgattgaagcgggggcggaaccgcacgcgcgcaactactggagtgaaaggccgctagagaagctcgcgtcggactaccaagccagtgaaaacccagtggagcggggacgcatggagcagacggcacggctgctgatgaggcttggcggcaacgcctaccgcgccagcccgttctggcggacgggcacattgcgcgatgcaatgccccaggtggtggcgaaagtggaagcagaactgcggcaggagttgctgcaggacaggctggtgaccgtggccgacacgccgacggtaagccggccgcgtctttaa

SEQ ID NO: 499669 - DNA, 231 bp, Stenotrophomonas maltophilia
atggcagcacggcactactactacgcttacgagcgcacggacggcgaggtgtgctacctgccgaagcttctgcatgaaggcatccagcgttacccccacaccatcggtcactaccacctgacccaatggctgggcgtgagcaagctgctgacacccgagcaatacaaagccatggggtggctgggcacgaaccgaccgatcgccaagcgtgccgccggaacaatggcctga

SEQ ID NO: 499670 - DNA, 486 bp, Stenotrophomonas maltophilia
atgaatcagtccgcctcccacgaacccgacgacgttttcctccacgctcctgcttacggcctcctgctcgggcagaccacctgccacttctgccacgcccagacgcccacggcggcggtgtgggtgccatccttcgaggagcgcgacgatgaaggcgtagtggaccagggggagggcgccttgctgcgctacatcgagcacctcgacgagagcgccaccgctttcgtaacaggccacgctccctggcttcgctacgctcccacgcgcacatccggccagatctacctagcccaccactgcaccacctgcggggccctccagggcgaccacttcgtcttttcccccgatggcccgtattggcccgagggcgacgtccaactggcctcccttcggttcatccgcggcctgggccagctcaccgcgcaggcctccgctgggcaaagcgcctggatggaccgggtgcctttgatctgcacccaggtctga

SEQ ID NO: 499671 - DNA, 441 bp, Stenotrophomonas maltophilia
atgttcgagccttccgatctcatccattcctacacccgcgcccaagcgattgaggacggcgtcctggtggacgtgtccgacgtggcgaaggaagcaggcttcaagttgcccgtggccatcacccacgccgcgtgggcacgctacgtcgaagtgcccgcgggactggagatgcgtgggcagtccgtggagggtcggctctgggacgtgctcttcatgctccacatggccatccagcgccagagcagcaacacgtccgagatccactaccaactcttggtggccatgcccgatgtgggcgactggcagcccaacgaagcagttccggatgatcgctcgggcctgacccggtcgacgcaccggctcgttaccttgaaagccttgtgtgggccgggggataacctggaaccggtgatcacgatcatgctgcccaacgaggattga

SEQ ID NO: 499672 - DNA, 918 bp, Stenotrophomonas maltophilia
atggagaggttcgattggtcgaaggtggagttcgcgcgcacaccctggcgaagccaggtcatcccagacgcgctgcccatcctgatccggtgggcccaggagggtgaagcccattcctacagcgacctggcccaagagctgcacgacaccttcgggcacgagatcaaaccccgcaaggacctctacggcaccgtcgccgggggcgtcgctcaagccctgcagtggctcagcgagcagtggaaggaacccatcccgccactccacgcaatcgtcgtcaacaagaacacgaaacaccccggggaaggcgccatcaccatctccccggcttacttcgccgggaagaagctggacaccgaggaggaaaagcgcgcccatcttcgtgaagccatggaagacgttttcacctacccggactgggaccgggtcgcccgcgccctgggtgccacgatgctgaccccggcaacgggagcggtggaggaagtggctgcggacgcgcccattccccttccgaaagtccaggagggtggcaagccggaaagcgacgagcacaaagcgctgaaggtgtgggtggccagccaccccgaggagttcgtggattacgggatcttccccgccggcagcaacgagaagttgctgagctccggtgatcgattggacgcacacttcgacaacggtaagcagcggttggccgtggaggtgaagaccagtcgatgcaccgaagacgagttgcagcggggtgtctaccaggcggtgaagtatcgggccatcgtccgggccgagcagaaagccatgcgtttcgtgcccaacggggaggcggttctggtgtgcacgcgcgcgccgaacgcggagacccgggccctcatcaaacgtctgcaggttcggtttcagcaggttccgttggaggccgagcagaagtga

SEQ ID NO: 499673 - DNA, 786 bp, Stenotrophomonas maltophilia
gtgaccaagggcgaactggatcagcgggtcaggcagatcgacggtttcattcgggtgctgacgcaggagtgccacatcctggacgagcggcggcacatcctggcgccgctcattcaagacgacgaggtcaaagcagcgctcaaggccaagctggataagacggtgggagccggcgcgtggggccacttggtgccgctcctggcgcaggatctcgtgcgtgaccagtcgcggctatttctggaccaggacaagaggtcgggaagcctgatcaatctctggcgcaagctcaacgttgatccagccatcgtgagtcactaccggcgcagctacggtcgcatgtttgacaagctccacgtgggaagcatttcgaatattccagctgaaatgtctgctgcctttatgaagaagttcaagcaacaagacaggaagaagaactacgcgttctttgacaagagctggaagaagttgagcgctgatatggcggctctagcaacgaaccctgtagcgctcaagatcggcacgtatcgggacaagtatcttgcccacctggagatgcgcaagatcgacgaagagcccggtgcattcgatgtgaaatccttgggactgacctacaacgatgtgctctccttcggagaccaatgccaggtcattgtgtcggagttgggattgttgttgacgcacacttactgggatcccaagcagttcgcctccacccattcagaacagggtgtggcgatgtggcgcgcgttggcaggcgtggcgaagcggaaacccgcggccaattga

SEQ ID NO: 499674 - DNA, 762 bp, Stenotrophomonas maltophilia
gtgttgcccaaccccagcacgcagaccgacaccgaaacccgcagcgcctctcagacagccgcgtgccccgcgggccaggtgggcgagatcatgcaaagccgccaggagcagcgcacccgcgcgcgatcggcgtattgccccgctcccacggggcccttcgcctggaacggctggtctgggtggtcggcgtgggcagccaccacgccgtgggccactgtcagtgacacctgcacgccgatcactggccccagctgttcgtgggagctcgacgtctactccttggcgccgaactttggcaacctggatggagagacggtgtcctacaacgatggactgggtggcggatgcgatgcttcctggggcggtcgcagcggcatcaccgaccagagcgcgttcaatgcctgcaaggactccatcccgagccagcccataaacgccggtgcctattacgcgctcagcgaatacacgaactggggcggcggcatggagaacaacttcggctaccgcgcaagctgctcgtcccgttgggaatgggtgctcaccggtgagagcattggcggatgcggagcccagggtggtggcagcgggggcaccatctgcgtcagctcacaagacgatggcaacggctacggttgcggtggccaagtatgcgacgcggaccatgacggggtcacctacgccagcggctacgccgagcggagggacgcgccgtggccggattgcgactaccaggttttcacctgcatggaagtgaacccatga

SEQ ID NO: 499675 - DNA, 189 bp, Stenotrophomonas maltophilia
atgtatgaaatcgcattgcccgcgccccagccccgctcgggcttgttcatgaacgccgccaacgagccttgccgaggcttcgttgaagccgcccacatccccaactcgaaacgccatcggctggttcgcctggcgaaagagaaagcccacttcgagcagaagagccgaaaggaggccaagtggaaatga

SEQ ID NO: 499676 - DNA, 513 bp, Stenotrophomonas maltophilia
atgagcgccctcaaccccaaagagcgcttcgcccgcgagctccacgccgcggtccaggccaacaacccgtttctgctgcgccacctggtgcgccgcatccatcaggcccgcatcgacgcctggacctcaggggacgacaacgccatcttcccgtcccttgatgccccggtgagcctgcagggcatcaccgctttccacttggcctgcatggggtggaaggcgtatcgggacagtccgcacctggcctatgggttcgaccagatggccctcatcctggccgccgcgggcgcggaccccttcgccgaatactggatcggaaatcagcgccgaacgatcttcgaggaactgggtcgcgagctgcctccgtcgttgaaagcctggatggcggagcagccgttcgatctccacgcctcaccttcggaaacggtgatcacccagcggacgctgccccccgtcagagatggcatgaggtcgcggcgcgccctgttcaaggaaaagagtctggcggcttaa

SEQ ID NO: 499677 - DNA, 501 bp, Stenotrophomonas maltophilia
atgcgcttgtgctgcttctccctgaagggcggcgccagcgcctttgcggccctgtccgatgaaaccccgttctcggtgggccgttcacgctcgccgggtttcaacatcgagatcaccgacaccccgcccaggctcccggacaatgaggtgatccccgaagctgacctctacctcgtcccgacgctgctggacggtgccagcttcctcatcttcctgcggacggtggaggtgctggagaagaagggtaagcgctatctgcccatcgccaaccgggcgaacgagaagcggtcttctcaccgtcgccgtctggagcaccccaagatggccggcgcagttcttgtgcgtgaccgggcgctgatcgcggactgctacgagcagggccagacggtgttcgacgccgccgaccggtgggcccagaaagcccaggaagagatccacgggttggccgtgagggtgcgcaagaccctcaagcgtgacggcaaggggagggctgcggcatga

SEQ ID NO: 499678 - DNA, 609 bp, Stenotrophomonas maltophilia
atgatggaccttccactggtttccctccctgacctacccatggccactcgcaaagctcccgccaagaaggcggtgacgaagaagaaagccaaacgcacgctggacgacgtcaagaacgtcactcataccaaggcgtcgcgccagagcactaaggccgagccggcggtcgggcggatcccggagcacattttgttggggccgggcgactatccagagcggaagtcctacttcgactacgacgacagccagcgggcgggcacggtgggtggcaagcgggttcacatggtcatgccccggtcggtcaccctccacgactaccgtcggcgcgaggatggcctgcgccatcaccgcgcgatggtgacgatcccaccgaagcttcgggaaaacatcgccaagctgtttggctacgaggattccgaggacgccggccgggaagtagcgctgaccaccgcgatggtggcgctggcggactatgccgccgcgacactcatcaaagagaagaccctgttggtcgtgagctcgccggcggacgagcacgccgaggaacggaaagccgccagggtggccgtgcggaaccggggcaaggccaggaacgggaagatctactga

SEQ ID NO: 499679 - DNA, 1197 bp, Stenotrophomonas maltophilia
atgctcacggacgaccagttggagcaacttcgatacaagggcgagggctcggatctggactacaaggccgatcgctatcctttcgcgtccgcaacagaagatgtgaagtcagagctgttgaaagacatactggccatggccaacgcccatcgcgacggcaccgcctacatcctgatcggtttcaaggaaaacgcgccacaccctgccgaagtggtgggtgtccctgcagagggggcaattgatgattccagaatccagcagttcgttaatgagaagctggagagcaagctggacttccggtatgaagagcggatcttcgacgggaagcacgttgcagtccttgctatccctaagcagccacggccgttctatctgaagaagccctacggcaagctgcttaaggataccgtttacatccggcggggaagttcgactggtgtagcttccccacgtgaagttgccatgatgggtgctggcaacgccatccggccaccggccaagattgacctcgagctcaaaggggatgacaaccttccattggctcagagcttccaactggcgttctacgagtcatcctcaccctatcctgacttcagcacggaagagcggtcgtatgaccccttcgaccgatcgtccattttcatcaagacgcacgaagacaatcgggagttctggagagatgccgctgagcatctgttcctgcaaagccgccttgtcccggttcgtgtcaaagtgacaaaccgatcagagttcgccttgagcggtgccaagcttgagatttgggcaagcgctcccggtgaagcggcagtggaacttgatctggtggatgatcttcccgagatgcccacgccgaggtggaacatcatgaatcgacagatgaggcacatggtgcccgtggctcggaacgtgaccaatgcaccccagatggaagtggacaccaaggaaggccatcacgtatgccgtgtccgcttaggcaacctgttgccgggtgagtcggccttcggggatgaagccctggcagtgctcccccagcttcctggtgcccatcttctgaaggttcgattgcttgcccaggaactcaatccacctttgagctttgagcacagctttgaagttgaaggggcaagcgagacactcgacctcgatggattgaaggcgctgatctatgaatccatcaagggaaagggagccgattag

SEQ ID NO: 499680 - DNA, 1062 bp, Stenotrophomonas maltophilia
atgaccttcgccgacttccaggcatttgctcaacgggtgttggagaaccaccgcgcccgtgctgccgataacccccggtgggcgctcgacctgctgcggcgacaagacaacccgacgtgtgcgttctgctgctcgcccatcgacgtgagccggcggcaatcgtggggcctctcaccccttgttccgttcaaccagggcggccccgttgaaccttcaaacttgcggatggcctgcaaggcgtgtgcggttgaacgcggcgcgcgcgacctgctggcctgggaagagctggctgcaaaggtgcctgccgaatacctgaacgcgctgaaggaagcccggctgggagttttgcaacgctcggacaatcacctgacctctgtgggtcgctacgcgaaagacggaaccgtgctggaactgctccgtgagcgctggaagcatccccgctttctcgtctacgtcgaacgccatgcgaacggttggttcgtggggtggccggtgggccagcggaccctcacggcccgaaacgatgccgccgggctgctgcgccaggtgcaccaagctgggtggatggagcacgaggaggtggtgggcttcgacgtgccgggagaagtttttcaagccgctgtatggcagctcatagggcaccacgccctggtcatcgacctgagcccggacaacgccgccgacggcgagcggatcggtttgaacagttggaaggcccggtatccgaccttgcgccaggtgcgccagcggcgcaaaggtgcccatgagaagccctggccaatccttggagtgggacacgctcaggccgtcagccgcgagcccggcgcggtgcgcatgcgggcgaaacgcagggcgtcgagggaggcggaaacgaaggcgaggtggctggaagcccgccgtcggctggaacttcgggatgccgcagtggatgccggtcaggttcggccatggctgccgggggagcgggcagcccagcaagccgacgtggatgatttcgcacatcaatggctttcagcgcgccaccggctgctcgaacacgctgagagactaatgcagccctaa

SEQ ID NO: 499681 - DNA, 402 bp, Stenotrophomonas maltophilia
atggcgttcgttcgtcaaaacgtaaacctcgacaacgagcaattgaaactggctcgccgtcttgctcgcgagagcggcatgcctttcaacgcttacgtgcgcgatgcactggagcggcacaacgcgggtgtcaccttaacaacggtgctggagaactcaaacgcccgcctggagtttctgctcgatcagctccgcgaggagagcgcgaccctgcgccggtctctccaggaagaccagaagcggctgcgcgacgagatgaaggccgagcaagaccaagccattaagcgctacgaagacgcgcttcgccatgtccttacgtcgatgagcaccgcatcggccattccaagaagcagtcccgccacgcgtggcgcgggccttcccgtgagcaagcccaacgtttga

SEQ ID NO: 499682 - DNA, 645 bp, Stenotrophomonas maltophilia
atgaaacgttccaccctccccatcactctttgcctgatcgcctgcctgcccatggcaatgccgctgcaggcactggctcagttcaacccgtcggagcaggccgcttcctcagaggcgaagccaaagaccgataagaagcgcgtcttcaaggccggcggttttggctgcgtcgccggtggcgccttggcctacctgaccggcaagaaggaccgagccattgccgcgtgcgccgcgggtgcggccgtaggcgccacggcctcttacctgaagcagcagcgtgagcacgccgaggaggcagctgaggccgcgcgtgccgctggcatgaaggccgaagttgtcacgaagaccgagaccgtcgaaggcaagcaggaagccgtcctggattcgttgcgtttgaactacagccccgaagacatgaggcggctggacaaggacacccaagcgttcctggacaagttcgccggcttgctgaccaagtcgacaaacgggctcacggtcgtgttccagggcgccgacaaggccgcctgccaggtgcccatcgtggagctggcccaacgcggtgcgctgtcgaaggtgaccgtggacgaccgctgcggcagcggtgagcccgtgatcgtcgtaacgccggtgccggacgtccggtaa

SEQ ID NO: 499683 - DNA, 1212 bp, Stenotrophomonas maltophilia
atgtcagacattgaaaggcaacggcgcatgcgggaacgggctcgtgagcaacgcaaacgcgagcttcagacgacccgtgacgacgcgttgggtgtatcccccctcggggacaacaaggtggtgtccgaaaacaccaaggaagccttgaagactgccggtcattgggccggcgtgatcgggaagcgtgccgccgagttgacccacaagggcgttgctgctgcagcagagaaagcgaaggaagccaaggcacaactggacgcgaagaggttaaagaccgaggaggaacgacttaaggctacaaaagccaagtcgagcaccctgacggtccaaccggcaaaggtcgatgtggtgccaaatttcttgatgaccgatacggcgggttctctcgtggcggaccgaatggctcaggaccatgtccgtgtaaatggcgactatatggaggacaaagcctctttcgaggaaatggcagctgaggacttggtcgaagcgttgtccgtccatgagccagccgccattgccggcgaagctgatgcggttgaggtgggcgaagcggttcttgttgcagcccatactgaaccacagctggtcgtggaagcgcctggattggcacaggagttgaatgccctttcggatttaccaggagaggctctcgtagagcctcaggtgaccgatgacgtttccatcgggcagagcgagttggctctcggtgctgttgaggagcctagcaactcacccgacggcacgcctccagagataccgcaagcgtcattgcaatccaagccccgctttcgttggccttgggtcgtgggcggcgtggtggcggtggcattggtcgctgtggcaatctatttcctgcaagagaagaacgaccagccgccgccgagcgctcccgctcccgtggcaccggttgccactccggtggttcccgagcagttgcccgaggtggtggaagcccccgtgatcgcgccgtctccagccttgctttcagagcaggccaggcccgaacccacgattgagaagcctgagcctgtcgttggtcccgtggtggcggactcggcgcggaaagaggcccagcccaaaccgtcaacgcagcgtgcgccagccacgatgccgaagaaggtcagagcaccggtttccgaaccgaagagcgattggcagcagaaagccaacgcggacttggatgcttgggcgaagaagtcggggatcaaatga

SEQ ID NO: 499684 - DNA, 576 bp, Stenotrophomonas maltophilia
atgatctttgatccactcttcaaacagtatcggaagcgcaagctttctttcggaagccgatggcttcacctccatggaaagctcttcctcggtgagccaagcagacttggattggagcgggacgaagtaggcgctggggtatatgacagttactactacatcccttccgatcgggttccagtttgctccacgcctgaaagtcgcaaacagtggcagctcggtcagctcaatgccacccaggtcagggtggccagccagccccacatcagcaagggcgtctctttggctttgctaactttcacgctgctatgcgtggcgctggcgtctgcgatttccaacaagagtgagtcgtccgaagccgctctgttgagtccagtggagtcccagaaggaaaccgcttcgagcctcatctccaccctaactggacttgttagcggtgcgaagaaggagaaggagaaagctcctcttgaattgagtttgacccagtgccagcagttggccgtagcggctgcgcaagggctgagcgatttcactaacgagcaggcagcagcctgtaacaaatacaacccgcgttaa

SEQ ID NO: 499685 - DNA, 342 bp, Stenotrophomonas maltophilia
atgaccattgctattcctacagtttttgatgtgttgtcactggccggacgtgtggtccctggacgctggcggcatcaggtggatgccgcggaagctattcgccaggaagccgaagaccgttatgaagagattgtcggtcgctttgatgtgtcctctcgaattcccagtcgagagctggtcaacgtcatcaccgacgaagacaaggaggacgtcaaagaccttggggccgtctacaacgagcacacccagcgctggattgttccggagtccacgtcatacagcggtgcggtggccgggtcggccttcacttcggccttgggcaggcccagagaggcctggtag

SEQ ID NO: 499686 - DNA, 1203 bp, Stenotrophomonas maltophilia
atgtcccgcccattgctcaccctgctggcggtcgcggccggcgccagcgttgccaacgtctactacgcgcaaccgctgctggatcggctggcacaggccttcgcactggaccgtgccgtggcgggcgcagtgttggcggcaacccaggccggcagtgtgctggcattgctgggcctgctgccgctcgccgatcgcggtgaccggcgacgcctgctgcggatgcagttgatggcgctggtgctggccctgctgtggctggcagcggcacgcacggccggttggctgttgtcgggcatgctgctggccgggctgttgggcaccgcgctgacccagggcttgatcgcctataccgccacgcttgcgccgcccgagcagcgcgggcgcctggtgggcgtggtgcagggcggcgtgttcatcggcctgttgctggcgcgcgttgtatcgggcgcggtcgcggccaccgtcggctggcgggcggtctatctgctgtcggcagcgctgatggcggccctggccgtgctgctgtggcggcgcctgccggcggtgccggtgccggcggtaccaccgcgctggcgcgaactgctgggttcgatgctgggcatgctgcgccgggaccgcgcgctgcgcgagcgtgggccgctggcattgctgctgtttgctggcctcaacgtgttctgggcggcggtgccgctgccgttgtcggcgcctccgttgcagtggtccaccgcggccatcggcgcactgggcctggccggcgtagtgggcgccttgatggcggcgcgggtcgggcactggatggaccgcggtttcgccggtcgggtcagtcttggcgcgttgctgctgatgctggccgcgtggtggccgctgctgggcctgccgcagtcgctgtcgttgctgctgctgggcgtgatcgtgctcgacctcggtgggcaggcactgcacgtatcgaaccaggcgctgctgctgcgtgcaccggcagaacagcatgggcgcctggtggcgttgtacatgctgttctatgcagtgggcagtggtgccggtgcggctgccgggccctggatgcaggcccggcatggctggcctgcggtgtgcctgctgggtgcaggcatcgcggcgctggcgctgctgtggtgggcagcatggcgggtggtggcgtccaatgcatcggctggcgcgcggaacggtagagccgactgtcggtag

SEQ ID NO: 499687 - DNA, 333 bp, Stenotrophomonas maltophilia
ttgcacaacctgatcgacaacgccattgccttctcaccgcccggcgcggacatcgcactgcaggccgaggtggacgggcagggcgtgcgcctgcaggtggcggatcgcggtgccggcattcccgactacgcgcgcgaacgggtgttcgaacgcttctattcgcttgcccgcccgggcagcggccggcgcagttccggcctgggcctgccgttcgtgcaggaggtcgcgcgcctgcacgatggtcgcgccagcctcgacgcgcgcgacggcggtggcaccgtggccagcctttggctgccgttgtcagtgccgggccagcgtccgcgccgctga

SEQ ID NO: 499688 - DNA, 411 bp, Stenotrophomonas maltophilia
atgagctggcgccagggattgcggcaacgggcgcggcagggcattccggccctgctggaagtggatgcactgctgcaggcacatggcgtgctggcggccctgccgggggcacggatcgcccccggcctggtccgcttccagctggccgcggtgacctgcgagggattgcagggcaagggcctggcctggttgcagggcgcgcggcagggacgcggtgcgctggcggggaaggtgccgcgctaccggccatggaaggccggggcggaagcacttgcggaaatcggcatcggtggcctgcccgatgactggcccgcgcatgcggcggtgtatggctgcagcagcatcgaccggcggcactggttgctgctgctgccggagcgggcgcagctgtggctggggtggagtgggtga

SEQ ID NO: 499689 - DNA, 237 bp, Stenotrophomonas maltophilia
atgaaaatcacggactttctggtaatggatcactatggcgaccagatcgacgccgatccccatggcaacaacattgcattctgctgtttcgactgcgggcatcccatactggccgtcgcgctggagaaccaacgtgggtttgatgaagtgcatccggcggcatgccggggctgcaaggtgaagtactttcttgatatccgcagcaatgccgggaagctgtacatacaccggatgtga

SEQ ID NO: 499690 - DNA, 816 bp, Stenotrophomonas maltophilia
gtgaggccgctgtgcgcgtggacgcgcacgctggcagtgccggtgctgctgttggcactggcagcctgcgccaagaacggtgagcgcgctgcagaggcgggcgcgaccgcggccgatgccgctgttgcttcgccggaaggcgcattcctggcctacgaacatgacgtgcaggtgcagctggaggcggcgcagatcgcaccgcgcatccagcagatcgcccaggcctgccagagcgcgaagttcggcgactgtgcagtgttgcaggtcgaccagcgcggcggcgagcagcccagcggtgaagtgaaggtgcgcatcgcgccgaagggcaccgagccgctgatcgcgatggccggtgagggcggcacgctgcagtcgcgcaacacgcgcgcggaggacctcgcgcaggaagtagcggacaccgcgctgaccaagtcccggctggagaaggaacacgcgcggctgttgtcctaccaggaccgcaaggacctgaagatcgaggacctgatggcgatcaccacgcggctgtcggagatagaagcaggcgtcgagcaggccaacaaggatgccgcacagcagcgtcggcgcatcgatacccagctggtgacgatccacttcgacaccacctcgggccagcgcagccgcagcgagatcggcgaggcgctgagcgagtcgggcagaatcctcagcggcagcattgcgttcctgatccgcgccgtcgccgcgttgctgccggtgggtgtgctggccctggtcgtggcctggggtgtgcgggcgtggtggcgtcgccgccgtcgcacgctgccgcccacccgctga

SEQ ID NO: 499691 - DNA, 945 bp, Stenotrophomonas maltophilia
atgcagctacgcccttccctgctccccgcactggccgtgttcgcggtcgccgcgcgccaccagaacttcgcccaggccgcgcaggagctgcacctgaccgccagcgcggtcagccaccatgtgcgccggctggaagaagtgctggaagtacgcctgttcctgcgccacgcccgcggcgtgcgcctgaccgccgagggccggcaactggccgacgccgccagcgccgccttcaccgatgttgcggccgtcgcccatcacctgcagccggatgccgacagcgtgccgttgcggatcaccacgctgcgctcgctctcctactgctggctgctgccacggctgccgcgcttcacccaggcccatccgcacatccgcatcgagctgcacaccggcagcggcctggatcgctacgacgacaatgggccggaagtcggcatccgctacggtctgggccagtggccgggcctgcgtgcgcagcacctgatggacgactacctgttcccggtggcctcgccggcgctggccggggtcgaagcactggtcgattcggcgcgcatcgccgacctgccgctgctgaccgacctgtcgccgcagggctggcgcgactggttccgtcatgccggcgtgcgcccgccctcgccgctgccgccaatgcacaccttcgccgacagcaccgatgcgatgcgtgcagcggtgtacggcatgggcgcggtgctggcacgtacccacatcgcgcagccctacctgcagcgctacgaggtggtacgcctgcccggcccggcgctgaaggcgcgctatgcgtatcacgtggtgcacgccgaaggacaaccgccgagcccggccgcacgcctgttcatcgactggttgctggagcaggcgcaggacgaacgcacgccgattcccgcattgccggacagcctgctcggacgcccggccacacgcgcctga

SEQ ID NO: 499692 - DNA, 576 bp, Stenotrophomonas maltophilia
gtgaccactgccccgggcatcgaccccggccgggaacgaccgtcgccgttcccggccagcgacagcgccgccgacattgccgccaaggtcgccgaggtgcaggcgttctttgacgtcagccaacagacggcgcgtcaggcggtcgccgaggcgcagcagcacgcattgatggaacgtttgaaagcgcgccacgcggcacgcctcgccggaatctgggtggacaacgcggcaggttggaacgtcgtcgttcgactgactggcccagcacccgcggccgatgagacacatccaggggcggatggcccgcaacgcgtgcgctacatcaccggcgccgcgatgaccgaagcggagatgcagcgccgcctgcacgcacagcgggactggctgctggcccagctgcccgacctgttcggctatagcctggatgtcacgaccggggaactggaggttgagctgcgggataccccggccaaccgcgcgacggcggcggccgtgcgcgatcacctgcaggtgcaactgggctatccggtcaggctgcgctggtacccagcgaccacgcgcaggcatccgccctga

SEQ ID NO: 499693 - DNA, 258 bp, Stenotrophomonas maltophilia
atgcagttccaatggaacgtcatccgccgccatttcaagggcatgaacgaagtcatcctgcgcgaccttgatgtagacagcgaggaatgcgaaaaaatcacatcgatactgaacagcaaaagcgcaagcaagccccctcatcagacgcccattcccatcttcaaatggatggagaatatcgatggccagcaggagtgcataaagacgtggagcgggtttcatttccgcaatcggcccacagatcttcgaaaggtgtga

SEQ ID NO: 499694 - DNA, 3768 bp, Stenotrophomonas maltophilia
atgaacactcgcaaccgcaggatcctggcaggcgttggccttgccgtcttggccgctggcggctatctggcgcataccttgtttgccgcacaggcgcagggcgtgctggcacaggagccgatgaacgtgcagacgcgcgcgacaccggcgttcatcatggcggtggacgattcgggttcgatgaacttcgaacgcatgttccccggtggtgacggccgcatgcgctggaacagcaacaccaacagcttcttcaacaacgatggaagcttcttcagcgtgggctcggcgtgcgccagcaactcggtggactgttacctctacctgtatccgcacgcggagttcaacaaggaatactcgccaggccgcgccattccgccgctggatatctacggcttcgcgcgttcgcatgtctacaacgccagttacttcaacccggcagtgacctatcggccgtggaccaatgccgatggcacgctgtgggcagatgcctccatcacccagacccgcgccgatccccggtccggccagcgcggctacaacgccgtgtacaacatgaccgtcaatcgggccgacacgtcggaaaagttccagttcgtcaacggtatgcggattcccgacctttccggtaccggcaatgaatactatgtcgacagctggtgggatggtggatggaagaccgccgcgatcagcaacaccggcaataccacatactccatcagttattttccggcgaccttctacctgccggctgcagcgcctgcaccggacggatacaagaccgacgacgccagtcgcccggtgattaccggtgcctgtggtccgggctgcaacctgcgtcgctaccagatcaagccgggcaattactcgagtccggccgcctacaacgccgcgatccagaatttcgccaactggttccagtatcaccgcaaccgcgtgctggccatcgtcggttcgtcgaccgccgccctggtgagcgtggatacgatgcgggtgggctacttcaccatcaacaagctcagcaacgcgaccatgtatgacatggtcaccaaccgagctgacctctacaagcagatttatgcgctgacggccaacggcggcacgcccaaccgtcgcgcggtggagtatctggtcgaccagttccgtcgtaccgacgccgatgcccccgtgcagctggcctgccagcgtaatggcggcatgctgttcaccgatggctacaccaactccggcaatgcaccgagcgcgtccttcggtgacgccgactcggtgaactcgacccacctgccgtccattccgttctccgacggctacagcaataccatcgccgacatcgccgcggcggcttatgcaggcgcccggacccccctgcgcaccgggaccagcttcccggcggggcaggtgccggtcagtgacaagtgcagctccctggacaagagcagcccggactggaagcgcctggactgccagaccgacctgcacatgaacttctacggcgtgaccctgggcgcgcagggcaagatctacggcgtcaaccaggccgcaaccgccgatccgtacaagacggcgccgaactgggccggcaatggcaatccgctggacgtcgatgacggtaccgtcatcgatgagctgtggcatgcggccgtcaacagccgtggcgaattcatcaacgcgcagaccccggcggacgtcaccgaggccatgcgtcgggtgctgtcctcgatcagtggtggtgcgtcgccttcaggcacgatcggtatcagtggtgcgcgcatcggcaccggctcactggcggtcaccccacgctatgacatcaccaacagcggcaccgactggtcgagcaagctgactgcggccagcgtcaaggtcaacgccgaccaggtcgcggagctcaccgaggtgtgggaagcctccagccgcctgacgtcgtccggccgccggatcgtggccaacaagctgggttcgccggtggacttcaacagtgcccgtatcagcctgcaggatctgtgcagcaaacccgacggcaagtacgcgtcgatgctggtctgctccaccgacaagctgacgacgatcaaggccgatctggccagtgccatcaactatctcagtgccgacagctccaccgaggtccgcaacggcggcaagtatcgtgaccggaccacgccgctgggtgacatcgtcaattcggcgccggtggtcagctcgccgctggacgactacgggtaccgccagctcggcggcacctacgccaagagctacaccgactacctggcgaccaaggccaagtcccagcggtacatggtctatgttggtgccaatgacggcatgctgcacgccttcgatggcggcatgaaggccgatgccaagcaggacggcaccggcggcacggagagctttgcctacatcccggccaccgcgctggggcacatggccaacctgctgttcccctacaagtccgatacggccgaccagaccttccgccaccgctattacgtcgatggcccgattgccgtggccgatacctacaatggcaccgcgtggcagaccagcctggtgggcaccacgggggcaggtggccgttcggtgttcgcgctggacgtcaccacgccgggcagcttcggcaccggcaacgtgctgtgggaaatcagcgacatcaacgcgtcgctgagggacgaggtgcgcaacaacatcggattcgtgctgggcaagccggtgatcgtgccggtgaagagcggcaccggcgtggcctggaaggcgatcttcggcaatgggtacggcagcgccaatggcaaggcggtgctgttcgtggtcgacatggccagtggcgacatccggatgatcgaagccgtcgagggtacgtcaggcgccggcatctccgggagcaacggactgggcaatgttgtggttgtcgatcgctggaccggtaccaaccaggatgcgcgcggccgtgatggactggccgacaccgtctatgccgccgatcagcgtggcgccgtgtggaagttcgacctgaccagcagtgcgaacaccacgctgaccgtgccgatgttcaccagccaggttgcccaggactcctccaccaagacctaccgccagccgatcaccggtggcatgaccgctgccaccggtccttcgggcggcgtgatgctctatttcggcaccggcagcttctccttcaccagcgacaaggatgacaaggcgcagcaggcgctgtacgccgtgaacgatctgtcggggaagacggtgacctcgacggtgaccgctgccaacctggttccgtacacggccgcggccgccactgcaggcgttgatgaacgcaagatcacggcggggacggccccggcaaatgcccggggctggatgatccagctgcctgccggcaatggcgagcgtgcggtgggcaacccgatcctggtcagtggcatcgtcttcatgccgacctacgtgcccaacatgcagtcggtaggctgttcgaccagcggttcgaactggctgttcgggctgtcgtcgatcagcggcttgccgatgttggagaacgtgcgctatggctcgccgaccggcagccggcccggggcagcgaccgccgccatcgcgttgaagaccggaggaactgcgccggtccgtgacgtttcgctgtcggtgctgccgcgtccgacggacaacaaggcgccgcccggaggcagctcctgctggatggccgtcggcgcggcgggcagccagtcgctgtatctgccttacccttgcggtcgccagtcctggcgccagctccagtaa

SEQ ID NO: 499695 - DNA, 207 bp, Stenotrophomonas maltophilia
atggtcatcaccgtccaatgcactgcccagcgctggtccgtactgcacccgcaggcacgcgaggccacccgctacgcacgtggcgccgacgcctttgacgccgccgccgcgctggccctggagcatcaccgccgcaccggccagcgcagcacggtgcgggtcgcggcgcttggcaatacggtagacgcgcttcatgtcggagagtga

SEQ ID NO: 499696 - DNA, 213 bp, Stenotrophomonas maltophilia
atgcgcatcctgatcctgtccacgtcgctgctggccagcctgctgctggcggcctgccagcggccgcccacgccgaacccggagaagccaccggtgccacgagcgatgtcgcgtgcgatcaacgacccgctggaccgcgccaaggacgtgcagaaaaccgtcgatgatgccgctgcgcgtgagcgcaaggccgaagcagacgcgaggcaatga

SEQ ID NO: 499697 - DNA, 330 bp, Stenotrophomonas maltophilia
atggggctgacggagattgacggtgggtgtggctggggtggctcgggtacgcgtggttgcgacttccccccgttgttggactgggacgatgtgctgcgtgatgaacgcgaggatccactggggttcgcccgacgagcgacattggcattgctgacacagtcgggtgccggactgcttgctggcttcggcggcggcaaccagattgggctggaagaggccaggaggacggtggcgctgttccacgcccacttgcggcgactggagtggttcgcggaagtggcggagaagcgattggggcgcgttgctgagactcttgatgctaccgggtag

SEQ ID NO: 499698 - DNA, 255 bp, Stenotrophomonas maltophilia
atgggcgcggctgagaacatcccagaggtcctgctgaagctcgagcaggttgaagcccagaccggaatgaagaagagctacatctaccgcgagatggagaggggcaccttcccaccaaagcacaaggtcggtggcggcactcgctggtaccagagcgacattcagcgttggattcgcgcacgcaggaacgctccgcagtggacgcccgaagatgcagggcaacccgcggccaactgcgacagcagcggagcgtaa

SEQ ID NO: 499699 - DNA, 411 bp, Stenotrophomonas maltophilia
ttgaacgtcgagcacatcatccacgccgcaggtgaccggtcagcactggtcaatcagcagcgcgcggccattgcgcttgcagcaacgctcgaaactgcgctgaccagcacgcatcccgccagcggcggtggccgcgcactgaccttcacgtttgccggcgcgccgcagctgcatgccgcgtgcgacgcctggcgcgcatacgccctcgccacgatcgatacgccggcgccagaagcggcgacagcgacccagcggcttacagcccagatcggactcgccctcttcaatgaccccaccatggacctgacactgatcgcgagcctggtaaccactgcacgctcgaattcacagaccgcgctgctgccggcggtcgccaatgaagcaacggaggtcggctatgggcgcggctga

SEQ ID NO: 499700 - DNA, 582 bp, Stenotrophomonas maltophilia
ttgagcaccaacaccagcatcgatccgccccacattaagggcgcccccatcgtgagcgacacgctgaggtccatgcgcgacgcggcacggacgggcgatcctatcactgcagcaatcgttgccgagtggttcctggctctccgcaaccaactgttcgccgatcaacgtccagtaaggcttgaggaattgggcacaggaacgccttactggatccagatcgatgagcagcagtggcatcttgcgcgaaagcgcggtcgaccggtccgtgctctgtacgttcacccgctgccgggagagcgctccacgagccgccgtgaccacaagtggtcggccgatcgcacccactgcgtcgtttgcaatgaccctttcgattgggccgaggcgtattgcaatccgccccgagcgccgcagccattccccatcaaagtccagccgttcaaccccagctggttcctacctgcccttgaacggcttgagcgggcactgaagcgcgagagcaagcaggagcgggacaagtggaaccgtgaaattgcccagttgcgcaagtcgatcgaacagcacacgaaggagaaattgccttga

SEQ ID NO: 499701 - DNA, 324 bp, Stenotrophomonas maltophilia
atgagccccggccgcaacgccgcttccatccgggcagccctacgcggccgcgccccttcccacgtgtcggcgcgcgacattatccgccggcattgccgggagcacggcaagcaacttgccagccttgctcctgcatggggctgtaaggagttcagcgtgtggcgcgcattcggtcgaaccacgcgtccgctgcagccgcaccaagtggaaggtgcgatctcagtcctgcaactggacgagttcgatgccaacgaactgcgtctgcgcgcagcgcgtgaggccggctggaagatcgacccgtcgatgctgctggaggaagcttga

SEQ ID NO: 499702 - DNA, 1191 bp, Stenotrophomonas maltophilia
atgatccacatcggagactgcctggaagtgatgggcggcatggcagagaactcggtcgacgccatcgtgaccgatccaccctacggcctttcgttcatgggcaagcgctgggattacgacgtgcccagcaccgaaatatgggccgagtgcctgcgtgtgttgaagccgggcggccatctgctggccttcgccggcacccgcactcagcaccgcatggccgtgcgcatcgaggatgccggcttcgagatacgcgacatgatcgcgtgggtctacggctcggggttcccgaagtcgcataacgggccctggggcggaactgcgctgaaaccggctatcgagccgataaccgtggctcgcaagccgctgtccggcactgtatctgcaacctgggaggaacacggcaccggcgggttaaacatcgacgcttgccggatcgagaccgcagacaagctcggtggtggtgaccaatccgcagagcccaaggtggggccagagggctggcatcgcccatggatgcaggatgagcatgcgaaggccgcccacgctgagcgctgtaatgccaatgtagccaaggccgaggcgctgggtcgatggccggccaacttgattcacgatggcagcggggaagtactcgcggcgttccctgcagcgtcgggacagaaagccgacctcagtgacgacggggaaagcacccggttctcgaacgtgtacgagggcggaccgcttccgcgcggccgcgaagcgagttccaacagcactaatcagggagcagtcggcttcaacatgcgacctggcgcacgccgtttggacagcggtagtgctgcccggttcttttactgtgccaaggccactcgcgaagaccgcaacgatggcctcgattctgggctggccccagccgtctccgccggcgcgacgatgcgcgatcgcgagactgccaactggcaggcgcggaacggcaaccaccaccccaccgtgaagccgacggatctcatgcgctacctatgccgcttggtcacgccagccggtggcctggtgctggaccctttcatgggaagcggcagcaccggcaaggccgcagtactcgagggcctacagttcatcggaattgagctggacccagcctatgccgcgatcgccgaggcgcgcatccgcgtcgcgcaacctggactttcctttggagacgtcgcatga

SEQ ID NO: 499703 - DNA, 2073 bp, Stenotrophomonas maltophilia
atggctgacggctcccgctccttcaacttccctgccccgcagcgctcacgcctgcgcccaggcgaaatcgtggtcgacctgttcgccggcggcggcggcgcatcggaaggcctcaagcaggccttgggcatcgatcccgccctggcctacaaccacgatgagctggccatcggcatgcacgccgcgaaccacccgctcacccagcaccaccgcgaggatatctggcacgccgaccctcgcgtggacgtggctggacgcccaatcggctggttccatgcctccccggactgcacgcactttagccaggccaagggcggccagccccgcagccggaagacccgcgccctgtcgtgggtggtgttgaagtggatcggcatgctcctgcgcgctgacctgctcaagggcaccaacacggcgccgcgcatcttctccatggagaacgtgtggcagatcctcacgtgggggccgctggtggccaaacgctgcaaggtcaccgggcgcgtcatcaagatggacggcaccgtttcagcgcgcggcgagcgtgttcctgtggagaaccagcagctggtgccggacaagcgccacagtggacgcacctggcgccagttcgttgccgcccttcgtgcgctcggctatgtggtcgagtggcgcaagctggtggccagcgattacggcgccggcaccagccgcgaacgactgttcttgctcgggcgccgggacggcgagcccatcgtgtggcccgctgccagccacggccccaatccgggccagacgccgaccgtcaccgctgccgactgcctggacttctccatcccctgcccctccatcttcacccgcgcccgcccgctggccgacgccaccatgcgccgcatcgccaagggcgtcatgcgccacgtcatcaaatcggccgatccgttcgttgtccccgtgacgcaccagggcggcgaccgcgtgcatgacgtgcgcgagcccatgcgcacgatcactgccgccaaccgcggcgagttgatgctggccgcgccggaactggcaccgttcctcactgagcacgccaacgccagcacgcaacgcacgatggcagcaaacgaaccactgcgcacaatgtgcgccgaggtgaagggaggccatttttcggtggtatcgcccatcttggcaggcgtcggcggccgtgctggtcagtccgagccgcgttcgggcggcgaaccgctctacacgatgaccaccaaggcagacaccgcgctggttgcgccgcacctggtgaagttccggggggacagcgtcggcacggccgccaccgaaccggtgccgacgatcacttctggtgctggcgccgcacgccccgccggtgccgcgcatgccctcggcgtggccgctgcttccctggtcaccctgcggcggaacatggtcggcgccgacgcacgcacgccgctcaccaccgtggccgcccaggccgagcaccacgcgctggcgactgcgttcctggagcaggccaacggcggtttctaccagggcgcgggcaatgacgcacgtgatccagtgagcaccatcaccgccagcggcagccagcaacggctggtaagcgtcgagatggcagcacgacggtgcgcgggctgcgggacctgcgctccagcaccagggtgcggagacctctgccgttcgtgcttcgacagcagcgaaccggagatctgtcgcctgtcgccagaacaggaggcaggagccctgcgcgtagccgccttcttggtgaagtactacggcagcggcatcgccgtggatctgcgcgactctctggacacggtcaccaccaaggatcgcctggcgctggtcaccgtccacatccaaggcacgccctacgtcatcgtggatatcggcctgcgcatgctcaagccgcacgagttgtaccgcgcgcagggtttcccaaccgggtacatcatcgatcgcacggccaacggaacgccgctcacaaccagcgccgccgtccgcatggttggcaacagcgtcagcccgccgccgctgcgcgccttggcagaggccaatcttgaccgggtgccggccgacatggcggtggctgcgtga

SEQ ID NO: 499704 - DNA, 321 bp, Stenotrophomonas maltophilia
atgaccccgcccatggctgaccagctgctcaccgccccggcccgggcatcggtgccctattccaacggcccgatctggaacgcgtttggcctcacgcacgccgcatacctggtggtgccgcgtcgcactctgcagtcgatgccacaggaatggcaggaacgcttcgtcgccctgatggccgaggcgtacgaccgcctccccaactgcgcattccccgagtacagcgtgcagcgcaaggaaaacggccgattcatcgaagacccgctccgtgactaccgacacaccggccccatcgctcccaaggattccaccaatggctga

SEQ ID NO: 499705 - DNA, 228 bp, Stenotrophomonas maltophilia
atgacgacctactctgctatccacttcaacgtgtctatagaaacatctggtactgaccccttcgtcgccagaggatttgtgcatcctcagaagtccatggaaccattgcgccaggtctttggagaaggagcgacgaaagcggaagccatcgctgccgcgcgccaaatggctgacttggcggctagcgagatgtggctggatcctcgctacaaacgtcacatcgactga

SEQ ID NO: 499706 - DNA, 699 bp, Stenotrophomonas maltophilia
gtgaccgccgacaagacccccgccaccctggcgaccgcgaagcacggcggatgcgtgcagttggccacctccgagcgcgagcggtttgaggcgtggcattgcgagaagttcaagacgagctggcagactggcgcgccgacgcgcgacatgcataacggcgtgtatgcggaaaactacgggccagcagagcagcaggcacgatgggaactgtggcaagccgcatggaaatccgccctctccgcccagccctccccgggtggtcaggatgtgctggcaaccgtcgaggaactggcagaactcaatcgcgcgtgcgcggcattggaccccgactataagggtccgacagacgctgccgttcaagtcctgatcgcagccctcgccgcccgccagccggtgggggagccggtggcgtggatgacgcaccacgacgagccgatgttgtatccgacgttcgcggaagccgctgcgtattgcgaggacgacgaaccaccgatcccgctctacgccgcccagctcgcgcagcccgtggacctggggccggtgcgttcggccctgcaggcggccgccgccttgtgcgactgctgcgcgtcggtcgacggctattcccgcagtgagctgaacgccttcggccagaacatgcgcagccagttcaccgatgctctggccctgatcgacagccaggcgttgggcaatggctga

SEQ ID NO: 499707 - DNA, 456 bp, Stenotrophomonas maltophilia
atgaaacagcctcagcccagcaccaaccttgcacccgctggtgcgccgattccggacagcgcgatcgaagcgttccgcgctgcctacgccacccacggcacccacaagggctacgcagatgccatccgcgccggcctggccgccgcagcgccgctgatcagccaagacgccatgctctcgttggagcaggacgcgcacaactacctggtgcaacagctggacgtggcactgaatggtgaggccaacgcgtcgcgcgcgcctgcgctgcccgacctgctgagccagtgccaggccgaagcccggcgccgctgcggtcccgtgttgaccacgctgccgatcagtgcgcagcaccacctgcgacaggttttcaaagacttggccgacggcgcccgcagcttgagcgacagcgcagtgcgtgaagtggtgctgatgggtacgacagaggtgcgcctgtga

SEQ ID NO: 499708 - DNA, 207 bp, Stenotrophomonas maltophilia
gtgaaccacaggaaccagctcgacatcttcgaccacgacccagcccggttggccaaagcgaaccgtgcagcagccgagcatgcgctgaccgacccgttcttctctgcacaggtccgacaggaccggcacgactactacatcaccgaagccgagcgccttgaacgcctggcagccatggccgagaagccggccaccaccgcagcctga

SEQ ID NO: 499709 - DNA, 246 bp, Stenotrophomonas maltophilia
atggccggcctacgcttcctgggaggcggcatcgacgctgtgatcgccagcaccatccagcccacccccgagcagcgcctgcagcgctacagggtggcgctggctctgcatcccgaccgcttccacgcactgcgcgtgcacttcggagaggtgcagcagcgcgcgatcaaggccggacaccgcatcaactacgccgcttggcagaagcgcatgccagcgctctggccaccaatgagtcgcggctga

SEQ ID NO: 499710 - DNA, 225 bp, Stenotrophomonas maltophilia
gtgatcaccaccatcagcttccagctcgcccagcgcgcggcagtcgccgccaaggcggccgcaaccgccgcgacaggtatgggcttcgccccgaacctggtcgccgcagccgctgacgttgccgcgcgcgcagtgctggaacgccgcgccagtgccggccgagccatcgccgaagtgcgcaagagccttcgccgcatgctgcgggcacaaggtggtgctgcatga

SEQ ID NO: 499711 - DNA, 285 bp, Stenotrophomonas maltophilia
gtgatcaccggcctccgcaccgagccgcgcgccgcgatggttggcgggcagcgcctcccgctcagccccaccgaatcgaaggttctgcagctgatcatcgacgccggcgacaccccgatcagccgctttcagatcgagcgagagatctacggcgcctcaggccgcaagtcaaacaccgtcgaggtgaccatctgccgcctgcgccagaagctgctgcagcacggttaccgtatcaatgcgacgcgcacccgcggctacaccatcagccaaggcggtgcagcgtga

SEQ ID NO: 499712 - DNA, 516 bp, Stenotrophomonas maltophilia
atgcccctgaccctcagcacaaagcgcaccgcacgcgtcggcctggccgcactggcgtgcttcatcctcctgggcgtggtcgcctgggccaacccggccgagaatccggcagcgaccaacgtagacaccccggatgggctggtaatcaccagcccgcgtatctgcgcagcccttgccgtctacgagctggcagccgccgacgattggggcctgcgcgccacgatcgccagcaccagcctcaacgccttccgcaacgcagagcgtgtgccggactgcgcccccggaatcaccaaggccctcacccagaatttccagcctgcgcgctggcagatggccctcgacgcggccgacgccgtactgagcgggtcctatcaagtctccccggcggcatgcgtccgggccaatgcggttgtccccctgtcgaccgcagacggcaaagagccgagcgcctcaccggtgctggcccgggcgcagtgcgtcatgcatgaactggctttcgtggaggtgatcccgtga

SEQ ID NO: 499713 - DNA, 510 bp, Stenotrophomonas maltophilia
atggttggcgcgccgctgggcaccgaatgcccgcaagagcagattccgtatgccggatccgtctacaagctggaagctgcaaaaacagcgtgctgggctgcgttaggaatgcgaccgggtgcacgcaccgatacgcgcaacaacgacaacctgaccgtagtgccactcagcaacaaaaggccgactggcacaggatcggtcagcgccgtagtggtcaatggggtagtcgaaggtctatcagtatcgacagatggctttgtgcatgcccaggaactgttcgaacagctaaagcagaagttgggcacacccagtaagcaggacacggtgaaagtcatttccggtgtcggtgcgagcttcacgagtccccgtgcggtctgggaactgcctggtgcgtacgttcagttcaacggcatcgttggagcagtcaatacgggcatcatcctggtgtacaccgatgccgagaaggccagggaacaagcgcgccagcagcagcgcgctaaatccttctag

SEQ ID NO: 499714 - DNA, 384 bp, Stenotrophomonas maltophilia
atgaatcaggattacccggacgtggtccgggagctcgacatcgcagagtggcaggtccgccagcaactgggctttgtgcccgagggcgatcgcgtgagattggtcactgtgcgcggtgattcgatgtatccagacatcaagaacggcgatgtggtgttcgtggacgtcgccaaggactacttcgacggcgacgggctgtacctgatcaaccttcatgggctgacctacgtgaagcgcctacagctgttgcgcgacggtctgcacgtcatcagcaccaatcggaagtacctgagcgaagtcgtgccgccacaggaagcggatcagcttcatgtaggcggcaagattctgggacttgcgctgttgcgaagcgctcaggaagtctga

SEQ ID NO: 499715 - DNA, 237 bp, Stenotrophomonas maltophilia
atgccccggataaccaaggaagaagccattgccgcctttgacggcaatgccgccgcgcttgcgcgtgctctcggaatcaccccgtcggctgtctatcaatggccggatggtcagatcgatgacctgtgggcgctgaagctgcgtttcgtgctgatgcctgcccatttccaggcactcgaacgcccacctgaggccgaccccgacgccgaccggatcgttccggtagatgcggcctga

SEQ ID NO: 499716 - DNA, 603 bp, Stenotrophomonas maltophilia
atgaagcctgatcctcagtaccacgagccacggtccgcagtggtgtaccgccacacgaccgacgccatccgcaacagcggtcacacagatagcagcctggcccaggccatcgccgagcagtacatggcggacgtcgcacctggtgagcgaatcctgcagttccacacaggcgacgacgcggacagcaccgagcgcgcgctgaaggccaacgcccaaattgtgggccgaatccgcaacggcacggtcaagatgccggtggacctggaggaatcgtgggtccgcgcgctgccgccgcagtggcgtgacgcgtgttcccgtgaactggcgcagcgctatggcttcctcggcgcacgcattcccatgatggaaccgcatgccggcgtgctggctgtagcccgcctgtcggtggagttcggccacaccttggaggcgatcaccaacgtcttggccgacggccgcatctgtccgaaggacatcccagagctgcggcgcgcgctggacgagatcgggcagttggaggccgaactggttacggccaagcgctacgtctcgggtcacctgcaggatcttgcgccgcgtgcagtgcacggagttcaacgatga

SEQ ID NO: 499717 - DNA, 327 bp, Stenotrophomonas maltophilia
atgacgcccgccgcgatggtcagctgggcaatcgcagttgtcggcgaattcgacagagcaggtcgccgcattcctgaaagcgtggtgccgctgctgcccatggtcgacgtggtcctctgggccaaagatcagccgcagccactgagtgtggacgcgctgcaggagcagttctgcctatccagggcaaccgcctatcgctggcgggttgcgctgaacgacctgcatgaccctgtggcagcgcgccgcaggctgccgggactgcggcagctgagcatggcactggcccgtgagatgcctgtacccacccagacagggccggcgcaatga

SEQ ID NO: 499718 - DNA, 222 bp, Stenotrophomonas maltophilia
atggaattcatgcgctgggcggttgagcgcgatcagttcccgactgtggaagccattgtccggcggttcgaagtgagccgcgcaaccgcataccgctggcgcaactacctgggcgagacctactgcttggagaccctgccaccgaacgagcatgagattgcccgtatcggcaaaccaggtgcgaaggctcgcgcgaagcaagttggcgggccaggccgatga

SEQ ID NO: 499719 - DNA, 1005 bp, Stenotrophomonas maltophilia
atgatctacttcgagatgttccccggcgactacctcaaggacacgacacggctgtgtctgacagaccatggcgtctacttcaaactgatgcttgcctactactcggaagagcaggcgctgccggagagcctggccgagctgtacgtcatcgccggcgcgatcacctctgctgacaaggcagcggtcaagaaggtcgccgaccgctacttccccgtggcagaggacggcctgcgccatagcaagcgctgtgacgaacagatcgccaaagcacagggccgcatagctgaagggcagggccgccgggaagaccggaaggccgcggaggcggagcggcaggcgcgcacgcgcgcgcggcgcacgatgttgtacgaggacctccgcaacgtgggagtcgtgcccagcggcatggcgaccatggcggaactgaaggcgttgcacgtcgcgcacgtgacgggcgacgagggcgtgaccttggaccagttgtcacgcgtgacatgtcacggagagtcacgcgttacaggtggtgtgaacacaggtgtgaacacgggtacccagaccccagtccccacttcttctactccagatacatcacagcacgctcaaggatctctgagcggtgtgaccgatgcggggcgtgcgtgcctgctgatgcggaaggctggttgccattcgtccaaccccagccatcccgatcttctggccgctctggccgagggcgtgaccccggagacgctgggtcacacggtcgctgaaggtctggcgcgatcgccaccgattacgaacccgttcccctgggcaatcagaaccgcccgcaaccgacacgccgccggcgcaacgccgacgaacaccaccaacaccggaggccccaatgcaaaccctcagctcggttctgccgaccacgtcgcagaggagcgacgcaaattcgaacagcgcacggcagttggcagccttggcggaacaggcggagacgtcatcgatgcagagttccagtgcgtccaacactga

SEQ ID NO: 499720 - DNA, 606 bp, Stenotrophomonas maltophilia
atgcagagttccagtgcgtccaacactgacccggaccagcgcgcggtgagcgccctgtggacgctgtgggagcgcatggccggcatgttccccggcaagtgggtgcgcgagaacggctctgcaccggtgaacaacgctggcaacctgaccaccgccggtgaattgtggttccaggtgatggccggcatcaccccacgtcaggtcgcggacggcttggccaattgcttgcgcagcgcgctgcagtggccgccgaacccgggtcagttccgttccatgtgcctcggcgttccggccctcgccgaggtcgacggccagatgcggccgggccaggcccacagcggtttcaccgtgctggtgcggtctaagctggatctgcacgcctatgccacggctgaaagcggagcgctgcagcagcgcatgctggccaatgcctacgagcgggcggtgaggcacgtcatggacggcggggccgtgcctgcgccggcagcggcgctaccagcgccgaagcccgagccgcaggtggtgcgcgatcgcgatgccgcgcgcagtgccatggcgcttgccgctgctgagctgggcttcggaggcgcgcatggagccggctga

SEQ ID NO: 499721 - DNA, 531 bp, Stenotrophomonas maltophilia
atggagccggctgatatccgcacctaccagcggcagctgattctgttctgccttggaatccacggcgacagcaccgcagctgaggcactggaactgatgggcaacgctgcgctggaagtgggcgcgccgcgagaggccatgctgctgaccaccgccgccgccgccggcctgctgcgcgaactggaccgtgacggcctggtgcgccgttgcgagaaccgcgacagtggccgagatggcaggcccgtggccacgtgggctgtcaccgactccggccgcgtggacactttgccgctcccgccctcgggacagcagcagttggccatgccgcagttggccccggcaccggcgcaccgcacgcgcggcggactgtcgcttgaccagctgatggggctgctcaacatcgagttcgactgcatgctcgagcagatggaccgggaacaccaggcagcgcagcagcgcgcccggcaggagttcgacgcgttccgccagcgtgcgatgcgcgtatggggtgcttcggaggcgtcggtctga

SEQ ID NO: 499722 - DNA, 513 bp, Stenotrophomonas maltophilia
atgccgccgaagaagacgtcccgccgctcgctgcgctacgccaccaccgaggatatgcctgcgggcatgcgtcgcctggtcgaggccagcacggcagcggcagcgccgccgcaggccaccacccgagcctatcggccggcggcagccgctcagccatctggcagcggcgatgccagcggcaaggtggcacgcggccgcccacgccatgtgcctggcgagatgaacaaaacagaagaggcctacgccgcccacctggcgctgcagctggccgctggcgcgatcgcatggttccgcttcgagtccgtgaagctgaagttggccgagaagacccatctgaccatcgatttcttcgtgatgacggcggccggcgaactggaggcccacgaggtcaagggctattgggaagaagacgcccgagtgaaggtgaaggttgccgctgcgatgtacccattccgattcctggcagtccagcgcgccgacggcggcggctggaaaacggaggtgttctcatga

SEQ ID NO: 499723 - DNA, 795 bp, Stenotrophomonas maltophilia
atgaacgcgatgatgattggcggggccaccgtgcgccgcgacgacgtgggcaggttctgcctgaatgatctgcaccaggcagccggcggcgccaagcggcaccagccgagcgactggcagcgcctgaagcaaaccgacgaactggtggccgaactggtcaattccggggaatcccgggtttacccggtgcactcggtggccgggcgctacggcggcagctacgtggtgcgcgagcttgtctacgcctacgccatgtggatcagccccagcttcagcctgcaggtgattcgcgcctatgacgcgctgatggccggggtgcctgcgcctgacccgatgcaggcactgaccgacccggcgacgctgcgcgcgctgctgctgtcctacagcgagaaggcagagatcctcgaggcgcgcgtgcagtaccaagagccacaggtccgcgcgctgctgcgcctgacccaggccgacggcgcattcaacatcaccaccgcggccaagatgctgcgggtccagccgcggcagctgttcgcctggctgtccgagcatggctggatctaccgccgcgccggcagcaagaactggctggcctaccagaaccgcctgcagcagggcgtgctagtgcacaaggcttgcgtgcagcggacggaggccgacgaggaacgcgtgcacgagcaggtgctggttacggctaagggcctgtcgcgcttggccgagagcatcgaccgcgggcagatgacctgggcacaggccgatgcggcgacagggctgcagctggcggctgaggtgaattcatga

SEQ ID NO: 499724 - DNA, 210 bp, Stenotrophomonas maltophilia
atgatcttccagccagtcagaggtctgggaatctcgaagccgcacatcaccttcgatcgctacttcgatgggtcgcagatggtgaaggtcgactactacccgatgtggccactagatgccggatggtcgcacgctgccggagaggatctggcagaagcatgggacgcacacatgctgcgatacgaagacgacgatgcggaggtgccgtga

SEQ ID NO: 499725 - DNA, 432 bp, Stenotrophomonas maltophilia
atgggcgtttcgatcgtcaggcagcgggacgttgcaccggtgaagccgggtaccgccatggaagagcagttgcagttgaagggaattggccggctgctggctgggttcgggtatcgctacggatccgaggtgcagctgcatcaggcactggccaccgttctggaccgggcgggccatgcgcacgtgcgcgagtaccggctggacgccagcaaccgcgctgacttctggctggatggcctcgtgatcgaggtgaaggtagccggctcgctcgctgatgccctgcggcaggtcggccgctacatcactctcccgcaggtgcgcggcgtgctgctggccaccaccgaacgctggggcgaacgcccgctcgtggcccggccggcctggcagggcaagcccttcaacatcatccgcctgaagaggcaggcactgtga

SEQ ID NO: 499726 - DNA, 1749 bp, Stenotrophomonas maltophilia
atgcagacgacctatggaaccctccagtacagcgccgccggcagcacttggcgggtgatctgcgagccgcaggtgcgtgcgcggatgaagcgtgtgtttccccgggtgcgtcagcacgccgcagagcacattgacctgtcggccacgccagagaacagccgggagctgcagtggttcacacagcgctaccccctgtcgatggatgcagacacccagcgcgcgctgcagcagctggccgacgagcatgtggacatggagcgcagcctgggcgacttgctggccggccgcgtgcagatcccggagttcaccctggccaagccgccgcgcgaataccaacgcgtggcgggggcgcagctgtccatccgtggcggcctgctgttggcggatgatctgggcctcggcaagacggttaccggcatctgtccgatggccgctccgggaaacctgccggcggtggtggtgtacccggcggcgctgccgaaccactggccggagaagctggccgagttcgcgcctcagctgcgcgtgcaccacatcaggaagggggcgccgtacccgctcgtgctgcagccgaagcagaggatcaaggatctgtgggacacgctgccagacgtaatcctggtcagctaccacaagctccgcgggtgggctgagacgttgggggagatcgcgcagtacgtggtgttcgaagaatgccagcagctgcgcagcccagacagcagcatccaccgcgcttgtcgctacttggccagccgcgcgcgcctgcgtatggggctgaccgccaccccgatctacaactacgggtgcgagttcttccacgtagtcgacccgctgctgccgggctgcctcggcacctatgacgagttcctccgggagtggtgcatctcagccccgggggagaaggccaagcttcaggacgctgagcagttcggccagtacctccggcggcaagggatcatgctgcgccgcacgcgtaaggaagtggggcgcgagttgccggcactgtcgaagatcccgcacgaggtcgaggctgatgccaaagcgctggacgccatcaccggggacgccgcagcgctggcgcggatcatcctccgggccaacgagcagtaccggggcgagaagatgcaggcagccggagagttcgaccggctgctgcgacaggcgacaggcgtggccaaggcaccctacgtggccgagttcgtcaggctgctgctggagagcggccagaaggtgttgctgttcgggtggcaccgggaggtctacaacatctggcaggagaagctggctgactacaaccctgtcatgtacaccggcagcgagtcgccgagccagaagcaggcagcgaaggaggcattcatcgccggagacagccacgtgatgctgatcagcctccgctctggggccggcatcgatgggttgcagcacgtgtgcagcaccgcggtgttcggcgagctggactggtcgcccggcgtgcacgagcagtgcatcggccgcgtgcaccgcgacggccagaccgagccggtcatggcgtacttcctgttgtccgacagcggcagcgacccgatcgtgtcggacgtgctcggggtcaagcgcgagcagatcgagggcgtgcgcagcccgggggaacacttggtggagcgtctggacgtaggcgagaaccagctgcgcgcgctggcccaacagttccttcaacagcagggcgcggccctggaaacaaccaaagttacaaccatggagacctcccgatga

SEQ ID NO: 499727 - DNA, 153 bp, Stenotrophomonas maltophilia
atgattctaaaattcctcagcctggatgaggcaacccaccacctgtacctggaaggaaaggagggccccatcaggtgccaggtcgacggcagcctgtgggaggtctggcaggacggccggtcccgctgggtcagcaactgcgaggtggcctga

SEQ ID NO: 499728 - DNA, 771 bp, Stenotrophomonas maltophilia
atgtcggcagtggccgtgcccgcggtggacctgacgccgtgtggcaactgcggcagcgacgacgtgcgcatgcgcgcgcggggcagtgccggcagccgccgcaccgcgcaagtggtgtgcgcgcgctgcagtgcccatggtgagctgtgcgtaggtgcagatgcagaagatcatgcggcccatgcatgggggcacaagccccacgtgcttccagcgccgccggcggccagggtggtgcgtggccgggtgccggtgccggagccaacactggtgcgtgacccgctcgagctgatcgcccgcatgctggtcggtggtagcttccgggagccatcggacggccggtcgaccatgccgcccctgactgcggcagatatcgccggcgcggtcggcatgatgcgcgactcagtcgccaagcaggcagtgctggcggtggcgctgcgcgggcagggggtgtccctgtcgtcgctggggcgctctctggccaggcgggtgatgcggcagatccaatggcagcgacgcagcggcgcaaagcctgcgctgcgaatggatgacccggccgaccgctggcgaatgaggctggtgctgcaggacgcggtgaacgacctggtgtggcccgaagggaagattgccgcacaggatgctgccaaggcggcaaagatgcggaagggtgattacctgcgcgtgtatgggatcgccgccgcggcgcttcgccaagcgctggaagatgggcggaaggaattcagcagcagagtgttcaatggtgcggactaa

SEQ ID NO: 499729 - DNA, 216 bp, Stenotrophomonas maltophilia
atgccgagaatgatctacgtacagaatgttggctttgacgccaatgacctttcttcatacgagtacgtcaaaaacgccaagcgtgttgacgtataccttaaaacgggaaaggaattttcctttctgtacagcactgaggaagagatgagtcaggccttcaacaagatcaaggtcgacctgatcgaggcagccagagacgacacgtccggtgcctga

SEQ ID NO: 499730 - DNA, 717 bp, Stenotrophomonas maltophilia
gtgaaacacctgctacccctgatcaaccagcgggaccacacctgctacgtcgaagccttcgcgggcagtgctgcgatgctgttcgaacgctcgccggcgaagatcgaggtgctcaacgacacgcatggcgaacttgtacggctgttccgtgttgtggcgaaccacctggacgaattcgttcggcacttccgctggtctctgaccagtcgtgagatgtaccgatgggcacagctgcagcacgtcgacacgctgaccgacatccaacgcgcggcccggttctactacctacagaagctcagctttggcgggaaggtggaagggcaaacgctcggggtgggccccaccggcacgaagcggatcaacctgctccggttggaacaggacctgagcgatgcccatctgcggctgcatggagtggtgatcgagcagttgacctggcagcggtgcattgaaaagtacgaccggcccgagacgctcttctttcttgatccgccgtactggcagaccacaggctatggccaggcattcccgctgcaagagtacgagcagctggccgccgtgatgggcgcgttgaagggtagggcgatcctcaccatcaacgaccaccctcagatgcgcgcgttgttcgatcgattccaccgcgtcagcgtgcctattcgatacacagtcggcggcggtgctggggtagcacgcactgaactgatctacaccacgtag

SEQ ID NO: 499731 - DNA, 513 bp, Stenotrophomonas maltophilia
atggccaagatcaccgctcaacaggcaggcggtaccaacgtcgttgccttcctggacatgctggcgtggtcggagggtaccagcaccagccccgcaacgaagaatcagggttacgacgtgatcgtgactggtgccgatcgtgtgccggagatcttcaccgactactcggtgcacccgttctcccgggggcggaaatccaaggccatcaaccgcaagggcctgacctccaacgcatctggtcgctaccagttcatgctgaaggactatgcccactaccgcgctctgttgaagctgccggacttcgggccgctgtcgcaggatctctgggcaatccagttgatccgcgagcgccgcgcacttccgttgatccaggctgggcgcatcaccgatgcaattcaggccgtgcgcaacatctgggcgagcctgccgggtgctggctacggacagccggaacacgccgtcgagaagctgctggctgcatacagcaaggctggcggggcagtcgcgccgtga

SEQ ID NO: 499732 - DNA, 456 bp, Stenotrophomonas maltophilia
gtgaccgagcccgtgagcaccttcaagatcgtcgtcgggacgttcaccgccgccgttgtggcaccggcaaccgcagacgcactacgtgaggcagagcgaatcatcctcggcgttccgcagtcagtactgctgcttgcattggccggcgcgctgatcggtgtgctgatccttccggacaaggacgctgggcgggtggcggcagacgccaataggctccgccggcatcggctgctgcaaacggcagctcgctgggccgcgctggccgttgcggtcgcagcgtacgcagttcttgcagcctgggtggtggccatcgcggcatggatctggccccagctcgccggtgcaccgcagctgccgctggcgggcatctccggcgttctgatccgccggctgctgcccggctacgtgcgcatggtggagaaagccaccggcgccatcggaggcgataagccatga

SEQ ID NO: 499733 - DNA, 483 bp, Stenotrophomonas maltophilia
atgagcgtactgattcgattccttcgtgccgcgtggggcttggtcattggcgcggccgccgacgcactacagtggctgagcaagcccggcagcaagattaaggtggtatgcgcggtgctggccttcggttgcgcggtgtcagggctgactgcctacgagaaagaggagaagatccgcgacctgagcgcccaggtgatcaaggtccgggccgactgggacgcagatgcggctcgactgaaggccgacgtggatacccgcgatcaacgcctggccgaggtcgccaccgcgcttagggcagaggccgagaagctggaagccctgaaggcagagagcgcggcggcactgcaggcactcgccggcaagatcgaggcgtccgagaaggaagcgtccacctggcgcggccgctatgagcagcggcccgacacctgcaaggcggcgctggagctgcttgattccgcctgcccagcattgaaggggtactga

SEQ ID NO: 499734 - DNA, 282 bp, Stenotrophomonas maltophilia
atgcgcgtcatcgtggttgtcacagctgcgctactggctgcatgccaagccgcacctaccaagccgaatccgcctgcgcctgccttgatcaaggttccggtggctacctatgtccccatcgatgccgccctgaccaagcgctgtagctgggtgcgggacggtaagccctcggcagtgttcgatgtgagcaacggccgcaagcgctgcctggtgcagtacgaggcgcagttcgatgcgatcaaccaagtgcagggcaagccggctgcggaggcggggagctga

SEQ ID NO: 499735 - DNA, 504 bp, Stenotrophomonas maltophilia
atggctgacatccacgaattcaccaaaggctggtccgtggccaggctggcggatgagttcgggatggaccgccgaacggccagcaagcgtctaaaggaggccggcgttccgccgctgaccaagcgggcggggcacgacgtctaccgcttggccgatgcagcccccgcgctggtcaatccgggcgctgcagcattcggtgctgagggcgttgtcgacccgcgcgacctacctccgatggagcggcgcgcctactaccagtcggagaacgaacgactgaaggtcgaatcgaccatcgggcagctggtgccggccgctgaggtcgaggcggattacgccgagctggtcaagaaggtcgtgcagttcttcgacacgctcccagatgtgctcgagcgcaaggccgggctcactccggagcaggtagtcaaggtccaggacgagtgcgatcgcgtccggcaatccatgtacgagggcatcaccgatgacgacgtacgcgacagcgcgtag

SEQ ID NO: 499736 - DNA, 2088 bp, Stenotrophomonas maltophilia
atgacgacgtacgcgacagcgcgtagcgtgcgccagggcgttgccgagatgatcaggccgccgcgccgcatcagggtgagcgagggtgcgcgggtgctgcaggtggccaatgccgccggcgccgctggagcctgggatccggataccacgccctacatggtcgagccgttggacaccaccggcagccgccactacgaggctgtggtgttcgtagggccggcgcggtcgggcaagaccatctcgctgatcgatgcgcgcctggcgtacctgattacgtgcaacccggccgacgccatggttgtgcagatgtctaaggatgcagctgaggactacagcaagacccgtatcgcccgcagcatcgctgccagcccggacctgcggtcacggctgagcccgcgtgcccacgacgacaacatcctgctcaagttcttccggtcgggaatgtcgctgcgcatgggctggccgtcggtctcggttctttcaggcaaggacatccacgacgtcctgatgacggacgtggacaactacaccggcgacctgacgatcgatgagtgcttcggcctgggcctgaagcgtacgcagacgtacatgtcggccggcatggtagtcgccgagtcgagcccggcaaacgactacgccgacggtgcctggaagccgttgcacccgcaccagggtccaccagcagcgggcatcgccgcgctgtatgcgcgcggtgacaggcgccgctggtactggccgtgcccagaatgcggagagcggtttcaggcagcgccaggctacgacgggttcgcgttgccgccgatggaggaattgctcgaacgggtcgtcctggacgacgtgcagaagatggcgcggcactactcgcagctgcactgccccaattgcggcgtgggtctgcagcaccggtggaaggacgggatgaatcgcgctggtgtctgggctgcggaaggccaactcgtgcacgccgatggcacggtcaccggtgatcggccagaggcacgcattgccagctactggctgggcggtgtcgctgcggcctaccagtcgtgggaatcgctgatcgagcgctacctgcaggcgctgcggaccttcgccaccaccggtgaagagcgcccgctgaagaccacgcacaacgtggacggggcgatcaactacgtgccgatggcgtcgcggtcggccagcgatccgaacgagatgcaggagcgcgcagaggtctggcctgctggcgcggtgcccgctggcgttcgtttcctcctgggtgaggtcgacgtccaggccaaccgctttgttgtgctggtgctggggttcggtatcggcgaatccgggcagctggaacgctgggtggtggattctttcacccttcgcacgtccaagcgcgaagacggctccggcggcttcctgccgctggacccgccgaagtacctggaagactgggaacgcctagtcgagaaggtcatcagccgtcgctacccgctggatgacgccaccggccgcagcatgcccgtgcatgcggtgggaattgactggggtggtaagtcgggaacctcggtacgcgcgctggagttctggcgttcgctcaaggcccggaagctgcacgccagggtcaggctgattaaaggcgatgcgcgccgcgagggtggactgttccgcgagaccttccccgacagcagcaagcgtcgggaccgcaaatcagggtcgaagggcgatgtgccgcagctgctgctcaatgtggaccggttgaaggacacggtagacgccaacgtgaagcgggccgagcccggcccgggctattaccacttccccgactggttgccagaggcgttctacgccgaactgacagccgaatcgcggacggcaaggggctgggagaacttggccaagcgtcgcaacgaggcattcgacctctgcggatatgcagagggcatggcgctgtggctgaaggttccggccatcaactggaccgcgccgccgccatgggccgcgccgtgggacgacaaccctgacgtgagggcagacgacacagcgccggcgccaatgccgcgcacgcgcacccgccgcgtcatccgaagcaagtacctgggacgctga

SEQ ID NO: 499737 - DNA, 216 bp, Stenotrophomonas maltophilia
atggcattcaccaacaagcaagtcgagcaactggaggccgcgatcgcggctggcgtgctgagcgtccgatatgccgaccgcaccgtgacctaccagagcctggtggaaatgcgccgcctgctgaagcagatgcgcgacgagctgggccaagccgcaggtgcgccgcgtcgttgtcgcatcgtgcgcctctaccaatcggggaccggcaatgtctga

SEQ ID NO: 499738 - DNA, 1482 bp, Stenotrophomonas maltophilia
atgtctgatacagccgagagcagctatcgcgccgccggcaacggccgccgcctccggaccttccggccgacgtcactcgggcccaacgcgtcactgctgggccttccgacgctgctggcgcgcgcccggcatctggctcggaatgacccgtggatggtcagtgcgctcaacaagagcgtgtccaatggcatcgccaccggcatccaagccaagcccatctggggtacgaaggaccacaagaagaagctcaccaagctgtggacccgctggggcaagtacgctgatgccgatggcgtgctggtgtgggaagggctgcaggcgctggcctggcgcgaatggaaggaggccggtgaggtgttcgcccgcatccggtaccgtcgggcagaagatggtttgccagtgccgctgcaggtgcagctgatcgaatcggagcagtgcccgcagcactacaacggcgtggccagcaacggcaacgtgatccggcagggcatcgagatcgatagcatcggccggcgcgttgcctactggatgtaccgggagcaccccggcgacctgcagctgaccgtcaacggcaacgagctggtccgcgtgccggcagagcaggtgctgcacctgtaccggccgaaccgtgcgggtgcgatgcggggcgtgccgggctcggcgccggccctgctgcgcatgttcaacctggaccgactcgatgatgcggtgctggagcgccaggccttggccaacctgttcgcaggcttcatcaccaccgctgccgacgcggatggggaagagggcgatgccgtcggagacctgatcaccgatgaggacgcggatgggacggcactcggaggcctcgagcccggcaccctgcaggagttgcctccgggccgaaaaatcgagttcgccaatccacccagcgccggctcggactatgccgagttcctccgtgggcacctgctggcgatctgtgccagccaggacgtgccctacgaggtgctcaccggcgacctgcgcaatgtatccgaccgcgcgctgcgcctgatccttaacgagttccgccgggtgatcgagcaggaccagtggctcttcatgatcccgatgttctgccaaagggtgcgagacgccttcatcgaccaggccgtgctgtcgggtctgctgaaggtgccgcgctacgcggccctgcgtgatgacgtaaccgaaaccctgtgggtgcccgagggctggccttggagccaccctgtgcaggacgtgacctctgagctcaaggcggtacgcgcgggcttcaagtcgcgcagcaaggtggtactgagcgctggcgaggatcccgaacaggtagatgccgagcaggcgcgggacaacgaacgtgctgacgcggctgggcttcgctacgacagcgacccgaggcgtacgaacgcttccggtgcccggcaggacgacaaacccggcgcccctggcgccaacaacgatgaagggaatgacgatgacgagtaa

SEQ ID NO: 499739 - DNA, 1362 bp, Stenotrophomonas maltophilia
atgacgagtaagcctggcctgttggcccgaatgctgggtcgcggcagccgtgcgccggtggtggcctcgctcgctgccgcggttctcaatcagcccctgctggtgcagccgaccatcggcgaggcacttgtgggcggctatctggaagggaaggttaccagcgacgacagcgtgctgaaggctgaccgcttcgaagtgtccggacccgatgggcagccggtaggcgttgcccagaaactgatcggtgtgatcaacctgtccggtgcaatggtcaaccggccgatgcccggcgccagcggccccgggccggtgagctatgccgcagttcgcgacttcttcgatgagctacttaacgatgatgcggtgacctccatcatcctgcggctggacactccgggcggcatggcgtcgggctgcttcgacctggtcgaccacatcttcgaggcgcggggccggaagccggtgtacgcgttggtcgatgatcatgcctactccgccgggttcgcactcgcttcggcgtgcgacgagatctggatcagccgcaccggcggcgtcggatcggtgggcgttgtgcgcttccaccacgactggagcggcaacaacgcgcaggttggcctgaaggtgacgccgctgttcgccggcgcccgcaaggtcgacttcaacccgaacttcccgcttagcgaggaagcgcatgccgaggcgatggtcgatctgcaggaaatgtacacgctgttcgtcgataccgtggcgcgcaacctcgacatggaatctgaggccgttcgcgctaccgaggcggcctgctaccgcggccaggccgcggtggagatgggctttgctacccggctcggcacctggcacgacctggtcgcgcacctcggcgcgggcgaagcggcaccgccgccagcgccgggcaatcccgatccggacgaagagccagaggcagcggcaacgccgccggtacccgaggccgcatccgcaccgcctgcagcagtcgtggaaaacccggcagctgcgttggcagctgcgatcgtatccagcgagctgccgccggcactcgcggtggccgtgctgcggcggccgctgcaggagggtgaaccggctgccagcgccatcgagtacgcgaccgcagtgcaggacgcctgcgcagcggcgctgcttggcgatgacaccctcgcagccagcttcatcgagaagaacaccgacctcgacacggtgcgtgcacagctgctgtcgatgaaggcggaggaaggccgcagtacccagatcatcaccgcacacccggcctccaaggtcgaccaacgcgccgccgacatcaaggcgcagctgaaccccaaccacatctacaagaaccgaggaaactga

SEQ ID NO: 499740 - DNA, 684 bp, Stenotrophomonas maltophilia
atggaaatttccctggccggcacccgtaccggcgaattcctgctgtccgaagcgggcggcgagcgcagccgcgaactgatccgtctgccggccgggcagggcatgctgtccgccggcaccctgctcaaggcggacaacaccgttgccgccaacggcacggacgcggtgaaagtgctgtacggcccggtcgacaccggcgccgattccggagcactggccgtcaagggtgccgcgatcgcgcgcgacgccgaagtgttcggcgaaaagcttgtgtgggccagcggcgtcactgctgaccagaagctgctggccgcgctgagcctggctgagtcgggcatcatcacccgatggacccagcagccgatcgcgtcgaattcagctgatcacctggtgttcgtctcgactccgctgaccggcaccgccggcgaagcgctgggcccgatcgttgtccacgtcaaggatgtcttcggcgcgctggtgaccggcagtacggtcagcgccaccctggccaaagccaccggtaccggcaacctgaccggcggcggcgctaaggccgcggtcgccggcatcatcacctgggatgccgcgacgctgagcgccgccggtgactacaccctgaaggtgaccgccgctgatctggccgaggcaaccacggaaaccatcaccatcgccgccggcggctga

SEQ ID NO: 499741 - DNA, 1002 bp, Stenotrophomonas maltophilia
atggatctgcagaccctcctggcgctgggcgtgctgagcttcgatgccctgaacgcctacatcaacaacctgccgcgcatctccacccgcctcgccgatatgcgcctgttccaggaacagggcctggtgggcaccaccatcgtcaaggtgggcatcaacgggaccaagctggtgctggttccgaacgttccgcgtggtgcgcccggccagccgaaggggctggagcgcggcaaggtgaagctgctggaaaccactcacctgccgcagaactcgaccgtaatggccgaccagctgctcggtgtctatgacccggccgacccggaaggcaacaacgttgctgccgtggtcaacgcactgcaggtggtgcacaagcgcgatctggacttcaccatcgagtaccaccgcatgggcgcgctgctgggcaagatgcttgatgccgacggctcagtgatcatcgacttctacgaagaattcggtgtcgatcagtcggtcatcggcatggagctgaacaaggacgccaccaaggtccgcgccaagtgcatggcgatcaagcgcgcgatcgaggacaagctgggaggcatcccgtacaccggcatccatgcgttctgcagtgccggtttcttcgatgccctgaccgaccacccggacgtgcagaaggcctacgagcgctggcaggacggtgccgcgctgcgcgatgacgtccgcaagggcttcgttttcggcgatatcaccttcgaagagctgcagggcaacaccggcggtgatctggccctggccgacggcgaagccatcgcgttcccgctgggtgtgccggacatgtttctgacccgcttcgcgccagcggactacctggaaacggtgcgcggcatcggcctgccgtactacaccaagactgcaccgatgcgcatgaacaagggcatccagctggaaagccagtccaacccgctgaacatcaacacccgcccggatgcggtgatccgcctgaaggccggctcgaagtaa

SEQ ID NO: 499742 - DNA, 759 bp, Stenotrophomonas maltophilia
atggcccagatcaggatcggggtcgaccccgacaatgccttcggacggcagctcacggaactggaacagtcacagcttccgttcgccgcctcgcaggccgccaacaaggtggcctacgagatccgcgaacggtggaagcggcaagcgccccgcgtgttcgatcgccccacgccactgaccacgaatgcggcgatgtaccggaaggccaccaaggcccagccgtatgccgagatctacatccgcgacgaagccttcaagggcactccgccggcgaagtacctgctggcagaagtcgatggtggccaacgtcgccggaaaggattcgagcggctgctgcagagcagaggtctgctgtcgccgacccagttcgcagtgatggggcggggcgcccaggccaaccagttcggcaacgtgccggccgggcaggtgacgaagatcctttcccagctgggggcgcagcgggaccgctaccagaaccagaccaacgtcagccggaaacggaggcgaggcaagaagaacaaccgggatggcgagtacttcgtcatcaccaagcgccgcggcgttctgcggcccggtatctacgagcggatcggtcgcggttctggcgtccgatccatcttcattttcaccaacacagccgcatacagcccgcgctacgacatattcggcatggccgaggacacctggaagcggttgatgccgttcttcctgaagcgtgagctggagaaggcgatggaaaccgcgaggccccttccttga

SEQ ID NO: 499743 - DNA, 333 bp, Stenotrophomonas maltophilia
ttgaaccagaaagcattcatgcaggccttcgatgcagtcgcattcggtgccttccgtgccgccggcgtggccgacgccgctcactatcttgccccgggcgcagatgcggaggtgccgtgcacggtgatgctggacgaggatgttgagcagttcacagcggacgacgttgcaccgatcgccaccaccattgatcggatcaccctgcagctggccgaggttgctccgcgaactggcggcgtggtgcgcattgatggcaccggtcgccggctgaagctggtccagaagatccgtgccgatgagtcgacggcggtgtgggaggtggccagtgcctga

SEQ ID NO: 499744 - DNA, 456 bp, Stenotrophomonas maltophilia
gtgcctgatgccatttccagcccacgccgccagctgttgctggcgatgggcaaaacgctgcagctgatcagcacagagaacggctacctgaccgatgccggcgccggctggacgctcgagcccgtcccgggcgaccaggacacccaggcggtgctgactgctgtcatcgagaagcagcagcgggcggagacgccgtcaaaggtaaacacacatcggctgaccaccgtgagcgtcatcgccaaggtccccgccgacacggatggctaccagcggaagctggacgacctggtcaccgacgtcgaggcgtccatggacagccgcgagacagcgcgcaacttccccgatggcatccaggtgccggtctacgtcggcatggagccgctgatgccggacaaggccagcgccggctgggtcggcgtcctgattacctaccagacccacatccccaagaaatga

SEQ ID NO: 499745 - DNA, 753 bp, Stenotrophomonas maltophilia
atggccgaagattacagctacctgggcagcggcatcgtcctgatccgcaagtggggcagcaacgaaccgttcctcgaagtgggtaatgtgtccgcattcaccgtcgcgccgcagaccagcacgatcgagctggccgactaccagaacccgggcggcggcaccgcgaaccgcgtcgatcgcgtgaccggctacaacctcaactacaccttccacgacttcaatgcggagaactttgcacgtgccacgcgcggtaaggccagctccatcgctgcagcgagcgtggccgacgaacctgccgtcgcggcaaagggctcattcgtgcccctgcagcaccttgccagcagcatcaccacggtggaaaacatcgccggcaccaccgagttcgaagagggcaaggacttccgattcgagcgcggcatgctgttcatcccggcagactcgacgatcccggcttccgtcggaggtgcagccaatatccacgtgacgtatcaacacggtgatctgggacatgtggaagccgctgttaccgcacaggccttctacgaaatgcagttctacggcgcgaacgaggcgcgtggcggcaagttggtgcgcttggtggcgcacaaggtcaccggtggcgtcatcgagagcatgggcctgatcggcaacgaattcggcgctggcagcgttccgggcgctctgctgaaggactcgtccaaggcaacgggcccggacaaatccgcctacttcgcctggcagcaggagaagtaa

SEQ ID NO: 499746 - DNA, 402 bp, Stenotrophomonas maltophilia
gtgaccgacgaagacgtcattaccccgccgacccgtactgttaccttccgtggcgagatgctggtggtgggaccgctgcggctgcagcaggttggcccgttcatcaccgccagccgcaccatcatcgcccgcgtggcgatgatggccggcgcagtcgaggccgcagagccggctgccatcggcgcaatcatgctcgatctgctcgagcaggacgggccagagatcgccgctgcattggcggtggcggttgaccgcgagccggactggatcgccgcagggacgttggatgaagtcgccgatctgctggaggccgtggtgggattgaaccgcgatttttttgcccgccggctgcagcggctgctgctgatggccaagccgccggcggcagagagtacggcctag

SEQ ID NO: 499747 - DNA, 195 bp, Stenotrophomonas maltophilia
atgacatacaccttggcgcagcttcgggctttcaccgccgctgccgcccaggacgaccgcgatcgcatcgcggaattcgcggtggccacgcgtatggccatggctgcacccgtagccgattggcagatgtatctggccgcactgcgtggccacgcccccgtggggcagacacaagggaagatgacccatggctga

SEQ ID NO: 499748 - DNA, 2760 bp, Stenotrophomonas maltophilia
atggctgagccttcagcgaatctccgtgtccgcatcagtgcggacctggccgacatcaggcaggggctgggcgtgctcacccggcaactgcgggaagtgcgcagcgaggcggcacggccattgccggcgaagaacggaatcaccgacctcggtgtgtctgctggtcagaccgcacaggccatgcgtcagctgccggcccagttcaccgacatcttcaccagcctgcagggcggcatgcccttcttcacggtgctggtgcagcagggcgggcagatcaaggacagctttggcggtgtcgagccggcattgaagggggtgtcgtccgcagtgctgggcatggtcaccccggtcacggtgtcggccgccgctgttgggctgctggtctacgcctggtacgacgccgagcagcaggcccaggcctacacgaaggcgctggtgctatcgcgtaatgaggccgccgccacgaccctcaccctggtgaccctcgcgcagcgcaccagcgatgcgctgaacgtcactgctggtgccggtgccgaggtggcccaggccgttggtgcgaatggccgaattgctgcgcagaacatgcaggcagtggctgccgcggcagtggcgatgaaggaagtaaccgggcaagcgatcgaggatacggtcgccctgtatgggaagcttgctgaagaaccgatcaagaactcgcagaagctcaacgagcaggtcaacttcatgaccgttgctctctacgagcaggtcaaagcgctgcaggagcagggccgcaaccaggacgctgtaacggtgatcacccgtgcggcggccgatgagactgtgatggcgcttgcccgggtccgcgccagccagaatccggtgatccgcggcttcaaggacctgtgggctgaggcgacgaaggcgtggtctgcgatgcaggccaacgtcggcctcgggcctgctgcggcgcagatgcagcagctggtcgcggagaaccagcgagagctggcgaagctgaacgatctggcgtcgggaaaccagcggggactgcccttggccaggaatcccatcgcgttggcagcgatggagaagtccatcaaggagcgctcggagaagatcaaggctctggccgtagatctgatcaaggaacgtaaggatgctgaagtcaaggccgcgcaggacgcaagcgccgagtacgtgcagcagcaggacacaatcattgcttcccaggcttcgaaggagcagaaaaaaaaggacgagatcgcgcgtatcaacggacaagcagacgttgtcaggcgcaaagccgcagctgcggggctcgtggacgaagtgcgggtgatcgaagagcgcagagccgccgccgtcgcagctattgagaaaaagtaccgcgagaagccaaccacgggtacaggatccgcatcacgggcggctgggctgcagggctacaaggacgacctagtcgccgaacaggcgcagatcaccgccggcacccagatgctccgtgcccagtactccgccagggagatcactgcgagcgagtactacagccgcatgcgggatctgctgcagcaaggaacggatgcccaagcgaagtcattggaggggcagattgcattcctgcagaggcaggcggtcgcgggcaaggacgccatcagcgtgaaccggcagatcggcgaccttgaagcgcggctcaccaaggtccgcaccgagggcgccggcgcactgcaggtactgacgaccgaagaaacggcagcggccaaaactcgggccaacgtcattgcggcctatgccaacgcgctggaagcgagcaaccaggcattggagcggcagctttcgactcaggcccaacgcgtcggtatgggagatcgcgagtacgaaatccagcagcgcatcaacgacgcgtacgctgaccaagcggacaaactgcgcgagctgcagctgcaaatgaacgcggggcagattgatcaggagacgttcgaagccgaaagggcggagttgctgtccaaaacgctcgaccgcctgcaactcatccgtgatggctatgaagagctgcggcaggccgagggcaactggttggccggtgccagcgctgcatgggcgaattaccagcagcaggctggcaacgccgctcagcatatgggaggcatcgtcaacaccgtcatcgggagcttcgaagatgcctgggtgcagttcacgacgacgggcaaagccagcttctctgacatgacgaaggccatccttgccgatctggccaggatcgcagcacgccaggccatcatgggcatcgtgaacgcggtggccagcgcctggggtggcgctggcgtctctaccgctggcgatcaggccgtcaacgccggcaccagcagcatcaacaaccagctgttccagaacatgaagctgggcggcggctattccaccggtggctacacgggcgatggcggcgtgagcgagccagcaggcgtcgtgcacaagggcgaggtggtgtggtcacagaaggacgtcgcgcgcgccggtggcgtcgacgtggtcgaagcaatgcgcaagggcctgaaggggtacgacaccggcggcgccgtcagcacttccacagcgggcgctgggcgagcaggtgggctgctcatccagggaaacctgaacatcaacgccaccgagcaggaaagcgaccagccagaggtcaccgacaagcagatccgggacagcttcaccggcgcgatcaacgagtgggcggtcaagaaccttcgtcccggtgggcttctctacggtgcgggatatcgagcatga

SEQ ID NO: 499749 - DNA, 348 bp, Stenotrophomonas maltophilia
atgaaagagaccttcgtctggtgcgtttatagctcgccgccgagcgtggaatacgaggccatcacgcgcgcggcagtgttcggagatggctacttgcaggaagcccccgacggcatcaacaacgaaaagcagacctgggagctagagctttggggacatcgcgaggccgaccaaatggggaatgcaaaggcctttctgcggctccgccgccagcgcggcgagtccttcctgtggacaccgcctggagagcccgaagccttgtaccgctgcacgaagctgagcgccgtggacgagcttgagggctacctgcggatcagctgcacattcgaacagacattccagccgtaa

SEQ ID NO: 499750 - DNA, 984 bp, Stenotrophomonas maltophilia
atggcacttcaaccgatcgacaccagcacagaccacggcacgtacaaaggtgacccggcgaagacagctttcgacaaggtcaacgccaacgacatgtacctgcagggattggccagcgctgcgcagacgatcgccagcgcggcgcttccgcgcgccggcggaacgctgacaggggacactgtcctgttcggcggcacgtttcgcattgcgccgaatgtggctggcgatcaaatgttcctccggtcagagggcgccaccggtgtgaccattgacgccgtaaacaaccccaacagcgcgtatgcagcgctatccattcgtggcagcgcaatcaacctcaacggtcctgtgaacgtctccagcacgctctctgtgccgcagaacttcaagagcgccaacgccaacgtggtgctggccaccggtattgccggtaccgtgttcctgcgacccaatggcaccgacagcgctgtggggcagctgacccttgggtcaactgggatctgcagcgccccgtcgttcaaccccacctcctcagccgacgtcaaggactacatcgagggctacgctggggatgctgattcggatctgaaccggctcgtggtgataacccacaagtaccgtcccgagttcctcgatagcaacaagacctacatcagtctgctggcggagaatgtgcacagcgtgctgccggcggcaactgacggtgactaccaggtcatcgagcaagagccctacgagcgccctgtagtgatgaaggtcgagctacccaacgaggacggggagggcacgcgtgaggtagatatccagggggtggagactgcttggcgggaggtcattcggtacgtaccaatgaacgtcaatctcatgcccatccttgcgctctgtgtgcgtgggcaccagaccaaggaccggcgcattcgtgagctagaaatcgctgtcgcatcgctgcaggccatcatccagccaccgacgggaccgggtgcatga

SEQ ID NO: 499751 - DNA, 696 bp, Stenotrophomonas maltophilia
atgatcaccgccgatgtgcagcagttggagcctggtggcagggtgactctttatgaacttgacgccagcagtttcggcgctgaccagctgttcttccacgcacacctgcaatcgggcgtaatttggtggcagggtcaagagtatggcgcgtggccaatcaagacagagggcttcgccaggaccggcgatcagccgcccactccgaagctcagcgtcagcaacatcgacggccgcatctctgccttgtgcttggcctttgatgacttagttggtgccaaggtcatccgccgccagacgatgatgaagtatctggacgcagcgaacttccccgagggcaacccaagggcggaccctaacgagcatttccaggacgaggtgtggttcatcgagcgcaagacctccgaggacaaggaaactatcgagttcgaactgaccactgctatcgacctcaatggtgagcagctacctggccggcagatcattgctggcgtctgcggctgtctgatccgtggaggttaccgtggcccctactgtggctataccggcccggccgtggctgatgccaacgatctcccgaccgacgatccggcgcgcgatcagtgcagcggcctggttcgcggctgcaagctgcgcttcggtgccgacaaagagcttccgtacggcggtttccccgccgcaggcttgcttcgcacctga

SEQ ID NO: 499752 - DNA, 741 bp, Stenotrophomonas maltophilia
atgcaacagagcaccctgcaggccatccaggcgcacgccgtggccgaatacccccgcgagtgctgcggactgattgtggctacggccggcggtgaggcctacgttgcctgccgcaatgtggcgacgacccccagcgagcacttcgtcctgccggcagaagactacgctgccgcagaagaagagggtccgatactggcgctggttcacagccatcccaacgtctcggcagcgccgtctgactccgatcgggttatgtgcgaggtcagcggtctgccttggcacatcgtcagcgtcggccagtgcacaggcgccgagccggaatgtggtgacctgcggagcattgagccgtgcggatatgtggcgccgctggttggtcgccagttcgcccatggcatcctcgactgctacaccttggtccgcgactttcatgcgagggagttgggcatccttctcagcgattacgatcgggaggatgactggtgggaaaaggggcaggacctctacagtttggaacggctgtgtgccgaaggtttcgagctaactgagggtgagccgcgccgcggcgatatggtcctgatgcagatccggtccgccgtgccgaaccatgccggcatttacctcggcaatggtcagatgctgcaccaccttcatggccgcctgtccgaggttgtgccttacggcggaatgtggtcagagcgaacccgctacatcgtccgccacaaggagtctcgccgtggctga

SEQ ID NO: 499753 - DNA, 585 bp, Stenotrophomonas maltophilia
gtggctgaacgcatgcgcaccattcgcctttacggccagctgggcagccgcttcggacgctccttccgtctggccgtgaacagccccgccgaggccgtccgtgcgctctgcgcgattctcccgggcttccagcagtacctggcccacgcgaaggagcagggtatggctttcgccgtcttcgtcggcaagcagaacatcacgaaggaacagctgcaggatccaccgggctccgaggacattcgcattgcaccggtgatgcttggtagcaagcgcggcggtgtgctgaacatcatccttggagtcgtgctgatcgtcgtcggcgtctataccaacaacgtcaacctgatcgtgcagggggccgtaatggtgatcggcggcgtcgcgcagatgcttggtccccagccgaaagggcttggctcgcaagacaacgtcgacaataggccgagctacagcatgaatggaactgtcaatactcaagcccaaggcaatccagttccgctgccctatggtgggcacgacacaaaagggatgctggttggctctgcagtgattagcggcggcatccaggcggaggatcagctttga

SEQ ID NO: 499754 - DNA, 3648 bp, Stenotrophomonas maltophilia
ttgaacgcttctgtcgtttcgaaggcactgccccaccacattggccaggccatccgcttggcgggctctggcggaaagagcggatccaatgcccgcactcctgttgaaacgccggacagcctccattcgacggccgtggctcgaatcgtggaccttgtgggcgaaggtgagatccgtggtctcgtcgccgggaatcagtccgtctacctcaaccaagtgccgatccagaaccccgacggcacgttcaacttctccggcgtgtcggtggaaacccgctctggaacgcaagatcagtcgtacattccaggcttcccttcggtcgagaatgaggttgcggtcaacgtcgagttgcggggaggcgagccggtagtccgcaccgtgattggccccgatctgtcagcggtccgcatccgtctggccgttcctgctctgcaggaggtggacggcgagaacggcgaccggaagggctactcgataacctacgcggttgatctttcggtcgatggaggtcagttctataccgttttgaccgaagccatcaccggcaagacgacttcccagtatgaacgcagccgccgcattgatctgccagccgggtcgcagtggcaggtgcgcatccggcgcatcacaccgaaccgaaacaactcgctgatctcggatacggtgaacgtgctgtcgatgaccgagatcatcgacgtgaagctgcgctacccgaactgcgcgctcgcggccgtgcaggtggacgccagtgcattccagagcatcccgtcgcgttcctaccgtatctggggccgaatcgttcgggtgccggccaactacgaccctatcagtcgcatctactcgaccagcggcccaggcaccaccaacggggcttgggacgggacgttcaaggctgcctggaccaataacccagcgtgggcgttcttcgacatcgtgaccaacgatcgattcggcctgggtaaccgcatccccctggactgggtggacaagtggcgcctgtaccagatcgcgcaatactgcgaccagctggtgagcgatggtctgggagggcaggagccgcgcttcacctgcagcctgtacctgcagagtcgcgcggatgcgtaccgcgtgctgcaggatatggccagcatgttccgcggcatcagcttctacgcggcaggccaggtcatggcgtctgccgatatgcccaaggatcccagtgcgaccttcagcccggcaaatgtaattggcggccggttccgatatgaaggcagtggccgcaaggcgcggcataccgttgcgctggtgtcgtggacggaccctgacgatttcggccggcagaaggttgagccggtgcaacacaaggaaggcatcgcccgttatggagtgaaccagaccgaggtaactgccatcggctgccattcgcgcgcccaggctcagcgcgtaggcaaccacatcttgttcaccgagaacctcgagacggaaacggtgagctttgccgtgggcctggacgcgctgaactgcatgccgggcgatgtgatccaggtttcggaccccaaccgttcaggccgacgcaacggcggccgcgtgcgcaccgctgcagccgatagcctgacgctcgaccgcatccccgatgaaatggccccgggagactcgttgcacgcgacgcttcccagcgggaagattgagggcaggaccatcatcagcgttgaccgtgtcagcggtgtggtgaccgttgcggccccgtggtcggccattcccgtggaccagtctatctgggcgacagagtccagcgagctggcgctgcagctgttccgcgttgtcggcgtggccgagggcgaggatctcacgtacaacatcacgggtctgaagcacgtcccagggaagtatgcggcgattgatgacggcacgcggcttgagcttccgccgatcagcatcatcccgcccagcgtgcagccgccgccgaccaatgtggagctgtcctcgcacgtggtgatcgaccagggcattgccacgcccacgctgaccatccagtgggacgcggcagacaaggccatcgcctacgacgtggaatggcagcgtgacgacctgaactgggtgcgtgctggtcgggtgggaacgacaagcatcgatgtgccgggcatctacgccggccagtatctggcgcgggtgcgcgcggtcaatgccctgaacgcggtgtcgatcccggcgacgagcttactgaccgacatccgcggcaagaccgagccgccggcggcggtcacgtcgttgaccgcgacgccgatcgtgttcggcatccagctggcttgggcgtttcctccgggggcgactgacactcagcgcacggaaatctggcgcagcaccgggccgaatcgagaaatggcagtcaagctcggggactacgcctacccgcagaaccgtcttcagttggacggtctagcagcaggtgcccaattctatttttgggcacgcttggtggacaggactggcaacatcggcccttggtacccgacgggtgccggcgtgatgggtgaggccagtacggacgttacgctttatgacgcctatttcgctggccgtatcaccgaaagcgcgctgggtcacgatctgttgtccaagatcgaggccatcgacagtttgaagccactgcttccacttgcttgggacgcggccgcgacctacgaacctggccagaccgtggtctttggagggcgcacctacgtgtggcgcgctgcgcagcctggcaacaagcagccgcccaccgacgagtggcaggatgtcggcgccggcatggctggatatggtgcgttgctcagtcaggttgagcaaaacacgcaggacgtcagcaaagtcgacggaaaggttctggcgcagggtcagaagatcagtggcatcaccgcgcaactggatgtaaaggctgctggtgaatccgactggggcgccggcgatacaacggtgtttgccggcacggtgaccttgcagagcgtcatcgccagccaagacctggtacaggcgctacgcacagaccaggtcgaggtgaagctggggcagacaagcgccgcggtgcagagcgagagtgtcgcgcgtagtacggctgacgaggcactgggcaggcgcgccgacaccactgaagcgaatcttgcaggcacaaacgcagcggtacaacaggtgagccaatcggtggtaaacctggacgggaaggtggccgctacctacacagtgcgtgcgcagatcaccagcgccggccagatctacatggcgggcatgggcttgggcgttgaacagcagcccgatggcagctatcagagccagatcttgatgcaggctgaccggtttggtgtcatcaacgtggtgaacggcaacgtcaccgcaccattcatcatccaaggtggccagaccttcatcaaccaggcattgatcgggaccgcatggatcaccaacgccaacatcgccgacgccgcgatcaccaacgcgaagatcagtggagtgattcaatccgatgactacgtgcaggggcagacaggctggcggataaacaagagcgccggtggtggtttcgagttcaatgggacagtggccggtggctacaggctcaacgtcaccaaccaaggcgtctacgtctactacccaaacggcgtccccgccgtggagcttggagtgttgctgtaa

SEQ ID NO: 499755 - DNA, 390 bp, Stenotrophomonas maltophilia
atggctgatgttggactgcgggttagaagcgaaaacggctacgtggagtcctcggtcaccaccaggttctcgaagatgatcgggtcgtacacgttcccgctctacaacccggtcaactccaacaacaaatgggtcgccccccccgaggcaaatggggggctggtcgtcaacgacttcttgggcggcgagcccttctactatttcacctgcgaagggcagaggtcggcgtacgggatgctggtcccatcagtgacgatatcgggcaacagcatcatctggaagtgggaacctgacgtggtgaactaccacgtcaggatggagatgtttccaagtcagccgaccacgagcactgtcggcggtatcacgcttcactatggggtatacagctaa

SEQ ID NO: 499756 - DNA, 738 bp, Stenotrophomonas maltophilia
atggctgtaggactgcgcatacgcaatcagggcaccgggcagatccagatcggcctcgggtatcggaacctgcagctggccaagtcggggacgctcaatactggcacgttctccggcggcgcgaccggcggctctccaccgtttgggtcatggtctccgagtggtgttctggcatcaacgaacggtacgaccaacctccacgtctgccggtacatcaatgatgctgtgtcgaccaatacaggattcaccctggtccaaagcaaggtgacgtgcggcgtgtacgcctcgagcgcggcacccaacaagctgctcgagtactacacctttagcgccgccgagcgtgcagtggccggcccggttgggctgcgcatgcgcggcgcggacggcacggtgttctacgactcgaggcgaaagggacttcgcgttcttcaggtggtgcctgtgccaacagtgccaggtccacccgttgaaattgggcagttctttccgggcacgaagatcggaattgcaatcccttcaccgcggttctactacaactcggtatcgcaggaccgatgcaccatgactgcggactatttccacatgacaagcgacaaccggatcttcgtttcaagattgcaggttgcccaacaaacgctgatcaccaacaccttcccggttggcggcgtaacgatggggcctcagagcgcgtcgatcttcatcgtggacctgaccgaggtgccgttggggtttggctga

SEQ ID NO: 499757 - DNA, 933 bp, Stenotrophomonas maltophilia
atgtgctattccgcccaaatcgaagccgcctaccagaagctggtccgcatgaccggtgccaccgtgtcgctgaaggagttcgccgcgctctacgcccatgacccgggcaagaagcggccgaagaccccgaaggcgatggacgacgcattccgggccggcaccagcgcagcagagcgcgccgtgtgggcggagatccagcagtggaaccaggccgaggccaccatcctggagcaagagcttttcgccaaccggaagcgcctggccgatgctgagcgatcgctgcaggccaaggagactaagaaggcccgggaggatgtgcggatcgccggcaacaagatcgagcgcgccatgggcaagttggccgacctcaagcgcgccgagggcaaggaccgggacagccggatcttccccggggtctacgccccggtgatcgtctcggaaggcggcaagcttacgatcaagccgatgcgctatcagtgccgactggccgggaagccggccaactacgaccagcgtttccccggcacctacaacgcccgccgcgacagcctggagaagttctgggcgccggccttcggccacacccacggcttgatggtggtccataccttctacgagaacgtggagggcccggacggcaagaaccaggtggtgcagttcaccccgcgcacgcgggagccgatgctggtggcctgcctgtggtcgcactgggtggacccggccggcaaggagccggatctactgtcgttcgccgcgatcaccgacgacccggaacccgaggtggccgccgccggccacgaccggaccatcatcaacatcaagcccgagcacgtcgacgcctggctgaatccggatccagccgatctggcctcgctgtaccggatctttgacgacaagcagcacccgttctacgagcacagagcggctgcataa

SEQ ID NO: 499758 - DNA, 426 bp, Stenotrophomonas maltophilia
atgcaacaaaaacaagagtttgaaggcgattcgttaatttccgagttgtggaaattggagaagacgtcactgttccacctgagcaaagccctcggagttcccgtgggtcagcttctggtggccgccaatcgggctaggcccattgggctgttactgccaggtccggtggcggtgcacgttgacggcgtgtgtttcttcacgccaactgacctgggcaagcgtctcggcctctcaccgcagaagttcaatcgcctgctggcggataggggattgcaggctaagcaggacgggcagtggtgtccgactgacgccggcaagcccttcgctgtgctgctgcaggtccacaagaagcagcaggccggcactgatgtcttgcagctgaagtggaaggagaccgtgctggctgcgctggcgatgcccggctga

SEQ ID NO: 499759 - DNA, 1251 bp, Stenotrophomonas maltophilia
atgttcgggctcgttgacggaaacaacttctacgccagctgcgagcgcgtcttccagccagccctgcgcggcgtgccgctggtggtgctgagcaacaacgatggctgcgccatcgcgcgctcggcagaggccaaggccctgggaatcaagatgggccagcctgcccacgaactgaagcacctggtgcggcggcacggtctgcagatgcgctcggccaacttcggcctgtacggcgacatgagcgcacgcgttgtggccatcctgcgggaggccgcgccacgggtggaggtctatagcatcgatgagagcttcatagatctggacggcgtacgggaccgcgaacgatttgcgcgggacctccggcagcgcgtgcaccggtggaccggcattcccaactgcatcggcatagggcccacaaagacgctggccaagctagccaacaaggtggccaagagcgctgacggactgatcgatctcgggaaccctggctacagggacaccgtgctgcgcaccttccccgtcggggatctgtggggagttggccgcaggctggcgccgcggttggaggcgatgggcattaccactgccgccgcgctgcgcgacgcgccggcggacgacatcctcgcggccttcggggtcacgctggcacgcacccagcgcgagctccaggggcatccatgcatggagctggaggaagtcgagccggatcggcagcagatcatggtgagccgatccttcgccgatcgggtggaagatcatgagtcagttgcgcaagcgctggccaccttcaccgtcagagcctgcgagaagctgcgcgcacgcggcctggtcaccgccggcgtatgggtgttcgcccattccgacacgttccggccggagctgcgccagcacaacgctacgcggacggtaagcctgcccgcctccacggctgacacgatggtggtgctgggtgtcgtgcgccggctgcttcgcggcctgctgcgggagggcattgggtacaagaaggcgggtgtggcgctgctcgacctagcccggccggaagagctgcaggcggatctgttcgggccgacggtggtcggcaacgaacggctgatgtcgaccatggaccagatcaacaagaaattcggccgtggaaccgcgggcctgggcgcgacaggttggcaaacacggccagcctggggcatgcgacagcacatgctctcgccgaactacaccacctctgtctgcgagattccgcccgctcggtgctga

SEQ ID NO: 499760 - DNA, 483 bp, Stenotrophomonas maltophilia
atgcagtccctacccttccctcataccctggcgcagcccatcgggcccgcgctaatcgacggccccgcgcagttcgtgcctctggcggcagcgcgcgcccgacttggctttccgtcgccggccgacgacttcatggatgaggccatcgacctgcaccggctgctggtccgcaacccggccgccacctttctctaccgtgccgatggctggtccatgagtggcgccggcgtcagcgacggcgacattctggtggtggatcggtccgtcacgccgcaggccggcgacttggtcattgccatctgggatgggaaccagcccacatgcaaggtgctgcagctgttcgaaagccacatggagctgcactcggccaaccccgacttcccgcccatcgtgctcgagcaggccaccgaggtggaggtgttcgccgtcgtgggggttgtccgccagatcaagcgccgaggcggccatgttcgggctcgttga

SEQ ID NO: 499761 - DNA, 1356 bp, Stenotrophomonas maltophilia
atgggcgcaatgaagggaatgcttacagcgaagggactggcagcattgccagccggcgaatgggcctcagatccggccccgcgcggcgcgggctgccttgacgtgcgcaagctggccggcggccagttgcggtactactacaggtacaccaaggccaacggccaacgcgatcgactgctgatcggcacgggcctggctctgtccgcggcgcgcgaggctgcggcggcgttgtcccgccgataccaggccggtgaccgggatctgcgagatgcgatagcagccgaggcagctgcagcggaaagcgcgaaggccgacgccctggccgaatcgacgcgccgatcaggtgcaactctgggcgcgctgatgacggcctatgcccacagcctggaggatgctggcaaggtgtctgctgcggccacccgtgcgtccatcaaacgccacatcgaagaaccgtggcctgccctgtgggcccgccccgcgtccgagctcgaactagacgacctgctcccgatcctgtcgcgcatggtgcgcgccaagaaactgcgtgagggcgggaagatccggtcgtacttgcgtgcagcctacgcagcggcgatcgcggcgaagcaggacgctgccgctcccgatgcgctgcgcgcactcaacgtgtccaggaaccctgcgcgcgacctggctacgctcgacagcggccagccgcgcgaccgcgtgctctcggtgtccgagctgcgttcctactggcgcaggatcgaggccatgcctgggcggcacggggcgcttctgcgcttccacctgctgacaggcggccagcgcattgcgcagctgatgcggctgaagtggtcagatcacgatcatgatgcggacacaggtaccgggtccgtccgtttgctcgacatcaagggccgccgccgcttgccccgcgtgcacctggtaccactgctcccccggatggctgcggatctcgccaccttgcgcggcgataacgatggtgatggcgatggcgatggcgccaggccgcacctgttctcgcttacagcagggaagacaccggccacctatgacgagttccgggggatcatggatccggtggtggccaacatggtggccgctgaagaactggcatcgccattcacgccgggcgacctgcgccgcacagtagaaacgcggctcgcagcgctgggcctatccgaagaagtccgggggcatctgcaatcccacggactgagcggcgttcagaagcggcattacaacttcttcgagtacgacgcggagaagcgtgctgcggtggaggcgctgctcgaactgctcaccggtgctggtgcaacggtggtgccgatacgcaagagcgcgcgctcctag

SEQ ID NO: 499762 - DNA, 981 bp, Stenotrophomonas maltophilia
atgcaatatcgatatcttggaaggacgggcttgagcgtgtctgtactcagccttggcacctggcttagtgttggtcagcggctgagtaattcggatggcgccaggttgctatcgcaggcttaccatagaggaatcaatctgtttgataccgcccagaattatggctggggtggggcgcagacggagctggggcgtgcgataagagatgccggctggcagcgcgacacctactccatctgtagcaaagcattctacggggcaaagccggacgaccagctcaagccgactcaacgcggtttgggccgcaagcacctggtggaggagtgtgatgctgcgctgacacggctgggcttggagtacctggatatctatctttgccattcacaagatgcaaatgtgagtgttggagagatcgtatggacgatgcactcgttgattgtgcagggcaaggtgctgcattgggggacgtcgaagtggcctgctggactggtggcggaggcgcatgatttcgctctttccaatcatctgattggcccgtccgtcgagcagcctgagtacaacctggtcgctaccagagctgtggaggaagatctaccagacctgattgatcgatatggcatggggttgctcacttggtcgccattgaagcagggcatactcgctggtcgctacgaccagggcatcccgcctggctcgagactgtccttccgggacttcacgacgttgagggatcatgcgggtgaggcacaattcctgcgatgggtcgaagctgcaaaaggcatcgagagaatttccaaggctctgggagtatctcgcgcccagctttccattgcgtggtgcttgcaaaacaggctcgtcagtagtgtcctgctcggttgttcggagggcacgcaactagccgaatgtctgaaatcagtagacgtcgcgagctccatcactccagagttgtggctggagttgcactcgctgggtcagtgctga

SEQ ID NO: 499763 - DNA, 186 bp, Stenotrophomonas maltophilia
atgaatgcaagcgacaagaagtcacagggtgaagaattggtcgcgcggctgctgacgccgcaggagaccgatgccgtcgctggtggcgggttcgaaacctatgcgcagaatacaggtgggtattgcaaattcgaccagaaaagcggcggatatgaccagaagtgcgagacgcctagcttttcctga

SEQ ID NO: 499764 - DNA, 1236 bp, Stenotrophomonas maltophilia
atgatcgacgtactcaacagcgacacatcttccccgattcagaagctacatgagctgcaggtcatcatcaagatcgccgagcgctgcaacctcgcttgcagctactgttactacttcttcatgggcgatgattcctacaagggccgtgatccgatcatgaagcctgacaaattctcagccgtcgctgattacatcaagcgtggcgtcgaggatctaggcatcaggaatgtaaacatcgtcttccacggcggggagcccaccctcatgagggctcgcgatttcaggggactggtttctgctctgcgtgagacgttgacccccatatgcgggttgagtcttggcatacagacaaatggatatcaccttacggccgagtgggaagatctgatttcagagttcagtatttccgttggcatcagtcttgatggtccggctgagtacaacgatagattccgggtaacccataaggggaagggatcgcatgagaagatcgcgcgcacggttgggcgacttcacgagttggaggccgagcgaaagatcagtgcaatcggcgtactaagtgtgcttggacgcgacatcccgattgaagaaacatttgatcacttcgttgaggagctcaagttccgtcatatggggttcctgttgccggacaggagtcatgatgaaccattcgtcgatggagagaccccagacgagtacggagatctactgataggcctcttcaataagtggctgagccaccaggacatctctgtgagggaagtaacgaaggtaattcgctactttcaagagtatgcgcctgcacgcgccgcggccacggacgtattcgacaaacgaacccatgtggtggtgatccagagcacgggcgaagtgagttgcgatgactcgttgattcccgcattggagtggcgatcctcgcagcgttcgtactcaatcttcggttcgtcgctctatagcttcgtcaatgacccaggccttgtggtacttgatcgggcgcgagcaaacctccccgatgactgtttcaactgcaggtgggtgagaatatgcggagggggcgcactagagaatcgctttagccgcactcgacagttcgataatccaagcgtctattgtgctggactgaagaagtactactcacatgtagttgattttctgatcgagaacggatatccggaggcagcgattcaggagcgcctgaaggctgacgaggtcatgcagcccaccttcgccatctaa

SEQ ID NO: 499765 - DNA, 1653 bp, Stenotrophomonas maltophilia
atgctgagtctgaggattcaaggaagtggctgtggacggggtgatatgcgcgtaactgtcggcaaagctctcattcgactggtgcccatagctccaaagccatgggcgctgttggcaaccttgctcatgttggctctgcccacggcaaacgcatgggcagggaagcgtgattgcctcgcgtccggccttgaggttgacacagccatgtcaaaggcgaccttgcgagtgacctcgctgggtacgcccaaactcaacctgcaggagtggcaagcgtcgaagagcgcccgcccggacgaacacgtctataccttggatatcagcaggagccggcttccggagggaagaaagtatccgctgatcatcaggttggcgccctccactgtcatgatcaacctacagcctctgatcaatcctgacgatccgcagtttgaacgcctatgtggcgatatcgatccaggagcctcacagcacccagcaagctctccagtgacggtgttcgaaggctacgcattcttcagcgatgggcggccagtacccgttccaacgatgctggccgatcaaggcgtgccacaggtgttcaggagccagtataagaattggctggagaaggcccagaagttctatgggcgtgccctcggacctgagcagcacagcgtgagctctgtaatcttcttgcttgagcagggcgccaatacccagcagggctgccacttcagcggaagctcattgcccggactgctgctgattggccttcgtgcgggttgcctggacacctcaaagggctttccaaaagacttatctcacttcattgcccatgaagcatttcatcaatggaatcaagatgtgcaaatgatggagtcactcccacagcaaagcagaatgatgctgctcgagggcggggcagaaatggcagcaagcctgtttctttcggaggagactgggagcaaggagcaagggatcacgcgcgacgtgggcgcagctgcagagtcatgtatcgaccaggcagagtacaggaagcgaccattgaacgacctgatcagtgagggcaagtatcaactcgcctactcctgcgggatggtctacacgttcctcaacctcgtccggacagattctgatccagcagctgctctgggcacgttctggaaaagtaccctgcaggataactcctcgtctcgtttcaatgaacgcaccgacttcaatgaggcattcggtgcgcgatcgtcggtgcagaacgccatgatcgaacttctagcccagaatggctacgcgcttcgcgaagcgatcagcggcttgagcaaggaccagcagttccgcattgccgccgaactgatgcgagaggtttcacgcaacgactgccaagggaactacggcctgtttaccggtggcggggtgattgtgcttgatcccgaagtgaagacctgcagctctctgaggcctgggggaaaacccgcggcaatagatgggtttgattttagagagcatgtgttggacgctcgatctgcatggatttctgcttgccggaatggaggagcagtgcgcatcgactactccgacagctctgcgaaacggtcgatcgtgtcgtgccaatcccccccaaggtccctgtacacgccgtttcatctttcccgaatcacgccaagggggcgaccatga

SEQ ID NO: 499766 - DNA, 738 bp, Stenotrophomonas maltophilia
atgcttagattgcacgcggaacggttgtccgatatcgccctcagcgaacaggagagccccgacggagtcgactcgtgccacgtgccggacgattcgagtgtcgaattcaagaatgtcagtttccgctactccgacggagagccctgggtgttgagaaactgtagttttaaagtggaatcgggtcgttcaatcgccatcactggagtgtcagggagcggcaagacgacactcgccaagatcatgctcggcctactgaagcctagcgaaggagaggtgatctttggaggacagaaaattgatgatatgggtcacggacgattcagaggcctggtcggtgcagtcatgcaggaagatcagctgttcgccggaacgatcggggacaacatcagttttggtgatcaggactcaaccgatgagcgcatcagggaggcggcgacgctcgctgcagtgagcgacgatatcgaggcgatgccaatgggctacagaactctggtaggcgacatgggttccagcctgtctggagggcagaagcagcgagtgatcctcgctcgagcgctatatcgccgcccccgtctgctggtcctggatgaggcaaccagccatctggacctcgagtgtgagcggcgcgtcaatgcggccgtgaagatgtcgagcatgacccgggtggtgatcgcccatcggctggagacaatacaaagtgcagacgaacggttcgagataaagcaccgggagtgctga

SEQ ID NO: 499767 - DNA, 1284 bp, Stenotrophomonas maltophilia
gtggcagataacctctttcgcagagaggcttcacctgaagatcagcatagtggcctcggcgagaccctgcttgccggaccaccttctcgctggctatggctttgcctgatccttctgctaacgactgctatgggcctgttcctggtcctaggccaatacacccgccgagaaacggtgacgggtcaactggtgcccgctagcggactgatcaatatcaccgctcttagcccgggaacagtcgcgcgactacatgttgaagatggccaatccatacaggcagacgaagtcctgatggagatctcaagcgatcaggacacggttcgacttggtgcaacccgagcatcaattgatgagcagcttgcggaaaaggaggggcgctacagggccgatctcgtttcccaggattctgtcgcccggcatcagcgagaggcgctggttgctcgcgaatcgctcatacgacgacagctggaccaagtcggcgaacaggttgcattgcaggctgaggaagttgaaggctcgcaggcgctcttggagcggatcgagcctttgggaaagggtggatacatttcggcatttgagattcagcggcagcaagcggtggtacgtgccgcacgctcccggaaggcagaactgcagcggcaggggctcgaactccagcaacagcttgctgccgcccaggagtccttggcgaaacttccgctagaggacgcaactcgccgaaacgaaatcgtgcgagagcttgccgacgtagctcaatcgcaggcccaaaacgatctacaacgcggcacactgtttagagcgagacaaggaggtgtcgtcgcagctctacttgttaagaccggtcaaatggtgagtgccggtcagcccatgataacgatactgcctggcgacgcgaagctgcaggcgcagctccttattcctagtcgtgcaattggattcatcgctccaggcaatcgcgtcatcctccgctatgaggcatttccgtaccagaaatttggtcagcagtacggaagggtatccatcgtctcccgaagcgcactgacgccagcggaacattccgctttgactggccgactaccgccagcggatcaaggaccactctatcgagtagatgtagagctggaccggcagtacgtttccgcatatgggatcaaggagtcgatccggcctgggatggcgctacaagcagatgtgcttatagagcggagacgccttatcgaatggttgtttgagccgctttttggcatccagagacgtgtgttcgaggaaaactccaatggctga

SEQ ID NO: 499768 - DNA, 570 bp, Stenotrophomonas maltophilia
atggccggtctgtctctgaatgcaatgaaggatggctcaaccacgatggcaacgattcacctggtcgaagggcccgtcggtgcgggcaaatccacgtttgttgccgagctgcgaagtctgcacacggctgcaggattcattctggacgcgtggttcgtacggctgtacagcccggaccgtcccgccgccaacctgatggaatggtatgccgcaaggaaggcgcgttgcatggcgcagatatggatcacagcctgcgaagtgctcgatacgggtcgcgacgttgtactcgagctgggtctggtggagagagccagccgcgagagcttctacgcgcaggtcagggaggcgggctacgatctggccgtgtatctcctggatgccccacgtgacgttcgtcgtgatcgcgtccgccagcgcaatcgcgagaaaggcccaacgttttccatggatgtgccggatgccttctttgagttggcgagcgaccattgggagcccatggaccaaaccgagtgcgagatctacgacgtccaggtaatcacctggaatccagggtctgcttctggtggatga

SEQ ID NO: 499769 - DNA, 159 bp, Stenotrophomonas maltophilia
atgctgctgcgcgatctcggccacggattcggccgtgcatttgccgcctgcatcgtgctgatgcggtgccggaagattccgctgatggtgctggagtcactgttcctgcaggccacggcggcgtcgctgatcctgctgccggtgcagctgccggagtga

SEQ ID NO: 499770 - DNA, 189 bp, Stenotrophomonas maltophilia
gtggcggtcacccacctggaccaggcaccgcaggccgcactggatgactgggccatccgtgcctgccttgacgaccagccgctgccgctgctggccgtggatgcccgtgaccgaggacagggactgctgctgatggatgtactgatgagcgaaatggaagcgcacgcactggtggctgcacatggctga

SEQ ID NO: 499771 - DNA, 642 bp, Stenotrophomonas maltophilia
atgagccacagtcctcgtcccctgtccccgttgtcctcgctgatcttcgcctcgcgctggctgcagctgccgctgtacctgggcctgatccttgcccagtgcgtctacgtgttcctgttcggcaaggaactgtggcacctgctgtcccactcggtgtcgatgggcgaacagcagatcatgctgatcgtgctgggcctgatcgacgtggtgatgatctccaacctgctggtgatggtgatcgtcggcggctacgagaccttcgtctcgcgcctgcgcctggaaggccacccggaccagccggaatggctgagccacgtcaacgccagcgtgctgaaggtgaagctggcgatggcgatcatcggcatctcctcgatccacctgctgaagaccttcattgccaccagcgcgctgaagggactgccactgtgcaagccggaacaatgggcggcagcagtgtcttcggcttcgaccagcttctacaacgctggcgtcgatacctgcacgaccatgacccaggaaggcgtgctgtggcagaccatcatccactgcgtgttcatcctgtcggcgatcggcatcgcctggaccgacaagctgatgtccaacggccacagcaagtcgcacgacaaggcacacgaccactga

SEQ ID NO: 499772 - DNA, 453 bp, Stenotrophomonas maltophilia
atgtactgctacgactacaggatctcgctgcgcgtgcagcacccaacagaggccggcgccgggattgccgcccggctggatctggaaccggcgttttcccgagacgtcggaaccggataccgggatcgcgacggcagcctgatcagcgggcatgcggagacccgcgtggtgttcgtactggagaggggcaaggacggctggctgatggatgcctggccggcgttggtcgatctcctgcgggcacgcgccgatgtgatcggggaactgctgcaggagggggcttcgatcggcgtgcgtgtcggcatctttggaaagaccgcatgggcgggttttgtgctggatcagcagttgctgcgactgttggcggacctgcagctgggtttccaggtggagacctatttcccggacccggcggacacgcccggcgccagcgacgaggtggcaggcagctag

SEQ ID NO: 499773 - DNA, 561 bp, Stenotrophomonas maltophilia
atgtcaatgtcgatcccgtcgatcccctcgctgccttccccggcctatcacgcctgggtgcgtcctgtcgcacaggcctcgttctggctgtcactggtgctgacgatctacttcgtgctgcagggactggtgctgtggccgttgcacaagctcgcgctgtggcgcctggtggaaagcgaagtgcagcaccagcagctgcacagcctgatctggctgctggcgcacccggtagccgcatcgatggtcgtcgcgctgttgtgcctggcctcgaccgtatccagctggggcctgctgcgcgaacggcgctggggcctgtggagcttcgtggtactgctgctgctgagtggcctgaccaacttcgcggccgcctggtggctggacctgttcatgggcgacttcattccgctgctggccaatgacccggccctgctgcaggagctgcagctgaaacgctggctgatcacgctgaccgtggtcggcatgtcgttcgtgcttctcggcctgcagggctggctggcctggcgcctgctgcgccccgacgtgcgcgcgcgcttccgctga

SEQ ID NO: 499774 - DNA, 1647 bp, Stenotrophomonas maltophilia
atgcctcctttcgccccacgccacctgattccggccttcattgccttgttgctgctgacctgggcgcagcaggcggccgcaaccggtctgccacgctgtggcctattcgcggccgaaggcggtggcaaccagctgcgcgtggatgggcctgaccgcggggtggcgaagaacacgcacatctctgatcggcccttcgttgtccaagagatcgatggcgagctgagcctcgtcaacctcaccttcggagttacatctggactgaacgtccagcgtggcggtcgcgtcctgcagcagggcaacacgcgctaccgcctgatccagccagcagcttgcctgcccccggtcgagcacgcgccaggcagctgcctggcagatgcccagcgctgccttgacaggcatcatcgtgagctgagcctgccggcgctggaatcggcctgtgccgaaggggttccgtttctgtgccagcgcctgcccgatcgctatcgcgaggctgaccaggcccccggcagcgatacgccgaccgaagcacagatcgcggtgatacaggccacgatggaaaaggagatggccgagatggacttcccccgccagtgtcgcaaggatgaccctgcggccgacaccaaggcctgcatggccatcctggaagagcggccagagctggtcgaggccgtcgccactgccatccgcaccgcctcgatggcggccaagatggttgaagtgttctcgcctgcagccaagcctgcgctgtccgacgcgcgattgcagcgcctgcaggacctatgcacccaggtgggtgaaagtgacttctgcatggaggttgccaccctgcagtggaccgccggcaatctgcaggacggcagggcggcgttgcagatggcctgcgaaggcggcaacgagacgtcctgccggcaggcggctgcactgcgggcgctggatggggagctgttgccgcaggccgccagcgccgtgccctgtggccactacgtggcctccggcgggctgttggacgaactgacattcggcgatggtggactggtggaggtgggctacggttcgcgggtgcgtgcacgcgtgcaggacggccaaatccgcatgcgccacgagctggggggtgactacgtgctgcaaccgttggccaacggtgacctgctggggctggacgattcgatgcgttttgagcgcttccagcgacagccgggaagtgcccagtgcagcgcaccgctggtgttcgacgaaatcccgttcccgcaggattgcccacgcgcgtcggtcgacggcgaagcagaagcctgctgcgcggccggcaggatgcagggctgcaatgtgctgggcagccgcgccgcgctgggcgggaagtgggtcgaggccagccagcactaccagaaggtgtgccaggccggcatccgcgaaggctgtgaaaacctggccagcgtgatggagaacagcagcagtgtggacgtccgccccatgcttgaggccgtctgcgaggccgagggcagtggccgccacgtggcatgtgacgtgctggcgacgcgcaactggagcttgctgggtttcggccaggcgttgcaacgtgctgtccaggagcagtcggcggacgaggatcagaccggaccggcgccacgcacccccaaccacaagcagtaa

SEQ ID NO: 499775 - DNA, 1521 bp, Stenotrophomonas maltophilia
atgcctgctgctgttcccttccgcccccgcgccgcgggctggcgctccctgctgttgcttgcattggcctcggccagcctgccggccgccgcgcaatcgatggcctgcggcacctacaaggacgtcgacggcaacaccacgctgaccatcgaaagtgaaggccatggtttcctgtccggcccctaccaggccaccgagcagctgcgcatcgcccgccaggaggacgtgctcggcaccggcaacctgtccaccggccgcctggaaaactggtacttctcggacaacgatcgcacgatcagcaccccctatcgcgaattcacccgcgagcacaccgccgcctgcaagacgatgccggagcccatcgagggcggctgcgtaatgaacacctccgagtgcctggaggcgttgccggaagccgaaccgctgaagctgcatgcctggtgcgccgaaggcgtgggcgcggcctgcatgcagctgctggagacctaccagcggcaggccaaggacgcagcgccggcgcctgcacgttccgagccgccgatgccggagatctgcaaagaggattcggcgtcgttcaatgccgagggctgcagggcgatcgcggaggtggtcggcgccgagatgatgggcaaggccgtgctcggcctgcagcattcgaacgaccctgtcttgccgaccgcgcagctcgatgaactggccgcactgtgccggcagcagcacggcgaggcgttctgcgccgacgttgccgaggcgctgtggagtggtgggcgcctgttgcaggcccatgaggcgctgcagctgtcgtgcgcccagcgcgcggagggcgtggcctgcggccgcgccgaggcgcttgcccgactggcctcggtaccggccgctgcactggccccggtgccggcttccgcgctgccctgtgggagctatgaagcggagtacggcgtgctctcgcagctgcgcttcctcgatggtggcctggtggaagccgggggccgcgaccagcgcctgcgcgcgagcctgcaggacgggcgcatcctcatccatcgcgacgtcggcagcgacttcgtactgcagccgctgaagaacggaaacctggccagcgtcgacggcggcaaccgcttcgcctactacgagcgcaagccgggctcaggcaatgccagctgcgcaccgccggtggccttcgtggagatccccctgccgctggactgcccgaccccggaccgcaaggacggcgccaaggcctgctgcaccgatggcaagctgctgggctgcaaggttgccggcgaggcactgttcaaaaacgaacaatgggccgcatcgcggtcctacttccagacgctgtgcagcgcgggtgtgcgcgaaggttgcctggcaatggccgcggtgtatgcgcataccgcggatccgaagattccgcaggccatggctgcgatctgcgcgaaggacggcaagggcacccacgtcgcctgcgatgtggacgcgacgcgcaactggccggcgctgaaggctgaagccgctccctga

SEQ ID NO: 499776 - DNA, 147 bp, Stenotrophomonas maltophilia
atgcaggacagcaagccgacatcacaaagcatcctcaggatcatcctgtggagcctcgccgccaccttcgccctgtgctgcggtggctattgcctgggcaaggatcttgcccagcgcgacaacgcccggcagtcagccggccgatag

SEQ ID NO: 499777 - DNA, 438 bp, Stenotrophomonas maltophilia
atggaagacatcgaatggtatgtctacctgctgaccctggacgactacagtccgcatgcgctggtgcgtagtgtggccggcgcaggagatcgagaatactggagcttcgctgtggagctcacctgtcgctgcctttcctccggtctgtggcgactctcctacggcctgcctgcggagctggggctttccagcatcgatgccttctgccacaagctctcggttgtccgtccggatcagctttccgacgaggggcaggtgctgtggctggatacctacatggaagcgacggagctgtgcctggatctggtctcgcgttacctgcgttcgcagtcgagcggtgagacgacatttcatccaggattccaggatgagatcgaacggctgttctccgatgccggagtgccctggaggcgtgggcctctgttccccatcgcctga

SEQ ID NO: 499778 - DNA, 168 bp, Stenotrophomonas maltophilia
gtgaactatttcggactccgtccatgcagcggcattggcagcaaatgggtgctgggtgatgtggatcatgtggacaacttcggtgctgcactgatcgtcagtgagggagtgaagtcacgccttgagcgggcaggcgtgattgacgtgatccttgatcaggtcgggtag

SEQ ID NO: 499779 - DNA, 489 bp, Stenotrophomonas maltophilia
atgactatccgtgcagttcttttcccctactggaccggcgattgccacgttccttccggagaagagaagatcggtgacgcgccggtcgtccaccatgggcagggacggggtgtcggtgaaatcgcagcatggctggatggagacttcggccatctcggctgcggcagcgaactgcggacccgcagtgcctttgctgcgcccacaagggatgacgagggcagcgcatgcgtccactatggagaggggcatgccgtcctgcgggcagccgatttcctcctggtgtattcgcgatggaactcccaggacgttgtcttgctgacgcgaccccagatattggctgtgcttgagggctacgcagtgtttcgaagcatgaatccgcacaagaagcatcgtccgcccatgccgttcgccatcgagtacgaggcagagggggaggacgccgtccaaaggttcactcaggccggcggctgcttcgaccccgaacactga

SEQ ID NO: 499780 - DNA, 1200 bp, Stenotrophomonas maltophilia
atggcaaaactcaagctcaccaagtccgccgtcgatgcggcacaaccgcaggcgcaggctgtcgaactccgggacacgatggtgcccggcttcctctgcaagatcaccccggcgggccgcaaggtgttcatgctgcaataccgcacgaacgccggagagcggcgcaagcccgccttgggcctgtatggggaactgactgtcgagcaggcccgcgccttggcccaggagtggctggccgaggtgcgcaagggcggtgatcctggggcggccaaggccgccgcccgtgccgcgcccacggtcgcggaactgtgtggcaagttcatggaggactactccaagctgcgcaacaagcccagcacgcaacgcggctatcaggccgtcatagaccgctgcatcgttccgatgctgggccggatgaaggtgcaggacgtgaagcggcccgacgtggccacagtgatgaagaagatggcccacaagccggccgaggccaacaacgctttcagcgtgatgcgcaggatgttcaatctggccgaggtgtggggctaccggacggatggaaccaacccgtgccgccacgtcccgatgtaccccaacgggaaggccacgcacctcatcagcgacgaggacatggcgcggatcttccgccatctgagcaagctggaggcggaagggctggagccttacgtcattcccctggcgatccgcttgcaattcgagttcgctgcccgccgtggcgaaatcgtcacgctccaatgggattgggtggatttcgagaaccgccgcgtggtttggcccgacagcaagaccggcggcatgtccaagccgatgagtgaggaagcctaccgactgctttcgaccgcgccgaggcaggacggcattccccatgtgctgccgtccccgagccatacgggccagcacttgaccacgggcgagtattacggcggctggtgccgcgcgctcaaggcggccggcgcggcccacgtcggcacgcacggcatccgccatcgctcggccacggacattgccaactctggcattccggtcaaggtcggcatggcgctgacggcgcacaagaccgtggcgatgttcatgcgctatgtccacaccgaggatgacccggtgcgcaaggcggccgaactggtggcgaaccggcgcaagacaatcactagggcgcagcgccccgtggaggtgacgacatga

SEQ ID NO: 499781 - DNA, 1065 bp, Stenotrophomonas maltophilia
atgaaccggcgcaaagtatccgtggcgtcctccgcagtgccgtcggcgctgctgggcgatattcgggcgctgatcgaggcggcgcacaagcgcgctgcctcggccgtcaatgccgagctgaccctgctgttctggcgcatcggccagcgcatccatacggaagtgctggccggtcagcgagccgggtacggcgaggaaatcctgccaaccttggccgagcagttggtacgcgactacgggcgcagcttcgcggacaagaatctgcgccggatggtgcagttcgccgccacctactcggacgagccaattgtcgtgacgctgtcacgacaattgagctggtcacattttctggccctgctgccgctcaaagacccgctccagcgggactattacgcgcagatggcgagcgccggccgctggagcgtgcggacgctgcgcgaacgcatcgactcgatgctctacgagcgcacggcgctgtcccaaaagccggacgaaaccatcgcgcaggagttggcgacgatgcgcgatgcgcagcgcatgtcgcccgccctggtcatgcgcgatccgtacatcctcgacttcctcgggctgcgggacacctggcaggaaggcgacttggaggccgcgatcatccgcgaaatggagtccttcctgctggaactgggtgcgggtttctccttcgttgcccggcagaaacgcatccagatcgacgacgaggatttccacctcgatctgctgttctacaaccgcaagctgcggcgcctggtggcggtggaattgaaggttggcgagttcaaggccgcgtacaaggggcagatggagctttatctgcgctggctggacaagcatgagcgcgagccggaagaagcctcgccgctggggatcattctttgcaccggcaagaagcgtgagcagatcgagttgctggagttggacaagtcgggcatccacgttgccgagtacctgacgagcttgccaccgcgtgcggtgctgggagagcggttgcagcaggcgaccgaacgggcacggttgcagattgagcagcgcaagacggatgccgagtag

SEQ ID NO: 499782 - DNA, 510 bp, Stenotrophomonas maltophilia
atgtcgcaattttccttttcctcgttcgacgcctcgctgatggtgcgcgatgcgcagggtcactaccagccggcgacggccgaccagattctggatgctgcgcgccaggccatcgagcacaagatgcagcgcggtgcatcgttcacttcgccggcggcggtcaaggagtacctgtgcaccaagctgggcggcttcgagcatgaagtgttcgctgtgctgttcctcgatacacagcatcgtctgatcgagtatgccgagatgttccagggcaccatcgactcggccgaagttcatccgcgcgaggtggtcaaggcagccctgcggcacaacgcggccgcggtcatcgtttcgcacaatcatccgagcggcaatcccgagccgagtgcggcagaccaaacgctgacccagcggctcagggaagcactggggcttgtggacgtgcgcgtactcgatcacgtcatcgtcgccggcaacgcaacggcatcgttcgccgagcgtgggctgatctag

SEQ ID NO: 499783 - DNA, 2337 bp, Stenotrophomonas maltophilia
atgttgctaaagcaagaacacggggggctaaaagtgatcgtctgtattaaccgtctcaagcagttcggcatcttcagcgacttcaatggaacgaagatccagaagttcggccggtacaaccttgtctatggctggaacggaacaggcaagtcaaccctatcgaatctattctcttgctttgagcttcgctcgatggttcctcgcttcagtgcgggccagttttcagtcgttttggaggacggctccacgatcacggaaaccacactcccgtcatcccaattaaatatccatgtcttcaatcaacgatttgtgcatgagaacattgattgggacaaatccgtaaaaagcatccttctcattgcgaaagagaagattgatgacttgcagaaactggagaagctaaaaggcgagcttcaatcgaaaaagaaagctcacgacgaaaagcaaagcgacatcaagaagcagcgtgaagcattggataaatttctgaccaatgctgccaaaaaaatgaagctaggacttcaggcgattgatacgagcgatagctactacttgaattacgatcgccgaaagctttctaatttcattcagagtaatggcgatgccattattaagcctgactcggttcttccagatgaaaaggtcatcgaccttacgaatgccgccaagccagatcagcttccaagcatcactttcgcctcaacggccattgagccggactactttaagaaggcggcaggtcgcatcagagacttgattggaactacagcagtcaatcaagctatccagcggctgactgataacccggacattcgtgactgggttcaaacaggcttggaaattcataagaaccatgattcgcaatcctgcgagttctgcggctccccattcacccagcttcgtgccgaggcacttgccgctcacttcagcaaagagttcacggattttcaaagccgacttcagagcgccgcgatttggattgaatctcaaggtgctccagccaatcagttgcccgcagcgacggagttttataaagagctatcggctgacgcagataagctccagaaggaatacacatctgctgctgagaagatcaaccagcaaataaacggatggcggcaagctctgaaagccaaaattacagaccctgcaaagacagacattcagatttcggatgtggttgaagaggatgtcacgaatttcaatgagatcctaaagtcgatcgttgcgctcgtcggaaagcacaacaataagacttcaaacttcaaatctgagacatccaaaagcaaggtggcactggaacttcactttgctgcggctgaggtgcaagaatttgactatgctggaagtgagaagaaatgcaatgaccttgaggctgaagcaaagaatgactacaaggaaattgaaaaacttggtcaagaggtcggagcaatagaggcgctgctctcaaatgagacggttggggcgaaggagttcaatgacatcctgcatcgtttcatcggtcgctctgagctttgcctgagctttaatcaaaagaaaaaaggctatgagatcatcagaaacggagtgggtgagcatgatgggaatttgagcgaaggtgagaagactgcgattgcatttgtctacttcatcacgaagctcaaagaaaacggaaacaacatcaaggaaacgattgtggttgttgatgatcccgtctcaagctttgactcaaatcacttgtttcatgcctattcgttcctaagaactcaatgcactgaagccaagcaactttttgtgctgactcataacttcacctacttcaagctagtgagagactggttcactggaacgaacaggaacaggattgccaaaggaaaagctgagaattgcttcttctatcgactggatgcgcctcctggctcaccccgccattcgctgcttgttgacgccgatgattctctgaaaaattacggctctgagtatcactacatcttcaaaaagctctatgaatacagggcgcatacgatccttaatagagatgaagcctttttgactgcgaacctcgctcgcaagctcattgaatcgttctttaccttcaaatatcccaggcggagaagcgacataagtcaactgatggatgttggtctgaaagactgcgctatcacaacgccggaactcaaggaaaaaatatatcgctttatcaacaaatactcgcatagcgatgtaattgaaataaccgaggaatcggcagaaaacttggctggcgaaagccatagcgtcatcggacacatctttcagtggtttgaagaagtggacaagaagcattacgacgaaatgattcaggttgtgacttcttga

SEQ ID NO: 499784 - DNA, 828 bp, Stenotrophomonas maltophilia
atgcaactcgcatcccgtttcgcttcccgttccccttcgctgcgcagcgattacccgctgaccgatgaccagattcaccgtgtcgcgccgtccatcttcgcggacgccccgcatgaaagccgttcgcagcggtacgcctacatccccaccgccgccgtgctgaccgagcttcggaaagaagggttccagcctttcatggtgacgcaaacccgcgtgcgcaatgaaggcaagcgcgagcacaccaaacacatgattcgcctgcgccacgccagccagatcaacggcgcggaagccaatgaaatcgtgctgctcaactcccatgacggcacgagcagctatcagatgctggccgggatgttccggttcgtttgcagcaatggcctcgtgtgcggcgaaaccgtggccgatgtgcgcgtcccccacaaaggcgacgtggccggttccgtcatcgaaggtgctttcgaggtattgagcggcttcgagcgggtgaaggaatcccgcgacctgatgcgcggcatcaccttggacgagggcgaggccgaagttttcgcccgcgccgcgctgtccctcaagtacgacgacccggacaagcccgcgcccatcaccgaatcgcaaatcttgatgccgcgccggttcgacgaccgccgcccggacttgtggagcgtgttcaaccgcacccaagaaaacctgaccaaaggcggattgcatggccgcagcgccaacggacgccgccagcagacccgccccgtgcagggcattgattccgatgtgcgcctgaatcgcgccttgtggatgctggccgatggcctgcgccagttgaaagcctga

SEQ ID NO: 499785 - DNA, 2061 bp, Stenotrophomonas maltophilia
atgaacgccatcacctacaccgaagtccgcgccgtcaacgccgccgctatcccgctggaagccgccgacccgaccaagaacctgattctggttccgctgtcgcggctggtgttgcgccccacgggccgcaacgtgcgcaagaccccgcgcatgtccatccccgaactggccgcgtccattcagcgtgtcggcctgctgcaaaacctgatcgtgatcgcatccgccgatggcgagcattacgaagtcgtggccggtggccgtcgcctcgcagccctcaagcttctggcgaagaagcaccgcatcagcaaagaatgggaggtgccttgcctgctagtggccgattgcacggcccgcaccgccagccttacggagaacgtgcagcgcgaagccatgcaccccgccgaccagttcgaagcattcgccgcgctggtggccgaaggccgccccatcgaggacattgcggcggatttctccgtcacgccgctggtggtgcaacgccgcctgaaactcgccaatgtgtcgccgcgcctgatggccgactaccgcgccgatgccgtcacgctcgatcagttgatggccttgtccatcactgacgaccacgccgcgcaggaaagcgccttctacgatgcgccgacatggcagcgccagccgtccgcactgcgcgaccgtctcaccgagcgagaaatcgacgcctaccggcatccgctggtgcgcttcgtcgggctggacacctacgaggccgcaggcggtggcgcgcgccgtgacctgttcgcggaaggcgatgcgggcgtgtacctgaccgatgccgcgctgctggagcagctggcgcaagaccggctggcgggcatcgccgccaccgtccgcgccgagggctgggcctgggtggatgccacgccgggcgtgacccatgccgacctgcacgctttccagcgtgcgccgagggagcgccgcgagccgaacaagcgcgaggcacagcgcatcgaaaagctgcaggaaaagatgcgggccatcggtgaagccgtggatacggcgatggatgccgacgacgaggacaaggccgacgctttgcaggaggaaggcgaagccgtgggcgagcagttgcagacgctggaagatggcttgcagggctacagcccgaacgtgatggccgcagccggtgccatcgtcaccatcgaccgcaacggcgaagccgtgattcatcgcggcctgatgcgcgaggccgaggccaaggcgctgcgcacgctggaaaagctgcggcagggtttcaacggcgagggtgccgagaacgacgacgaaggcgaggacgaggagcaacccaaggccgccgccatgtccgaccggctggcgcagcggttgagcgcccaccgtaccgccgcgctgcaaatcgaggtggcccggcatccacaagtcgcgctggctgctgtggtgcatggcatggtgcagaccgtcatgcaggggagccactacggcccccgccatgatgcgttgccgctgggcgtaagcctgaaagtgcaagaccgactggaaggcatggccccggactggccggaatcgcccgccgccgtggcgctgcgcgaactgcaacaggtggcgggcgaagccttgccgcaggacagcgccgaactgttcgccgcgctgctggcgaagccgcaagatgaactggtgcgcctgctggccttgtgcgtggcgtccacggtggacgtggtgacgccccgcgccacgccgcagcaaccgggcgcagaactcgcgcaggccgtggggttgaacatggccgcatggtggcagcccaccaatgacggttatttccggcatgtgccgaaggccgcgattctgcaagccgtgggcgagtacgcgcccgagcaggtttcccggctggcgaagttgaagaaggccgacattgccagcgaagccgaacggctggcggatggcacggggtggatgcccgtcaccttcaaggccgcaggcccgcaggatgccgcgcagggagaaggcccggagcaggacgcgccgatggatgccgaggctgtggcggatgaatccgccgaggcgctggccgcttga

SEQ ID NO: 499786 - DNA, 210 bp, Stenotrophomonas maltophilia
atgatccgcactaccaccagccgcccacgcatggcggcaatctacgcacccggcacggtgcgcgcccgccgctggcacggcgaaggcgacgtgcgcggctaccgtccgccctcgggctggacggcccgcgctgacctcacggacattcaccccatcacgggccgcgccttgccgcgcgccgtgtggtggatcatcgagacgaaggaataa

SEQ ID NO: 499787 - DNA, 921 bp, Stenotrophomonas maltophilia
atgactcaaacactttgcccatatgccctgacgccgctcgcatcgggagaaagcaacgatgagcacatacttcccgtcgccctgggcgctccggccagctttacggttcgcgcgctagccgctgaaaacagtcggatgaatgacctcatcgacgagccgacagtcaacgatccgatggtgcgttttctggctatgtctcagggagtggtctcccggtctggcaacgtcaaagcagccgtggatggaactgttcacggtagcggcgaggacgtgagagctatgttctcgcagaacggtctggatctgaagttccatcagccagtggacaccgacagtcagggacgagtgatcggtgttcgcggctttggtgatgcggccagacagatggcgaaccaaatcgcggcgaactacgcaaagaagggcatcgccgtcgaacttggggcagagacaagccaggggcaacctcaactgaacatgcggctagtcgccgacatgctcatgattcggcggcaactgttcaaaatcgcctatctcacgacagtgagaatcttcggtgacgaggcaatcacagggccaagtggtcagcagctacgggctgcgatgatggccgagagtgatgaggctctggctcgcaccaagatcgccggcgcggcgttccagccgctgccgcccgggtttgctcgttctgcaagacacgctgaacacgccattacctgcgccgttatgcccagcgttggtgtggtgatttccattgatctgtttgggtgcttcaccctatttacggtgacacctgcggctggaatctctgccgatgaaggaacgggcgaggtaatcacgattgacgcctccagctcgaagctcacgagccacccatacctagaggcgctgccagggctggtggcagcctccttccggggctga

SEQ ID NO: 499788 - DNA, 957 bp, Stenotrophomonas maltophilia
atggccaatcaaattgcagtcggtatcgacatctccaagaagaccatggatgtagccatggggcacgagcagcctacggccatattcagcaacgatggtgccgggcatcaagcgttgatcgaagagctgaaaaaccatcaggtctcgctgatcgtgatggaggcgaccggacagtaccaactggcctgcgcctgcgcacttcaagctgcgggattcgctgtcgtcgtcatcaaccctcggcaggcacgggacttcgccaaggccatggggcgcctagtcaagaccgacagcgtggatgcccgcatgctggctgagctggcccaggtgctgaatctgcggccggatcgagaccgcttcatcaagccgatgccagaccaggcgcagcaataccttcatgcactggtgcttcgacgccggcaactggtgcgccttctggtcagtgagcgccagcgcaagcacatggcgcatgccgaggtggtgcaggacattgtggaactgatggatgtgctgtcgagacagcttgaagcgctggatcggaggattgcggaacacttggcgtaccatcagcccgatctggccgccttgctcaagagcgtcaaaggggttggtccggcaacggctgcgacgctgatgtccgagctgccagagcttggccggctcaaggccaggcagatctctgcgctggtaggcgtcgctccgatgaaccgggactcgggccaggcccgcggcaaacgcttcatctgcggcggacgtgccgcggtcaggagcgctttgtacatggccgccatcgtcgccatgcgtcacaacgccgtgatacggcgttgctatgagcgtctgctggcggcaggcaagccgaagaaggtggccatcgtggcctgcatgcgcaagctgctgattatcctgaatgccatggtcaaaagcgggcggccatggaatgaccagcttgcacaggcctga

SEQ ID NO: 499789 - DNA, 1230 bp, Stenotrophomonas maltophilia
atgacagattcaaccaacaccttgcagcatgagtccgcagccgcgcgcggctcacccgtcgaagtcttcggcgcctttctcaagctggggctgacctccttcggcgggccgatcgcgcacctgggctatttccgctcggagtttgtcgagcgccgccgctggctggatgaccgcagctactccgacctggtcgccctgtgccagctcctgcccggcccggccagcagccaggtgggcatggcgctggggctgggccgcgcgggctggctggggctgctggcggcctgggccggattcaccttgccatcggcgattgcgctgatcctgttcgcctttggcatcgccgagtaccaggggctggcccagtccggctgggtccatgggctcaaggtggtggccgtggccatcgtggcccaggcagtctggggcatggcccggtcgttgtgcccggaccggtcgcgcgccgccctggccattctggcggcgctgctgaccatcattcttccctcggcgatggggcagatcgccgccatcacggtggcgggattgctgggctggtggggcttgaagatcgcacagcctggcggcggccatgcccatagctacccggtttcgcgcaagctgggcgtcgtggcactgctgctgtttgccgccccactcgttgggctgcccctgtgggccgcagccacggactcgttcacgatagcgctgctggaaggggtgtatcgctccggtgcattggtcttcggtggtgggcacgtcgtgctgccgctgctgcaggccgccgtggtgccgagcggcgtcgtgagcaacgccgacttcctggccggctacggcgcggcgcaggccgtgccggggccgctgttcacgttctcggcctacctcggcgcggttgctcacggcccgctgcatggctggatcggcgggctggcactcctgggcaccatcttcctcccggccttcttcgtgctggtcggcgcactgccattttgggaaggattgcgccaccgcgcgggcatccagacggccatggccggcatcaacgccggcgtggtcggcattctggtgtccgccctctatgacccggtatggacgagtgccatccacggcaaggcggattttgggctggcgctgctctcgttcgggctgctgacggtgggacgcgtgccgccagcgctcgtggtgctgctggccgggctggcgggctgggtcatggcgatgggtatctga

SEQ ID NO: 499790 - DNA, 303 bp, Stenotrophomonas maltophilia
atggagcaccacgacttgctgtcgggactgatccgcctgcatgtgctgcaccacgcggccgagcaggagatctacgggcaatggatgatcgacgagctggcccaccacggctaccgcctctctcccggaacgctgtacccgatgttgcacaagatggagcgcgacggctacctcgtctcccgccaggagcgtgaagggcgcaccgtgcgcaagctctacacgatcacgcccaagggcaaggaaggcttggcactggccaaggaacgcatccgggagttcaccggggaggcgatgcacaaatga

SEQ ID NO: 499791 - DNA, 423 bp, Stenotrophomonas maltophilia
atgagcaacatcaccatctaccacaaccccgcctgcggcacgtcgcgcaacgtgctggccctgatccgcaacagcggcgaggagcccacggtcatcgagtacctgaagacgccgcccgaccgggcgacgctgacggcactgatcgccgcgatgggcgtatcggcgcgcgccgtgctgcgcgagaaaggcacgccctatgccgagctgggcctggatgacccgcagtggagcgacgtgcagttgatcgacttcatgctccagcaccccgtcctcatcaaccggcccatcgtggtcacgccgctgggcacgcgcctgtgccggccatcggaggccgtgctggacatcttgccgcagccgcagcgcggcgcgttcaacaaagaggatggtgaggccgtggtggatgctgagggtcgcaaggtctaa

SEQ ID NO: 499792 - DNA, 1086 bp, Stenotrophomonas maltophilia
atgaatgcaatccctgaagcgctgcggcctgaacaagcgccgcagcccatgagcctcttcgagcgctacctgacgctgtgggtgttcctgtgcatcgtgctgggcgtggccctgggccagttcgcacccggcgtgttccaggccatcggccgcctcgaggtcgcgcaggtcaacctgccggtgggcctgttgatctgggtcatggtcattcccatgctgctcaaggtggacttcggtgcgctgggccaggtcaggcagcattggcgcggcattggcgtgacgctgttcatcaactgggccgtcaagccgttttcgatggcgctgctggcctggatcttcgtgcgccagatcttcgcccagtggctgccggccgaccagctcgacagctatgttgccggcctgatcctgctggccgccgcgccctgcacggccatggtcttcgtctggagccggctgaccggcggcgacccggcgttcacgctgtcgcaggtggcgctgaacgacaccatcatggtcttcgcctttgcgcccatcgtcggcctgctgctgggcctgtcgtccatcagcgtgccctggagcacgctgatggtgtcggtgctgctctacatcgtgatcccggtcatcctcgcgcaactctggcgccgcgcgctgctgcgccagggccaggccgccttcgatgccgcgctggcccgcatcggcccgctgtccatggccgcgctgctgctcacgctggtgctgctgttcgccttccagggcgaggccatcctgcgccaaccgctggtgatcgccatgctggccgtgcccatcctgatccaggtgctgttcaactcggggctggcctactggctcaaccgccaggtgggcgagcagcaccgcatcgcctgcccgtcggcactgatcggcgcttccaatttcttcgaattggcggtggccgccgccatcagcctgttcggcttccagtccggcgcggcgctggccaccgtggtcggcgtgctgatcgaggtacccgtgatgctgctggtcgtgcgcgtggtcaaccgctcgcgcggctggtacgaatgcggcccgaacccttcctcccgctaa

SEQ ID NO: 499793 - DNA, 498 bp, Stenotrophomonas maltophilia
atgaccaccgacaagatctacagcgccctgttcatctgcacgggtaactcggctcgctccatcctggccgaaggcatcctcaatgaattgggccaggggcgctttcgcgcctactcggcgggcagccaccccaagggcgaagtccacccactggcgctcgccacgctggagcggctgcacatgccgaccgctggctaccgcagcaagaactgggatgagttcgcggcgcccggtgcaccggagctggatttcatattcacggtctgcgacaacgccgccggcgaggtctgcccggtgtggccgggacggccaatgtcggcgcattggggcgttcctgaccccgcagccgtcaaaggcaccgatgagcagaagcgcaaggcattcacggatgcggcgctgacgctgcgccgacgcatcgagctgttcctgtcgctgccgctgcagcggctggacgccatgtcgttgcagcatgagctgcgcaatatcggtacgaagtga

SEQ ID NO: 499794 - DNA, 471 bp, Stenotrophomonas maltophilia
atgaagcgcttccacgtccacctgcacgtcgatgacctgaaccgcagcatcggcttctattcccaactgttcgccgcgcagcccgcgcgcgtcgaaagcgactacgccaaatggatgctcgaagacccgccggtcaacttcgccatctccacacgtggcaacaagccgggcattgaccacctgggtatccagaccgacgatgccgaggaattggcggtgctgaaggcccgcgccgaggcggccgacatgacgctgctggacgagggcaccacgacctgctgctacgcgcgcagcgagaagcactggatcaccgacccgcagggcgtggcctgggagcactttcacacgctgggcaatattccggtctttaacgaagcggcgcctgcagcgacttccgccgcagcgtgctgtaccccggtgcgcggcaagccgatgggcgttgcggtgaagccggcctcctcctgctgctga

SEQ ID NO: 499795 - DNA, 330 bp, Stenotrophomonas maltophilia
atgaatgaagcccaagccgtttccgccctcggtgccctggcccatgcccagcgcctgcgcgtgttccgatccctagtcgtcgccggccccgaagggctcacgcccagcgttctggccgatcagctcgacgtggcccgcaacgcgctgtccttccacctgaaggaactggctcatgctggcctcgtcaccatcgaacagcaaggccgcaacctgatctaccgcgccgacttcagccagatgaatgggctgctcggctacctgaccgagcactgctgccaaggcagcacgtgcgaggtcagtgattcctcctctgcctgtacctcctgctga

SEQ ID NO: 499796 - DNA, 315 bp, Stenotrophomonas maltophilia
atggccaacatcggcaccttcaccgcagacaaagacggcttcaccggcacgcttcgcaccctgacactcaacgtcaaggtcaagctggtgtccaacgacaagggggacaacgagaaggctccggacttccgcctgcaggccgccagtcatgacatcggcgcggcgtggaagaagaccagcgaggccgggcgggagtacatctccgtgaccctcgatgatccttcgttcccggccacggtctacgcccgtctgatcgaaggcgaggacggcacgcacgacctgatctggtcgcgcagcaagccccaggcggcgtga

SEQ ID NO: 499797 - DNA, 1788 bp, Stenotrophomonas maltophilia
atgacattgctccagaacgatcccattacccaactggcgttttccgtatacgagaacaaaggcgtcttcgctgttctactggggtcgggcctgtctcgctccgcagaaattcctacaggctgggaaatcactctggacttggtgcgccgcgtagccgaggctcaaggtgctccagagcaatctgactgggcgaagtggtatcgcgaaaagacaggccaggaaccgaactattccgtgttgctggaggagatcgccagctcaccggatgaacgcagggcgatcctgcatcgctacatcgagccggatgaacaggatcgcgaggaaggtcggaagacgccaaccaaagcacaccacgccattgcacagttggttcgagccggttatgtgcgggtcatcgtcaccaccaatttcgaccggctcatggagaacgccctgcgggaacaggggatcgagccgacggtcgtggcctctgcggacgcgctcgcgggcgccgaacctttgacccacagccactgctatgtgctcaagctgcatggcgactacaaggacgcccgtatcctgaacaccgatcaggaactgagcgcctatcccgatggctacaaccggctgctggatcgcatctttgatgagcatggtctgatcatctgcggctggtcaggcgagtgggatcatgccttgcgtgcagccttccttcgcgcacccaaccggcgctatccggtctattgggcggcgcgcggaacgctgggatcgggcgcacaagagttggcgacacacagggccgcaagggccattccgatcactggtgccgatgagttcttccaaactcttcagcagcgagtcgagacccttgagaaaagccagcgtcagaaccctttgagcgtggaactgctggtcagcagcgccaaacgctatctcgccaagcctgagcatcgcattcagttggatgagcttttcgcgcaggagactgatcggctactcgcccaattggacggtgacatgttttccgtgcagggacagtggagcccggagagcttccgcgcaagaatccggctgtatgagtccatgaccgagccgctggcccgcatggcgggcgttctcgggcgatggggcgacggcaaggactttgacgtggtgttggacgtgcttcgcagcctgtaccaccacgctggcaagatcggcaacggcctgactgcgtggctgaatctccgcgcctatcccgccgttctgatcttcacggcctatgggatcgggctaaccaaagctgcgcgatgggacacgctgctcaagctgttttcgtccgcgctggccacggaacatcgcgaaccgcagcggattgtctcgacactgttcctctggtcgtgggcaggcggcgaacaacaactctggcaacagctcgaagatatggatcgtcgcaagactccgctgagcgatcatcttctggaagtgatgacgcattggcgcaagagcttcacaggtgccgatgcaaatttcgaactgctgttcgagcgcttcgaggtgatggggtcgcttgctgcgttccatgagaacgatgaggcgcagttggagaaagccatcgaggcatcagcggcgcgcaatgatgtgcttgcctggatgccagttggccgatccggctggcacagcgccggggcacgaacgctgcttcaagagcttgaggatgagtctcggatcgctgagcttttgaaggcaggctacgccaagggaagccgccgctttcttcaactcttcgtcgaaaacttcaagctgtacgcccggcgtatgggctggtaa

SEQ ID NO: 499798 - DNA, 294 bp, Stenotrophomonas maltophilia
atgcagaagcgaaccgtccagcgcggccgaccggccggctccaccacccatgacgccgagttggctcacgccttcggcgcggcggtgcgtgcgctgcggatggagcgcggcatcgcgcaagaatcgctggcgcaccaggccggcatcgagcgctcccacatgggcaagatcgagcgcggcgagcacatgcccacgctggcgatcatcttcaagatcgccggtgcgctcgaatgcagcacggccgtgctgatgagcgaggctgaaagccagctcgcagcagcggcccagccgtag

SEQ ID NO: 499799 - DNA, 348 bp, Stenotrophomonas maltophilia
atgaatcgactcatcaccgaggacgagcgcaggcagttgctggcccacggccgggcccgtgccggtggcgaggccatcgacccgctacccgtcgtgcggctgttcacccccgacgcgcacgccatctggctgctgaccgcgctcgatcccgttgatgccgatacggccttcggcctgatcgacctggggatcggtatgcctgagctgggcaccgtgaagctgtccgatctggagtccatcgtcgggccgcgcaagcagcccgtgatgcgtgatcggtatttccaggcggcacgcccgctgtcggaatatctgcggctggcccaggagaacggttccgtcctcgattga

SEQ ID NO: 499800 - DNA, 792 bp, Stenotrophomonas maltophilia
atgatccagtctcatcatgttgcgcactggtatcccactgccgcctacctctacatcctgtggctggatgcgcttgcgctggcctgggagtacctgcgcaggcatcccgactaccggctcgactggctgcgccaccatcgccggacgcaggccgcacagcaggcggcgcatcgctggggcttgcgcctgctggaagacccggcgctggatgcgcgcgacgcgcatccagcctggctgcccggtcatgcggccgtggtgcagctccatcccgatgccgatccaccgccggatgcggccgtcttcgcgttctggcgcatacccggacacaagcaactgctgcacgacggcaagggtctggcgctgatcgcgcgcagccccggccattgcgcgcgcttcgcgcttgctcccggactggaagatggcatggcggtcgcccatgcctatcgcggaagtggtggcggcggcgctgccgcgcctgcccgtggccatgcgcccgtgccgaatgccgctctggcccatgccatgcccaggccgcctcctgccgcgctgctggagctgcataccttgcaggcgctcgacgcaaccctggccggtgcgtccttgcgcgaggttggcgaagggctgttcggcgtggacgccgtggccgattggtacagcgacggcggcctgcgctccaaggtgcgccgcctggtgcggcgcggcgatgcgctgatgcgcggcggctatcgccgcctagcacagcttgcgccgcttgagaagggtcgttttgaagaggacgcaaaacgaccctga

SEQ ID NO: 499801 - DNA, 282 bp, Stenotrophomonas maltophilia
atgcgtcctgctcccttgcggcctgccgccactgtctcgaccgctgccgcgcagccccaacgctatctcaccaacgacgaagccgccgaatacttgcgcctgtcgccgcgcacgctggaaaagcagcgcgtgatcggcggcggcccgcgctttcgcaagttcggccggcgcgtcatgtacgccgtggccgacctcgatgcctgggctgccgaccgcagcttcgagacgacctccgatcccgaatacgccgagcaccactcggccgacagccgtgcgcgctga

SEQ ID NO: 499802 - DNA, 858 bp, Stenotrophomonas maltophilia
atgtccagcaccgcgctgccgtcccggcagcggccgttgcaggagcgcgaacagctcgacctgttccgcgccttgcccggcgacatggcaccgcgcgacagccaggacttgatggcctatccgttcttctcgctcggcaagtccaagcgggtcaagcccatcgacttccgcgcgggcaacgtgacgatccgcgtggaaggcacggccgagcacggcatcgccacgatttgggatgcggacgtgctgatctgggcggcctcgcagatcgtggaggcgaaggatgcgggcctgcgcccctcgcggctgatgcgcgccactccctacgagatcctgcgcttcatcgggcgcggcaagtcactgcgcgactaccagcgcctcaaagcggccttggatcggctgcaatcgaccaccgtggccacgtccatccgcgagacgaccgggcgacgcttgcatcggttttcgtggatcaacgaatggaaggaactggccgatgccagtggcacgccgctgggcatcgaactgatcctgccggactggttctatgccggcgtgctcgacgccgccctggcgctgaccatcgacccggcgtacttccggctcacgggcggcatcgagcggtggctgtatcgactggtacgcaagcacggcggcaagcaggaatacggctggcaattcgacttccgctacctgcaccagaagtccggcagcaccgcgaagccctacgacttcgcctgcgatctgcgcgcgctggtcgcacggcagtcgctgcccggctacgtcctaggcatcgagcggatgccggacaacggcatggagctgctgaccttccggcccgtgccgcatacggcacggggataa

SEQ ID NO: 499803 - DNA, 639 bp, Stenotrophomonas maltophilia
atgatcgtcgcgctgctcaaccagaagggcggcgtgggcaagaccacgctcgccacgcacatcgccggcgagttggcgatgcgcgggcagcacgtcgtgctgctggacgccgacccgcagggttcatcgctggactggacgcagcgccgaagccagcaaggcttgccacggttgttcagtgccgtgggcctcgcccgcgaaacgctgcatcaggaagcgccggaactcgccagacgggccgatcacgtcgtcatcgacggcccgccgcgcattgccgccttggcgcgctccgcgctgctggcggccgagcgcgtgctgatcccggtgcagcccagtccctatgacctgtgggccagcgccgagatggtcgcgctgattcgcgaggcgcaggtgtttcggcctgcgctacgcgcggccttcgtcatcaatcggcgcgtcagtaccaccgtgatcgggcgcgaagcgcgccaggcgctcgcagaccagccgcttcccgcgctgcgctcggaagtgcatcaacgcatcgtcttcgccgacagcgtggctgctggccggcttgcacgcgagacggcgccggacagcgccgccgcccgcgaaatcacagccctggtggacgaactgctgtggtggacgccatga

SEQ ID NO: 499804 - DNA, 285 bp, Stenotrophomonas maltophilia
atgacagcaaagccgccaccgaacagcaaacgcccggccaagcgcgtcggcatcggcgcgcgcccgccggcgaatccgcacgccgaggcgtggattcgccagggcgacgcggatgcgctgggcaaggtagacctctacacggctcgcctgacgctcgacatcacgcccgcgatgcgctcgcgcatcaaggtatcggccttcacgcaaggcgtgaccgtggccgacctgctgcgcagcctgctggagcgggagtttccagagcaccgcaaggagcacacaccatga

SEQ ID NO: 499805 - DNA, 537 bp, Stenotrophomonas maltophilia
atgactgcatccgctttgcctgccgctggcacggccacggctgcgctcgcagcacctaccaccgtccagcctgccagcgcgccgctgacgcgcgtggcgctggcctacatcgaagcccgtttcaagctctatctgcgcttcggtgaacccgcgcgcacttaccaacttgaccgctggcgccgctgcgccgtgttcctgccgaacgcggttctgtgccgtgttcgctggcaagccaacgattacggcacgatccgctggcagctcatggtcatgcagacttgcatgccgctcgatgcggcacagcgcatccccggcgtacagccgggcgcgcgcctgctgctgcacgccgagggcgagaacgcagtgcgcgccgtgctggaacgcatcgacgccatcgaggcgatgggcatcgcgcccgtcgccgtttcgcccgcgtactggcgcacgctcgccaaccggctcgctgcgcgcctgccgctgcccgaatacaccgccgagcggcacgccgcttggctcatcgggagggggttgccatga

SEQ ID NO: 499806 - DNA, 597 bp, Stenotrophomonas maltophilia
atgaccgccgtttcgactgccggcaccgcgccgcgtcctcgctcgccccgcgcacgtttgcgcgctcgcctcgtgctggcgggcctgtccgcctgcggcctcgctgcgctggcctgggcgtccttcgtgcaaccgatgccgcgcctgatctacaacccatccgacagcgtggcggtcggctggtatcacgtggagccgctccaccagcacaccggctcgctgctccggcctttgtccgttggcagcatcgtcctgaccacgttgccggcggacaccgccgcgctggctgcgcagcgccgctacctgcctgcgcgcgtgccgttgctcaagcgcgtgggcgcggtcgcgccgcaatcggtgtgcgtgttcgatgcgctggtctggatcgacggcgtgccggtggccgccgtcctacccaccgaccggctgggccgtccgctgccctcatggaggcagtgccgccagcttcggcctggcgaactgttcctcttgagcgtgaccaacccggcgtcgttcgatagccggtatttcgggccggtcagcgcgtccaccgtgatcggtgtcgcgcatccggtctggctggagtcccgcccatga

SEQ ID NO: 499807 - DNA, 1995 bp, Stenotrophomonas maltophilia
atgagcaaccgccgcgatgaagatttccgcatccgccccagcgccccgaagaaccgaggcaagggccaaggtcagagcttcgtttccaaggtactcaagcaggcaggcaaggccagcagcggcaagtcctcagtgcgccgtccaggcggaaccggcaagggcgcggacaccggccagcggcccggttcgcgcctggggcgcggccacacggcggcgcgcttcgcgggggcgaagctcacgcccatgtcgcggcgcgtgaccatcaagacgctgctggtcaaccagcgccaggccagcccgcagtcgctcgccaagcacctgcgctacatcgagcgcgatggcgtgggccgcgatggcgagccgggccaagcctacgggccgcagaccgatgccgccgacctcgacgccttcaaggaacgctgcgccgacgaccgacaccatttccgcttcatcctctcgcccgaggatggcgccgagctggaagacctgcgcacctacacgcggcacctcatgggccgcatggaagccgacctgggcacgggcctcgattgggtggccgtcaaccactggaacaccgacaacccgcacacgcacatagtcgtgcgcgggcgcgacgacaccggcaaagacctcatcattgcgggcgactacatcgccgatggcttccgccatcgcgccgccgagctggcgaccgaatggctggggccgcgcaccgagctggagatccagcagaccttgcagcgcgaggtgaagcaggagcggtggacgagcctggatcgcaccctgcaacgcgaggccggcgacgacggccgagtgcagatcgaacgcttcaacgaaccgagactgcaacgccagcgcctgttgctggttggccggctgcaacgcttgcagcgcctgggcctggccgacgaaatgcagcccggcacctgggccgtccacgccgacgcgggaaagaccctgcgcaccctgggcgagcgtggcgacatcatccgcaccatgcagcgggccatgcgcggcgagccgcgcgagctggcagtgttcgagccgggcgacgatggccgaaccattctcgggcgcgtagccgcgaaggggctggctgacgagctgcgcgaccggggctatctggtcatcgacggcgtggacggcaaggcccactacgtcgcgctcaatgcccgcgacgagctggcgaactatccgaccggcgccgtggtggcggtgaagggatcggccgacgtgcgtgcggccgacaagaacatcaccgcactggcgagcggtggcctgtaccgcaccgaccatcatctggccgtcgcgcaggggcagacagtgccgggccgtgatccgcaggaagtcgtcgcggtccacgtccgccggctggaagccctgcgccgcgccggcatcgtggagcgcgtggccgagggactttggaaggtgccggacgacctggccgaacagggccgccgctacgacgcgcagcgtctgggcggcgtggcggtggaactgaaatcgcacctgcccatcgagcggcaggcccgcgtgattggggccacttggctcgaccagcaattgatcggcggcggctcgggcctgggcgacctcggctttggcagcgaggccaaacaggcgatgcagcagcgcgccgacttcctggccgaacagggattggccgtgcggcgcggccagtgcgtgatcctggcgcgcaacctgctgggcacactgcgcaaccgggaactggcgcaggtcgccaaagacattgcggccgaaactggcttggagcatcgacccgtgtccgatgggcagcgcgtggccggcatctaccggcgctccgtcatgcttgccagcgggcgctacgcgatgctcgatgacggcatggggttcagcctggtgccgtggaaaccggtgatcgagcagcgaatggggcagcagcttgccgggacggtgcgcggcggcgcggtgtcatgggagattgggcggcatcgggggccaaccatttcttga

SEQ ID NO: 499808 - DNA, 1344 bp, Stenotrophomonas maltophilia
atgaagagaataatttggacgttctggttttttgcgctggcattgagcgctctatggctttttaccgatacgctctggcctgcacagtccaactacttcgccctgcgaacggtatggattcaatacagcggcgtactggccatcggcacgatgtccgtggcgatggtgctggccacgcgccctgcgtggctggagcccagcttgaacggactggacaagatgtaccgcctgcacaagtggctccgcatcgccgctctggccgctgcaacaatacactggctgtgggcgcagggtactaagtgggccgtaggctggggctggctgacgcgcccggcgcgcaagccccgcgcagcggctgattcaatgggctccattgaatcggcgctgcgtggctggcgcggactggccgaggacttgggcgaatgggccttctacgccgtcgcggtgctactggtactggctttggtcaagcgctttccataccggctgttcgccaagacgcaccactggatggcagcgatctacttggtgctggccttccacaccttggtgctggttcagttctcctactgggcgcagcccgtgggctgggctttggctatgctgctggcgagcggcacggtatcggcggtgtgggtgctgctgggccgggtcggtgcgcagcgcaccacgcacggtgtcatcgaatcgctgcagacctactctgcgctgaacgtgctggaaaccaccctgcgaatggacccggcctggcccggccaccggcccggacagtttgccttcgccatgtccaacccgaaagaaggcccgcacccctacacgctagcctcagcctgggtgccggaagaccggcgcattaccttcatcaccaaggcgctgggcgaccacacccgccggctgcctgagcgcctacgggtaggcgaccaggtaacggtcgaggggccttacggctgcttcactttcgacgacgagaaggcccgccagatctggatcggcgccggcatcggtatcacgccattcattgcgcgcatgaagtatttggcgcagcataaaggccaagacgcacgcccggtcgatttgtttcatcctacgagcgacgttgatccgcaggccatcgagaaactgcgcgccgacagccaggcggccggcgttgtgctgcacctgctcatcgacaagcagaacggtcgcctgacgggtgaacgcctgcgtgccatggtgccgggttggaaagacgccagcgtctggttctgcggccccacggccttcggccgcgcgttgcgcgccgacctgctggcccaggggttggagccagaagccttccaccaagagcttttcgagatgcgctga

SEQ ID NO: 499809 - DNA, 666 bp, Stenotrophomonas maltophilia
atgcgcgtattgatcgtggaagactcgcaaacgctggccgaagccctgagccagagccttcagtcggaaggctatgcctgcgatacagcagccgatggcgtgtccgcgctgaagtttcttgccagctaccggtacgacgccatcattctggacttgatgctgccccggctggacggctttggcgtgttgcgcgcattgagccgggaggcccatgccgcaccggtattggtgctctccgcgcgcgaactgcttgacgaccgggtgcgggccttggatgcgggtgccgatgactacctgacaaaacccttcgagctggccgaactgctggctcgcctgcgggcgctggtgcggcgtccgccgcaacgggacgttccagttctgcgccacggcgatctggaggtcgatccgcgctcgcgcaccgcgaggttcaagggcattgatcttgggctcacgccgaaggaatatggactgctcgacttgctgctgcgtcggcgcggcgccacgctgtcgcgcccgcagatttttgaacatttgtacgacagccgcagcgatgcatcggacaaggtggtggaggtgatcgtcagcaccttgcgaaccaagctcgcccagtgcggcctggatgaactgatcgtgacacgacgtggcttcggctacatactgccctga

SEQ ID NO: 499810 - DNA, 1413 bp, Stenotrophomonas maltophilia
atggtacgtcccgattccgaagccctctctgatgcgagtcaaggcagatcctggtccttgcagcggcggctggctgccagcctggtgatctgcattggaggaaccttcgccatcctgtttcccgtcctcgactactggatcgaccacgaaatctaccgacggatggataccaccctgatgcaacgatcagcggcggtggggcgcgtgctgcaggagttggatgcgagaaagctcgaaagcctcatgccggaatacgagcctggcgggcataccgagttcttcacggtcttcgattcgcagacccaccggaccttgctgcgttcgcccagcagtgctggggccgagctggcgcttggaccggtggagcaaggcaccccacgctactacgacgtgatactcccggacggccacgcgggccgcgcgctggcgacgcgcgtgccggtaagaggtgaggaatctcgattgctggttgtggcaacagaacgtcgggattgggatcaaaccgaacggcgcatccacttcacgctcctgggcggtatcgtgctggcgacgctcctggccacaggcctggcgctgctcatggttcggcgcatcgtggtcatgctggagcgcgtcggcgtgcaactggccgacctgcgttcggatcggccgattgcgcggatcggagcggactttccacgcgaactgcggccgtttgccgaagccttcaatcagggcttgcatcacctgtatgcggccattgcccgcgagcgccgcttctcccgcgacgtggcccacgagttgcgcacgcccttggcagaaatccgcatcagcgcagaaagcgctttgatcgatgccgacccgacccaaatccagcgcgccctgaatgcaacgatccaggccagttcacgcatgcagcgcagtgtggacactctgctgttgttggcgcggcttgaatccggccaacacacacttgcgcttgatcctctggatctaacagctttgctgcaagagttgctggcgggattcaacgtccagcaaatggcacccaagtcacctatccgtgtgactttgcctgaatcggcatgggtgcaaagcgatcagggcgtgatcgaacgcatcgtctccaacctcttgcgcaatgccatcgaatacgcgcccgaaggcgacgacattcaatgtaggctggagcgcgcggcttccggctggatgttgaccatcgtcaacacagctcccaatttgcaggcatccgatctggatcaattcggacttcgcttctggcgcaaggattccgaaggtggcacggcgcaccacgccgggctgggacttgcactggccctggcgctcgcgcatgccatagacctgccgctggcgttctcactggacaacggtcggctgtccgcgcggcttggcccttggccaccgctgctctga

SEQ ID NO: 499811 - DNA, 708 bp, Stenotrophomonas maltophilia
atgaccaaatttcaccaccgcgcccaccctgaaagtcaccgcactgaacatatcggatggctgcgcgccgctgttctgggtgccaatgacggcatcatttccacggccagcctggttgcaggcgtggctgctgcccatgcaagccatgccagcatcatgaccacggccatcgcggggttggtagccggtgccatgtccatggctgcaggcgagttcgtgtcggtctattcacaagctgatacggagaaggcggatttggcgcgggaacgtgatgaactggaaaacagtccggaagcagagcatcgggaactaacggccatctatgtccggcgtggcctggatcatcgactcgcggatcaggtcgccacgcaattgatggcgcatgatgcgctgggcgcgcacgcgcgcgatgaattgggcatttctgaaaccttgagcgctcgcccgctgcaagccgccatggcgtccgctgggagcttcgcggtgggtgcggccatgccgctggccgtggttctgttggcgccggagcagagcctgctctattggatcgtcgcgacggcgattgtcttcctggcccttctcggcgctgcggccgctgccgtgggtggtacgccgctcttcaaaagtgcgctgcgcgtcgcgttctggggcacatttgccatggcggtgacagcgggcgtgggagccatgttcggcactgcggtgtag

SEQ ID NO: 499812 - DNA, 552 bp, Stenotrophomonas maltophilia
atgaatgtcaggaattccgaataccgtttcagtcctttggtcataggactgcattggctgactgtgcttctcatcatcgcggtctatgcgagcatggagctgcgcggactggcacccaagggcgccttgagagacgccatgaagtccttgcactacctgctgggcctcagcgttctggtgatcgtcgtgatccgtatcggggtgcgcatccaggcgggcgtgaagcccgcgatccaaccacccatgccacgctggcaggccacgctcgccgatgtcatgcactatgcgctctacagcttcatgctcgccatgccgctgctcggatggctcaccttgagtgcggcgggcaagccgattgttctgtttggcttgcccattccctctctgatcggcaccgacgttgctttgtcgcgccaactcaaggatgtccatgaggcgctggcgacattgggctatgtcttgatcggatcgcatgcgatggcggcgctgttgcaccactacgtcatgcgtgacaacacactggttcgcatgcttcccggtcgtcgcccctga

SEQ ID NO: 499813 - DNA, 1224 bp, Stenotrophomonas maltophilia
atgagcttcccgaccttgaaagcggcgggcaccgccagccgaaccaagaccttggccctgtccgccgtcagtgtggcagttctagctgccgtagggtacggctggtgggcttggacaacgcagcagacaaccgtggccgatagagacgcgagcgaggctgtcgcccaaccgaacgctggcggcgttcacctcaacgccgctcagcttcacgcgcagggtgtggaaaccgcactcgtcaaggatgccgcagtgataccgctggatggcttacccgcgcagacggtggcaccactctcggccagcgcgcaggtcgtggcgccctatggcggtgtggtgacgcgcgttctggtcgatgaaggcaccgcagtgcgccaaggacaggcgctggcgcgcatccagagcaaggacgttctggcttcgcaggctgatctggcgcgtgcccgcaccgaagcggcggtggccgcggcgcaggcccggcgcgatgccacgctattggccgagggcatcatcccagccacgcgcaacgagcaaacccaggcgcgcgcggcggctgcgcaaagtacgttgcaagaggccaatggcgccctcgcacggcttcgacccgttagcggcgggcaggccggcgagtatgaattgctggcgcctttgtccgggcgagtgatgcgtcgtcacctgagcctcgggcaggcggttgcgccgctcgacatcgcctttatagtggctcagcctggtccgctggatgtcagcgtcgcggttccgctgcgctggcgctcggatctccacccaggcttggaagtgcgtcttcccgatggcacgatcgctcgcgtgacggctgttggtggcgacactgacctcagtagtcagagcctgcgggtacgtgcccgcgtcgatgcagatcaggcaggggcagaccgctatgcggccgggcagcagatcagtgtcgcgctgttgctgccagcaccgcagggcaccttgagcgtgccatcgtccgcactgctgccagcgggcagcgcccacgtgctctacgttgctgagccgtcatcgcaagacaagcaaggcgacctacacgtccgcgctgttccggtgcaactgctggggcaagacgaatcagaggcgtcaagcgccgtgcgtgccgtctcgccagacactgcgccgcttgcggcaggcatgcaggtcgtcgtgcgcggtacggcactgctcaaatccatcattccattgcaatga

SEQ ID NO: 499814 - DNA, 3096 bp, Stenotrophomonas maltophilia
atgttgtcccgtctgattgaattttccctgcgccaacgtgcgctggtactgcttggcgtgctggctttggcgggtgcgggcctggcggccttcctgcaactgccgatcgacgcctatccggacatttccccaacgcaggtcaagctgattatcaaggcccctggcatgacgcccgaggaggtggagtcgcgcgtgatcacgccgctggagatggagttgctcggcgtgccgcggggcgtgacgctgcgctccacggccaagtacgccatcgccgacatcacgctggacttcgccgaaggcagcgacatctactgggcgcgtcagcaggtggctgaacgctatgccggtgtttcgggcagtctgcccgacggcgtcagcggcgggctggcaccgatttcgacgccgctgtcagacgtgttcatgttcaccatcgaaggcggtagcctcacgctgagcgagcggcgcgccctgctggactggacgctgcgcccggccctgcgcacgctgcccggcgttgccgatgtcaacgtgctgggcggcgaagccaagagctttgccgtggtgcctgatcgcgcgcggctttccgctgcgggcctcggcttctcggacgtcatcactgcgatcggccgcaacaaccgcaacgacggcgcgggccgcctggatgcgggcgaggacacgctgatcgtgcgcgccgaaggcgcgatccacactttggacgatttatcccgtctgatcctgcgcgcgggggccaatggcacggccccagttcgcctgggcgacgtggcccaggtgcgcatcgaaggcgtgactcgctatggcgcagtcacccgggacggcgcgggcgaagcggtggaaggcatcgtggtggcgctgcgcggggccgatgcttcggcgctcgtgaaggccattcgcgcccggctggacgaggtggctcccagcctgccgcccggcgtcaaggtggtgccgttctatgaccgcagcacgctgatcgagcgcgccgtgggcacggtggaaagcgccttgctggaagcgacggtactggtcgtcatcctgctgcttctgttcctcggcgagcttcgcgccgcgctggtggtggcggtgatggtgcctttggcggcgctgggtaccttcttgctgatgcgccttgtcggcatgagcgccaacctgatgagcctgggtgggctcgcaatcgccatcggcatgctggtggatgctgccgtggtggtggtggaaaacgccgtcagtcggctcgacccgcacgcgcccagtgcgcaccagccgcgcctgcaccgcatattcgccgcggcgcgcgaggtcgccatgcctgtggcctcgggcatcctcatcatctgtctgaccttcatgcccctgctcacgctgcaagggttggaaggcaaactgtttgtgccggtggcgctgaccatcgtgttcgccctgggcgtctcgctgctgctgtcgctcacgctggtgccggtgctggcctcgctgctcctcaaggaacacgcgcacaccgagccgtgggtgatgcgctgggccacgcgcctgtaccaaccgctgctggaggctgcgcttcaccacccgctacgcgcatcggcggtcgctatcgcggccctggcattgggtgtggtggcctacctcggcacgggcaaggcgttcatgccgacgatggatgagggcgatatcctgctgcaactgcaaaagccgccgtccattgggttgcagcgctcgctggagattgacctggcggtgcagaaggccatcggtgcggcggtgcccgaggtgcggcacagcatcgggcgggtgggctcggacgagctggggctcgacccgatgggcctgaacgaaaccgacctgttcatgcagctcgcaccgcgcaaggattggcatgcagccgacaaggacgcgttgagtgccgagatacgcaaggtgatggatgccttccccggcctggaattcggctttacccagcccatcgagatgcgcatctcggaaatgctcaccggcagccggggcgacgtggccgtcaagctgttcggccctgatctgcaaacgctgggcgatctggcgcagcgcatggccgctcgcatcgagaaagtgcccggtgcgcgcgacgtgctcacccaggccagcgacagcgtggaatacctgcaggtgaaggtggatgcgcaggcggccggtcgcgccggactggccgtgacgcaggttcaggacgagctgcgtgcgcagctcgaaggcgtgccggccgggctggtgatcgagccggacaggcgcacgcccatcgtggtgcgcggggatgcccggctgcgcggatcggccgagcggttcaaggacttgcagctcgcccgtggcgatcagggcgagatccccctagcctcgctggcgcgcatcgccaccaccgatggccccgtgctggtgcggcgcgagaacggttcgcgcttcgcgctgatccagtccagcgtgagcgggcgcgatctggtcggcttcgtagatgaagcgcgcgaagccgtggcgcgcgacgtgccgctgccgcccggctaccgcgtcgaatggggcgggcagtttgagaaccagcaacgtgcagcggcccgcctaggcatggtggtgccggtggccctggggctgattttcttcgtgctgttcatgaccttcggctcggtgcggcaggccgcgctcatcctcggcaacgtgccgtttgccatggtcggcggcgtggcagcgctgtggctgtcggggcagtacctgtcggtgcctgcttcggtcggcttcatcgcgctgctgggcatcgccgtgctcaacggattggtgctggtgacgcacttcaaccacctgcacgcgctaggcctgcccatggaacaggtggtgcgcgaaggttcgctgcgacggctgcgccccgtgctgatgacggcttccatcaccgcctttggcctggtgcccctgctgctggccagtggccctggctctgagatccagcgcccactcgccatcgtggtgattggcggactggtcagttccacggcgctgaccctggtcctgctgccggtgctgtaccggcgattcggccaggccatctcctcacaacaaggagtccacgcatga

SEQ ID NO: 499815 - DNA, 321 bp, Stenotrophomonas maltophilia
atgaacggattgaaagaagcgcaactggtgcgcctgaatctggtgtttccacccacgctcgaagacgccgtcaccgatgccctgatggccgacccggtgctgccagggttcaccctgttgcacgccgaagggcataccggcgacttcgcgcgcgcgtccattcgcgagaaggttcgcggccgtgtggatcggcgcgtcatctgggtgttgatcgaatacgaacaactggaacaggtcctggcgcatctgcgccagcgcatcgcgtctagcgatgtccgctggtgggtggagtcggtgttggcaagtggaagactggtatga

SEQ ID NO: 499816 - DNA, 1155 bp, Stenotrophomonas maltophilia
atgaaaacccagccggtcgtgaatgccgcagccgctcgcttggacgcggctgctgccacgcaaagcgcccttgaagccggtagccacgagtttgaactcagtagcggcctacaacgtcgcaacgtgaccaacgaagcgcatcgctacaacgaatgggaaatccagctcagccgtgctgttcgcttgccaaacaaggcgcgtctggatcgggagatcggcagccgcacccgcggcgtggccggtatgcgccttgaagatgccgagcaccagatggcaaggcgactgctggaagtctgggccggatggctgcgcagtttcatcgtggctgacgagatgcaagcgcaggaaaagttgcttattcgtgagcaggaagcaatggcccggcgcgtggccctgggcgatgccgcgcggcgggacagcgacgttttgcaagccgaacgcgcactgcttgcggcccaggttagcgccgcgcgcgatgcagaacgggaagcacgacagacgttggtgattgagttccccggcattgagattcccgcacggccatccaccctgccagatcccgatcccttgccgggcggggtacaggagtggctggcgcgaattgtgcgacaaagcgtcgaaatcggcattgccgatggagaggcggctcgccttgccaaggtggccgagcgcgctcgcgccaaccgcacgcccgaccccaccgtcggggtacgcatgatgtctgaacgcggcggggcggaacgtgtcattggcgttgtcttgacggtgccatttggcacggactatcgcagtgcaatggccgccacggaaagcgccaacgcggcggccgcagaggccgaggcgctcggcgtgcggcgcgcggtggagcaaggtgcgtgggtcgccgtgcaagcagcggatagtaagcgcacgcagtggcaatcattcacgcaggcgctggccgcgcagaccacggccagcaaccgcacgcggcgggcttgggaattgggagaggcccccttggccgaataccttttgacgctgcgcaacctgcgccagacacgactagccgaggcacaggttcgcgtcgatgcgctgcaagcatcggcactggtgcgtatcgatgcgcatgcgctgtggcattcgaaggaggcacatgccgatgccccccaatga

SEQ ID NO: 499817 - DNA, 783 bp, Stenotrophomonas maltophilia
atgccccccaatgaattccgactactgggcaacgccccactatccaacgcactattcgcacctcgattcttaatcactcatttagcgctaccagcgggtgcggcgctgatcatcagcagtctattgatggatggcggtggggacttctgggtcgccgatcatctctatcgcttgcagggcagccgatgggctttgcgggatgcctggctaaccaacaacctgctgcatcggggtgggaagaatctttccaccttgctggcaattgtggttgcagcaacgtgcatctgggcttggagaaaaaaacgtagcaacaattgcacagcacacctacgctggccgctactgtatcttttttgtgcgtacgtgatcgcggcactgacggtttcggcgctgaaatcgttcactaacatggattgcccctggaacttggtgcgctatggcggagcgcgagtgtttgtgggcctgtttgaaacacgcccgcccggtatgccgcgcggtgtgtgctttcccgcagggcatgcaagtgccggatatgcatgggtcagcctctatttctttaccttgatggttcgtcctgcctggcgttggatggccttggccgcaggtttgatgataggtgccatctttggatggacccagcaggtgcgcggagcccatttcctttctcatgacttgtggacactcctgatttgttgggtcgttgccttgggtcttttcatggtctggcaacgctggtttgttggtggctcaggcgatgtccattcatcggggttccaagcatga

SEQ ID NO: 499818 - DNA, 1674 bp, Stenotrophomonas maltophilia
atgagaactttcaaacaggctctcggtctggtgccgcgattcagaactgcaaacctcaagaacctaagccattggcgaccacaatgcagcgtcgagtggctgatcttgatgaccagtattttctttgcactggcctgcaatggtctattttggagtagcgccttaggcgtccagtccagtctacgcatgggcacatccgtactgctgtttctggtgggaattcacagtctgctgttgagtttggttgtatggcgctggaatgccagggttttacttgcggtgctgtttgttgcctctgccctcgcaacacactacatgcgcagctttcatatctacctcgattcgagcatgttgcgcaatgttctagccacagacttcaaggaaagtcgcgagctactgacgcctgcattgattgctccactaagccaactggcagtagtgccgattattttgctttggcgaatccgattggtcgggcgtacttggctgaaagcaaccgtgtggcgtatgggattaatgctgttttcggcactgatgatttcggtcggtgtcatgctgtcatttcaggacatgtccgcactgatgagaaatcatcgcgaagttcgatacttgattacaccgggaaactatctggtgggcttaccgaaggcactaaaaggttcctctatcacgcagtccgccgaaaagaaaaccattggagctgatgccgttgcaacagtcaggcccgaaggcagtcggccacgtttattagtctttgtcgtaggcgagacggctcgcgcccaaaactggggattgaacggctatgcacgcgaaacaacgcctcaattggctcagataggtgtgatcaatttctccgacatgcactcctgtggaactaacaccgaggtttctgtgccttgcatgttctcgtcctttggtcgccgaaactacgatgaggacaagattcgttcacaccaatccttactgcatgttctggagcgtgctggtattaccaccttatggagggataaccagtcaggttgcaaaggggtgtgcgatggtctcgaaaatcaacgtctagggaacgcacaaagtccctctttatgcgttgatggtcggtgtttcgatgagattttgcttgaagacttaccagctcaggctcgcaaaattcccggtgatcgtgtgatttttttgcaccagattggaaatcatggccccagctactttcaacgatacccagcagcgtatcgcaaattcatcccaacatgcgacacaccggaaatggggaaatgcacccgcgaacagatcgtgaatagctacgacaacgctattctctacacagatcatttcctaagccgagccatcaaacaattgcaggggctttccgactacgacacagctatgatattcgtctcggatcacggcgaatccctgggcgagaagggtctttttctgcacggcatgccttatgcgattgctccacaagagcagactcgtgttcctttggttatgtggttctcttcaacgtttacgcaaagtcgcgggctgaatattggctgtttgagtgagcgagcccgctcttatgcggatcacgacgcattgttttcgtctgtcttggggctaatgcaggttaaaacaagtgagtacgataggaatttcgattttttctttggctgtgatgataagaatatataa

SEQ ID NO: 499819 - DNA, 552 bp, Stenotrophomonas maltophilia
atgcgtctgtttgaggtgccgctcgggctgcagatcaagggtttgcatgaagatctgtatgacgtaggtttttcgatggcagaggatggaggcgatggtatcttggtcacacctgcttgggaagatgaactgatggtagcggtgccagcccgccatcccgtgctcgccttcaaacaggttccgctgaaagaagtgctgcgctatccgttggcactgggcgacccggcggtctgcgaaggccacgcgcggcagatcgatcgttttctgcgcaagctcgatcaggagccgctgattgcgcagcgcgtggcaaccttcgacgtgatgatgacgctggtttccgctggcctggctttgggcctagcgggcgaggcgcatatcgcctccagccgcgagccgggtgtcgtggcccgccgcttggcaggcaagccatacatgcttacgacctatctgctacgccgcgatgcggagccgtccgagatgctggctcggttcatcgagcgtgtggccttcattgattcggcagacggtatcgacgctgccgacgatgcctga

SEQ ID NO: 499820 - DNA, 228 bp, Stenotrophomonas maltophilia
atgaacagagtgatgctactgatgctgaccgtcgcactgaccgcatgtggctcgtctcaaccttcggaaaccgtggatttcctcgcggcgcatcccgagcgcatcaaggagattcaacggcaatgcaaggaggatcgtgcgaaggtcggcgatgaactttgccgccgtgcggccgaagccgccaatcgccgcttcttcggtgatcgacctgagcagaaatccaaataa

SEQ ID NO: 499821 - DNA, 2001 bp, Stenotrophomonas maltophilia
atgcaagggacgaacgtgctgttcggtcagatcgccgtggtattcggcatcgtgatcgccggtgtgtggagcgccacacaatggacggcagcggccctgggctatcaactacgccttggctcgccgtggttcgattttctaggcacgccggtctatcacccgtggcgactgttcgagtggtggttcttcttcgatgcctacgcgccccgcgtgttcgacatcggcggcgctattgcgggcggcagtggtctcgtcgccgtgctggtggcgattggcatgtcgatctggcgctcgcggcaatcgcgcctggtcacgacttacggctcggcccgctgggcgaacgcggatgacattcgcaaggcgggactcacgcagccggccggcgtgttcctcggccagcacgaccgtcagtacctgcggcatgaagggccggaacacgtcctgaccttcgcacccacgcgcagcggtaaaggcgttggcctggtggtgccgacgctgctgtcctggccggcctcggccgtcatccacgacatcaagggcgagaactggcagatcaccgcaggctggcgcagtcggttcagccactgcctgctgttcaacccgaccgatgcgaagtcggcggcctacaacccgctgctggaggtgcggcgcggcgcgcatgaagtgcgcgacgtgcagaacatcgcggacattctggtcgatcccgaaggcgcgctggagcggcgcaaccattgggaaaagacctcgcacgcgctgctggtcggcgccatcctgcatgtgctctacgcgggcgaagacaagacgctgcgcggcgtcgccaacttcctctccgacccggcttgcccgttcgagctgaccttgcaccggatgatgaccacgccgcatctcggcgatggcccgcattcggtcgtggcctcggcggcgcgcgaagtgctcaacaagtcggacaacgaacgctccggcgtgttgagcaccgccatgtcgttcctcggcctgtaccgtgatcccacggtggccgaagtcacgtcgcgttgcgattggcgcatcgccgacctgatcgcggccgagcatccggtgtcgctgtacctcgtggtgccgccttcggatatttcgcggacgaagccgctgatccgcctgatcctcaatcagatcgggcggcggctgacggaatcgctcgatggctccgacggcatcgcgcgccgccacaagctgctgctgatgctcgacgagttcccggcgcttgggcgcctggacttcttcgagacggcattggccttcatggcgggctatggcatccgcagcttcctcatcgcccaaagcctgaaccagatcgacaaggcgtatgggcagaaccattcgatcctcgacaactgccatgtgcgcgtgacgttcgccacgaacgacgagcgcaccgccaaacggatttccgagacgctgggtacggccaccgagctgcgcgcccagcgcaactacgcgggccaccggctcgcgccgtggctcggccacctgatggtgtcgcgccaggaaaccgcacgtccgctgctgacgccgggcgaagtgatgcagcttccgcccggtgacgctgtggtgatggtgtccagcgtggcgccgatccgtgcgaagaagctgcgctactacgcggacgccaatttcaagccccgcgtgctgccgccacccgtgctggtggacgggcagtacgccgacgcgccgccctcgcggcccgacgactggagcgggctggcgattcccgccatgcccgccgcaccggctcccgctcctgctgatgagctgggcagtaccgacgacggcggcccgcgccgtcagcccgaactctccgaagccgtcgcctatgaccccgatctggccgcgtccgcagccgacctcgcgctgttcgatgacgacgacgacctgccgcttccccttccacgccagcttgatccggccatgcagcgcacggcccggctggcttccctcgaccccaacgacggaatcgagctatga

SEQ ID NO: 499822 - DNA, 465 bp, Stenotrophomonas maltophilia
atgagccactaccgccttaacctgttcatccagccggagcacgccaagcgcctggacgaactggccgccaagaaaggcgtgtccaagtcgtccatcgtcgccgctgccttggcgtcctggctgtcgccggacgcggcagaccagcgcgaggccgccatcgccaagcggctggatcgcctgtcgcgccaggccgagcggctggagcgcgaccagaacatccaaatcgaaacgctggcgctgttcatccgctacttcctcacggtcagcacgccagttctcgaggcgcaccaagacgcggcacgtgcccagggcaaggcgcggttcgagcagttcgtggagcagttgggccgtcacctgctgcgcgggcgcagcctggtgcgcgacgtggtagaggaactgcaccccgacccgatgcggatggatgacgcggcggcagttgccgaagcgcaggagcgtgcctcatga

SEQ ID NO: 499823 - DNA, 1035 bp, Stenotrophomonas maltophilia
atgagcgccgcgccttcgtccttcgccacctcgctcgaccgccgcattcagatgctgcgcacggcgatggggccgctgatcgccgccgcgctcgaagacccggacgtggtggaagtgatgctcaacccggatcgaaccttgtgggtcgaccggctttcgtcaggccgcgcaccgatgggggtggagctgtccgaagccgatggcgagcggatcattcgcctcgtcgccgcccacgtcggcgcggaagtgcatcgcggccagccgctgctgtccgccgagctgcccgagacgggcgaacgcttcgaaggcatcctgccgcccgctgcgccggggccggccttcgcgctgcgcaagcgcgccatcggcgtgattccgctggagcggtacgtcatcgacggaatgatgaccagcgcgcaggcgggctttctcgttcgcgccgtgcgcgagcgacagaacgtgttgatcgccggggctaccagcagcggcaagaccacgctcgccaatgcgctgctggccgaaatcgccgcgacgggcgaccgcgtgctggtgcttgaagacacggtggagctgcaatgcgcggcccgcgaccacgtgccgctacgcacgcgcgcgggcgtggtgtccatgaccgagctggtgcgctcgtccatgcgcctgcgcccggatcgcgtggtcgtcggcgaggtgcgcggcgccgaggcgctggatctcgtcaaggtgtggggcaccggccatccgggcggcattgccacgatccatgccggctccgcgctgggcgcgctgctgcgcctggagcaactgattctcgaagtggcggtgaacccgccccgcgcgctgatcgcggaagcggtcaacgtggtcatccacatcgccgggcgcgggcgcaagcgccgcatcgagagcatcgcccgcgtcgtcggcttcgatggcgtgggctaccacctggcggatgcgctggaggctccattcccggagctgctgccgcagtccgacttttcctccctgtcccctgaccactctggagaactgccatga

SEQ ID NO: 499824 - DNA, 378 bp, Stenotrophomonas maltophilia
atgacgcacgttgatgctttccgtatttccgcaaatccgcttcctcggcccgcacggctggatggcctggctcgcccggccatgcaaggcttgatgctcgctgccttcatgctgctgcttgcgggcactgcgcaggccgccggctcctcgatgccctgggaaggcccgctgcaatccatcctcgaatccatccaggggccggtggcgcgcatcgtcgcggtcatcatcatcatcgccacgggcctcgcgctcgcgttcggtgacacgtcgggcggctttcgcaagctgatccagatcgtgtttggcctgtccatcgcgttcgcggcttcgagcttcttcctgtcgttcttcagcttctcgggcggggccgtcgtatga

SEQ ID NO: 499825 - DNA, 273 bp, Stenotrophomonas maltophilia
atgagtgccccggacaccttcgcggccgggttcgaggtgccgctgcatcgctcgctgaccgagccgattctgctgggcggcgcgccgcgcaccgtggcgattgccaacggcacgttggccgccgctgtcgggctgggcctgcaactgtggattcccggtgtcgtgctctggatcgtcggccattcgctggcgatgtggggcgcgcgcgtcgatccgcagttcatggccgtgttcgcccggcacatcaagcaccgcccgctgttggacgtgtag

SEQ ID NO: 499826 - DNA, 2460 bp, Stenotrophomonas maltophilia
atgctgaacctcgccgaataccgccagcgcccggccttgctcgccgactggctgccctgggccggactggtggcgccgggcgtcgtcttgaacaaggacggcagcttccagcgcacggcgcgctttcgtggccccgaccttgacagcgcgacgcaaggcgagctgatcgccacgtcggcgcgcttgaacaacgcgctgcgccgcctgggttcgggctgggcgctgttcatcgaagccgagcgccgcgccgccgcccactacccgcactctgatttccccgaaccgttgtcctggctggtcgatgaggaacgccgcgccacgtttgaggactcgggcaatcacttcgagagctgctaccacctgacgctggtgtacctgccgccagaggaatcgcgcgcccgcgcggcggggatgctgtacgagaaccggcccaccgaaggcgtggattggcgcgagcgtctgacggccttcgtcgcagagacggatcgcgtctttgacctgctcgacggcgtgatgccggagatcgcctggttggacgacagccagacgctaacctacctgcacgcgaccgtctcgacgcgacgctaccgcgtcggcgtgcccgaagtgccgttccatatcgacgcgctgctgacggactccgcgctggtcggcggcctgtcgcccatgctgggcgaccagcacctgcgcgtggtgtcggtgcgaggctttccgacttcgacctggccggggattctggacgacctcaaccgcctgggctttgcgtatcgctggagtacgcgctttctctgcctggacaaagctgaggcggaacgggagttggggcgcctgcgccgccagtggttcgccaagcgcaagaacatcatcgcgctgctgcgcgaaacgattttccagcaggaaagcccgctggtcgataccgacgccaacaacaaggccgccgatgcggatgctgcgttgcaggagctgggcagcgatcaagtcgccttcggctacctgacggcgaccgtcactgtcatggatgcagacgctactgtggccgacgagaagctgcggatggtggagcgtgtgattcagggccggggtttcgtgacgatccccgaaaccttgaacgccgtggatgcgtggctgtcctcgatccccggcaacgcctatgcgaatgtgcgccagcccatcgtctcgacgctgaacctggcgcacatgatgccggtgtcggcggtatgggccggccaggagcgcaatgcgcatctcgatggcccgccgctgatcgtcacgcgcacagacggcgcgacgccgttccggctggtgacgcacatcggcgacgtgggcaacacgctggtggttggccccatcggcatgggcaagtcggtgttgctggcgacgatggcgattcagttccgccgctatcgcggctcgcgcatcttcgccttcgacatggggcgttcgatccgtgcggccatcctgggcatgggcggcgagcactacgacctgggcgcggatgacgagatcgccttccagccgctcgcacgcatcgaccgcgagggctaccgcacctgggccagcgaatgggtggaaggccgcctgctgcacgaaggcgcggccgtcggcccggacgagaaggcggccatctggtctgcgctggggagcctggccagcgcgccggtggagcagcgcacgctcacgggcctgacggcgttgctgcaatcgaacacgttgcgccaggcactcgcgccctacgtcctgggcggcgcgcacggcaggctgctggatgccgaccatgaccgcctcggcacggccgatgtgcaggcgttcgagatggaggagctgatgcacagcaaggccgctgtgctcgcggtgctgcgctacctgttcgcgcgcttcgaggagcggctggatggtgcgcccacgctgctgatccttgatgaagcgtggctgttcctcgacgacccggtgtttgcggcgcgcatccgccagtggctcaagacgctgcgcaagaagaacgtcagcgtgatcttcgcaacgcagtcgctcgcggacgtgaaggactcggccatcgcgccggccatcatcgaaagctgcgcgagtcggattttcttgccgaacccgcaagcgaccgaaccgcagattcgcacgatctacgagggcttcggcctcaacagccggcagatcgagatcgtagccaccgcgcagcccaagcgcgactactactaccaatcccgcctcggcaaccgcgtgttcgacctcgacctggggccggcgacgctggccttcgcgggcgcttccacgccgcaagaccagcgagacatagaccgcgtgctggccgacgccggcgtgcccggcttcgcgggcgcctggctgcgccatcgcggcctcgattgggcggctgacctgctgccctcgttccccggcctcgcgccgggttccctccgtaccgctgaccacccccaggagaaccagccatga

SEQ ID NO: 499827 - DNA, 756 bp, Stenotrophomonas maltophilia
atgaaattgcatacccccaaactcgccgcgctgaccgctgtctgcgtgctcgccttcggcatcgcgcagcccgcgcatgccttgttcggcgtcggcgacatcgtgctcgacccgaccaatctgattcagaacacgatgacggctgcgcgcacgctggagcagatcaacaaccagatccgccagctccagaacgaagcgcagatgctcatcaaccaggcacgcaacctggccagcctgccgtccagcgtggtcggccagttgcgcgcgaacctggcgaccacccagcggttgatcgcgcaggccaagggcttggcctacgacgtgacgagcatcgaccgcgagttcgcgcgcctgtatcccgagaagtacgccgccacggtgagcggcaatcagatgtacctcgatgcgcaggagcgttggaagaacacgctcaacggcctgcaaaccaccatgcagatgcaggcccaggcatcgcagaacctgagcgacgacgaaagcgtgctggccgacctcgtgggcaagagccagtcggccgagggtgcgctgcaagcaatgcaggccatgaaccagttgctggccttgcaggccaagcagtcgatccagacgcagcggctccagatcacgcaagaccgcgcggccgcgctggaactggcgcggcaggcggcggccacggagcgcgggcgcgaggtgacgcgccgtttcctgggcgaaggcacgccgtacacgccgcagcccgtcaatttctacaaccgctga

SEQ ID NO: 499828 - DNA, 300 bp, Stenotrophomonas maltophilia
atgcaacacacgcccgtcgtgttcgccttcgccgttcatgcgcttgtgctggccggctgtggctggccgcagcagttgccggtgaatgcacttgccgccgatccggcccggctgcgcgcgcagggcggcacgttttgcgcgcaggtggcccaggccgacctggggcgctttctctccggccaggctgggccgggcgagtaccagacgctggccgacctgccgccgattccgcccggcttcgatgaacccgccgattgcagtgcggcaatcgctctgcctgggcaggaggactcgccatga

SEQ ID NO: 499829 - DNA, 1353 bp, Stenotrophomonas maltophilia
atgaacgacgtgacggtcatcgaccgcttcctcgacaccttctcgcgctacatcgactcgggctttggcctgttgcacggcgaagtggcgtttctgaccgccacgctgatcgtcatcgacataacgctcgccgggctgttctgggcgatgagccatgccaccggccagggcgaggacgtgatcgccaagctgatccgcaaggtgctgtacgtcggcgccttcgcctacatcatcggcaacttcaactggttggccggcatcgtgttccgctccttcgccgggctgggcctgacggccagcggctcggccctgagcatggaaaacttcctgcaaccgggccggctggcgaaggtcggcatcgacgccggggcgccgatcctcaagcagatcggcgacatggcgggctttcccgaagtgttcgtgaacatcacgcccatcgtcgtgatgttcctcgcgtggctgatcgtcctgctgtgcttcttcgtgctggcgatccagcttttcatcacgctgatcgagttcaagctgaccacgctcgcgggcttcgtgctggtgccgttcgcgctctggaacaagaccgcgttccttgcagagaaggtgctgggcaacgtggtgtcatcaggcatcaaggtgctggtgctcgcggtcatcgtgggcatcggctccgggttgttcgccgagtttcaggtgcagccgaccgagtcatccatcgaccactccgtggtcgtgatgctgacctcgctgacgctgctggccttgggcatcttcgggccgggcattgcgaccgggctggtgtccggcgggccgcagctcggggcaggtgcgatggcgggcgccgcgctgggtggggctggcgctgctgttgccgtgggcgctgcggccacaggcgttggcggtgcagtcgccgccggggcgcgcatggcgcccgcagccgccaagctggccggcagcggtgcgcgggctgctgctggagccgccagcagcgcgcggtcggcgttccaggccggttctgcttcggcaggcggtggcctcaagggcactgccgtcggcgtgggcaacgttgccaagactggcgcgcaggcgaccgggcagaaggtggccgaaggcgcacgctcaatgaaggagcgtgtcgccgctgccttccgacccgatgacgccggatcggcgtcgggtgccggtgccgcgcaggcggcaaccgagccgcccccatccactgcgcaacccgcctgggccaagcgcctgcatcgcaggcagcagctcacccatgccgcgaccaccgccgcccacacgctgcgcggcggcgatggcggtagctccagccagggcccaagccttcgcgattccgattcataa

SEQ ID NO: 499830 - DNA, 705 bp, Stenotrophomonas maltophilia
atgcgattcaaacgaccgcaggtgcgctacgccgacacaccgcaacctgccactccgtaccaagccgccgcccaggtctgggacgagcgcatcggctcggcccgcgtgcaggcgaagaactggcgcttcatggcctttggctgcctcaccttggccgtgctgatggccggcgggctggtgtggcgttcggcgcagtccatcgtcacgccctatgtcatcgaggtggacaacgcgggccaggtgcgcgccgtgggcgaggccgccgcgccgtaccggcccagcgatgcgcagatcgcctaccacctgggccgcttcatcggcctggtgcgctcgctgtccatcgaccccatcgtggtgcggcagaactggctcgacgcctacgactacaccacggacaagggcgccatcgcgctcaacgaatacgcccgcaccaatgacccgttcgcgcgcatcggcaaggagtcggtgacggtgcagatcaccagcgtgacccgcgccagcgacacgtctttcaacgtgcgctggacggagacgcgctttgtcaacggcgcgctggatcgcaccgaacgctggaacgcggtgatttccacggtgctgcaaaccccgcgcaccgagcagcgtctgcgcaagaaccccttgggcatctacgtcaacgggctgtcttggagccgcgaactggaagcgaacgaaggagcaaaaccatga

SEQ ID NO: 499831 - DNA, 1005 bp, Stenotrophomonas maltophilia
atgaatgatcttttccgtaaatccgccttgccggtgatgcttctggcttcgaccgtgctgttctctggctgcgccacgcaaggcaagccaccgccgtccatctcgctcgatgagccggtgcaggcccagccgctgccggagccgcctgcgcctgtggaagtggtggccgttccgcaagtgctgccgatgccggcgcagatgaaacctgtgccggatgccaagcccacgccggaacccgccgatgaaaccgtgcgcgtgtcccgcgccaacgccgaggcgcgcattgcgcctacgcgcgagggctacgtcaatgcgattcaagtctggcccttcacggacggcgcgctgtatcaggtctatgcggctgtgggtcgcgtgacggtgatcgcgctccagccgggcgaggagctggtgacggtggcggcgggcgatacggtgcgctggatcgtgggcgacacatcgagcagcagcggtgatgcgctgcgcgtgaatgtcatggtcaagcccatccgctcgggcctcaagaccaatctggtcatcaccaccagcaggcgtacctatctgctggaactgacctcgaccgagaagacgtggatggcgtcggtgtcctgggaatatcccaaggacaagatgctggccttgcagcgccaggcgcaggcggccagcgccgccgcgccggtcgatagcggcctgtcgttggagaagatccgattccgctacgcggtcagcgggagcaatccgccgtggaagccgctgcgcgccttcgatgacggcgagaaggtctatatccagttcccgccgggcattgcccaaggcgagttgccgccgctgttcgtgatcggcgcgcagggcgatgggcaactggtgaactaccgcttccgctccccgtactacatcgtggatcgcctgttcggcgccgccgagctgcgcctgggcggagacaagggtgatgtggtgcggatcgagcgcactgatggcgtttccggtggcacgcggaggaactga

SEQ ID NO: 499832 - DNA, 1269 bp, Stenotrophomonas maltophilia
atgagccaggacgattctcctgatcttgcaccgcaggcgggcaaggtcgcacccgaggcagtggcgctgcgcgcccaaccgcgcccggtcacgcgcctgaaccggcgcaccttggccatgctcacgggcggcctgtcggtcgccgtgctcggggccacgatctggtcattgcagccgcaccggcgcggcgcgggcgagcagaccgagctttacaacgtggatcgtgtctcgaagtccgaagggttggacggcctgccggccgactactcgaagctgccgccgaaggtgcccgagttggggccaccgctgccgggcgatctcggcccggccatcgtgaagtcgcagcagccggcgacgccgacgtatgcgccaccgggccacgacccggaggatgcgcggcgcaaggaggctgatgcggcggcgggttcgtcggtgttcttccgctcgggcaaccaaggcaaggccaccgcgccggtcacggcgcaagccgctgcggctgcgcccggcagtgccttggcgggcttcgacccgctggccgctgggccggcctcgacggcggcccagccatccgatcccatcgccatgcagaaccggcaagaccagaaagaggcgttcctgaaaggcggctctacggaaacccgcaattccggcaatctgcaaatgccgtcctcgccgtatcaggtcatggcgggaacggtgatcgccggggcgttggtgacgggcatcaagtcggacttaccgggcgacgtgatcgccacggtgacggagccggtctacgacacggccacgggcaagttcctgctgatcccccaagggtcgcgcatcctgggcaagtacaacagccaggtgagctatgggcagagccgcgtgcaggtggtgtggaaccgcgtcatcctgccggacacgtcttcgctgaagctcgacaacctcgcgggcaccgacccggccggctacgccggcctggaggatggcgtcgattggcattgggatcgcgtctttgccggcgcggcgctgacgacgctgctgggcgtgggcgccgagctggccgcaccggagaaccggcagaacggcaaccgcatcgtgatcgccgggcgcgatagcgcacaggacagcatcaatcaggtcggacaggagatgacccggcgcaacatgaacatccagccgacgctgaccgaacggccgggcctaccggttcgcatcatcgtcaaccgcgatctggtgttgcgtccgtaccagccgatgttcttccagcggggagcgatgcaatga

SEQ ID NO: 499833 - DNA, 246 bp, Stenotrophomonas maltophilia
atgagcacgaccaagaaactgcggctcggcccgctgcccaagaccgagaatgtgaagctgaccttcgcttgcccggccagcctgaaagccgacctcgaccgctacgccgcgttgcacgcgcaggcatacggcgaagcggtcgatgcgacgacgttgattccgcacatgctggaggcgttcatggcagcggatcggggattcaggaagggaggtaggggcaaggccgcaccgcctcaatcgggctga

SEQ ID NO: 499834 - DNA, 447 bp, Stenotrophomonas maltophilia
atgaatctgagggatttgttggtctctgctgcctatcgcgactacctatctgaattggaatcgcatctgatcgggcaccctttcaaccaagacgcacccatcagggctgtcattgtccgcttgcatgaagaatggatggggtacgccgaggtgacacctgaagcgctgctgggcctgattgaagcggaacgcgttcagaccttcagatacattgcgcggaagctcactgcatacatggaagcggaaggagggccagacaatattgtcaatgagcccgcaaacctgcacatgcccatcggtcatctgatcgagtactggttgcaccgtagcgagggcccagatctaagaaactatctgagaaaaatccgcatgcccggcgccactgcctatgccaaggagacggcagtaatgttccgggttgctcgaatgactgctatcagtcagtag

SEQ ID NO: 499835 - DNA, 207 bp, Stenotrophomonas maltophilia
atgagcttgcgcatcatcatcgcagacgatcacccggtggtccgcatcggtacccgcgccgtcatcgagtcgagcggcgtgggccgcgtggtcggcgaggccgacagcgcgcaggcgctgatgaccctgctcgccaaccagccctgtgacctgctgtcaccgactactccatgccgggcagcccgcaggccgatggcttcgccatga

SEQ ID NO: 499836 - DNA, 132 bp, Stenotrophomonas maltophilia
atgaataaaggcattccgcacccgtcgctgaacaaggaaaactattttttaacgtgcgtcggattcgattcatgttggggcgactacggtgtgctcgccccgcaaccgggggcccaaaacaagaaacattag

SEQ ID NO: 499837 - DNA, 819 bp, Stenotrophomonas maltophilia
atgcgccccgtacccaccctgctcgccctttccctgctcgctgccggcgcctcgttcgccaatgccgcccacgccgccgaaggcgacgaccgcttcgccatccgtctgggtgcgatgaacatcgattcggacaacacgctgcgtggcagcaccaccgtggccggccaggacatctccctgaaccaggacttcaagctgggtggcaaggaatgggaaccgcgcatcgacggcatgttccgcatcagcaaccgtcagcgcctgctgttcaactacttcaagtacgacaaggaccgtcgcgagacgcttgaccagggcatttccttcggcggtgagagcgtgccggccggcagcttcgtgaagggcgagctgaagtaccaggtggccagcctggtctatgactactcggtcgtcgataccgacaccttcgacctgggcctgcagatcggtggcgagtacgccaaggtcagcaccaagggctacgcggacctgggcacggtgtatgaaggccagttcctcaacgagaaggccgatggcgtggcaccggtggtgggggcgcgcatgaccttcactccgtccgagcgctggatgatcacgctgcagggccagtacctgaacacgcgctggggcagtttcgatgactacaagggcgacctgagccgcgccaatgcgatcgtcgattaccgcttcaccaagaacttcggtgtgttcgccggctacgactggttcaagctggacgtggacaagaagggcagcgacggcacggtcggcctgaagcaggaattcaagggcccggtggccggtatcagcttcgtgttctga

SEQ ID NO: 499838 - DNA, 477 bp, Stenotrophomonas maltophilia
atggcgtcggtgggattcgtgccgaccaaggtcggcacctaccagagcagtgtcatggcgtcggtgggattcgtgccgaccaaggtcggcacctaccagagcggcgtcatggcgccggtgggcttcgtgccgaccaaggtcggcacctgccagggcggcgtcatggcgtcggtgggattcgcgccgaccaaggtcggcacctacctgagcaacgtcatggcgccggtgggattcgtgccgaccaaggtcggcacctaccagagcggcgtcatggcgtcggtgggattcgcgccgaccaaggtcggcacctaccagagcagcgtcatggcgcgggtgcgattcgtgccgaccaaggtcggcacctgccagagcgggtcagccatctgcactaggcgctaccagtccgcacgcaggccgatgttgccttcaatgacgcggcgcttctcgttgcggtcgccgcccagttcgcgcgtgtag

SEQ ID NO: 499839 - DNA, 333 bp, Stenotrophomonas maltophilia
atgctcggctgcgcggaggtcatggcgtcggtgggattcgtgccgaccaaggtcggcacctgccagagcaacgtcatggcgccggtgggattcgtgccgaccaaggtcggcacctaccagagcagcgtcgtggcgccggtgggattcgtgccgaccaaggtcggcacctaccagaacggcgtcatggcgccggtgggattcgtgccgaccaaggtcggcacctaccagagcggtgtcatggcgccggtgggattcgtgccgaccaaggtcggcacctaccggagcagtgtcatggcgccggtgggattcgtgccgaccaaggtcggcacctaa

SEQ ID NO: 499840 - DNA, 336 bp, Stenotrophomonas maltophilia
atgatcctgatcggccaacaggaacgggtgctgatcgtcggccccaccgaagcgcaccactgcctgcgctgccagacggaaaccgagttcgctccgcagctgcgctacaagatggcgcgcatcgacctgctgttcgggttcacctaccagcggcgctacgagctggcctgtacccggtgcgagcacggctgggtgctggataccgagaccatggaccagcagctgggcggggtgccgatcccgtggcggcaccgcttcggcctgccgttgatgctggtgggggtcgccgcgctggcggtggccggttggatgtggcggcacggatacatcggttga

SEQ ID NO: 499841 - DNA, 1269 bp, Stenotrophomonas maltophilia
atggtccgggtgggcgtgggtcagcagcacctcgtccacctcggccgggtccacgccggaggcgcgcaggttgcccagcacctggcccaggccggggccgaagcactgcgcggttccggtatcgaccagggtcaggtggttgccctggcgcaccaggaaggcgttgatcgcggtctgcaggcccttcttgtcttccggtacgtagcggccttccaacaggcggctgaccagtgtcggcggcacgtcgaccacttcctgccggcccagcgcgaccacgccgtcgaacagggcggtgacctgcagcgcaccaacgcgctggtggtagacgccgggcacctgctgggtgggagcgggcgaggtggcttcggccagtgcagccagcggcagggacgacagggccagcagcagggcgccgcgcagcggcaggggacgcaggatcatggcggttctcggtggatgacgggcggttccgttgtgcccagcgtgccgtggccggcgtgtgcgcggcgctcaaaccactgcgcggaatgctcagggagggggtgttgtctgcagggctgcgccctgcacctgctacgagccagggcaacggccgaagcaacagcaacagcgacagcgggctatccgtgggatggcggggtgggtccggttgcgggagacgccgtaaaccccgctccgcggtccggcccagtcgctggcggctgggcgttcgggcgcttgcgaagcagtgcttcgcaagcaaagcgccctcacccatgggggcttggccgcggcttgctcgtgtgcgctgtcctgcgcacacggcaagaccggggcggggcatcctgcccaacccgcccgaggtatacctcgggcccatgccgcggacactcccgcaaccggacccaccccgccttcgacagttttccgcgatctgtcagctcgcggggtcagatccgttttccgcaggaaaacggatctgaccccagatcgatttcgatatctgacagatgtgtcgaccaaggtcgacacctaccaacagccgccggaatctgtcgaaggcggggcactgtgggttggcggggtgtgagccgcatggatgcggcgaccaagcccccatggacgggtttacggcgtccccgcaaacccacagtgccccgccatcccacgggatgcacgctattgctgttgctcttgctcttgcttcggcaggtgcagggcgcagccctgccgaaccccctcaaatgtctgtcggagccagcccgtactgctcggcgaagcgcttgctga

SEQ ID NO: 499842 - DNA, 678 bp, Stenotrophomonas maltophilia
atgactgcaggaatcaagatcatcaatgactggggcaccgtactgatcgacgatgccttcccgacactcgccatgctggctcaaggcactaccacgctggatggcgaaggaagcaggtacatcggcaaccatgccggcatggttgccgtgcgttcgacctcggtggttggaagccagtactacaatcagatcgacggctattcggctgggctgtatctgtttggtccgcccggcgcagtggtgcagtggtatgtgtacgcgccaccgcaggagccaccaagcaattttggactgatcatccgtgacggtgccggccgcctgatgttcgacgcaggccggaaagccgcgcgggtggctggccttcgttctgcgtcgacacggcctggctggcaggggagcgcccagtttgatcctggacgtgcctgggcagtgatgcccctggttcacgcgtacgattcggcgaacacgttccagcgatggggcgatccgcaggaatacctgcaacacgaggacgtaagtgtttccggaggggcggtcaacggtggaaccatcacgttcgggatgacgcagacggcgcggcgtacctacggcccctactacggactacctctacccacccggttcacctataccgggaacaatgcagccctcgcggtgcttgatgtaaccggctactag

SEQ ID NO: 499843 - DNA, 279 bp, Stenotrophomonas maltophilia
atgccagtcggaatccaggttttcaatgcggatggcagtctgggctatgacccgcaaggcaggttgttccgcgtgcttgcaagcatccagtacagcacggtcgacggcagcgcagccttctcccggcaaccggaagataccgatctgacggcggttgctcgcggcaggtatgccccggacttctccatcgacgtggcctccggcattgtcagctggcgtcacgtcaatgttcccgccaaggaccgctatcccggcatcgtcgaaatatgggcccgctga

SEQ ID NO: 499844 - DNA, 1155 bp, Stenotrophomonas maltophilia
atgacgagaaaaatcatcgacctcgataccgttcaggcgaacggtaagcggggtgaaacacagcgcccggcgtttaccaagatcaacgacaacttcgcagaagtgtatggcgcgctggatggcgtgaccgcgatcggacggcgtgtggattcactggagcgcgctcttcagactgcagttccaggcaggaaccgcctgatcaacggcaacttcgatttctggcagcgggctactaccggcaccacccagggcggcgagatctatgtggccgatcgttggaccgcggcagcgctgggctgcacgcataccgcaaatcgtggggccaatctgcctgccggcggtgccgcgccggaatcgcgccgtttcctcaacagtgttgtctccaagaccagtgcaggtagcagcgcctacgtcgcacagaaggtcgagagcgcggcaacactgtccgatggcgaagtgacggtttccggcttcgcctatggcccgccaggaaaacgcatcggtgttcgtctcatccagcactttggtacaggtggttcgccgtccgccgcggtcagcgtggaactgggaaccgtagcggtcaccgccgcgtcctggacctatttccagctcagtgcgcgactgccatcggtgaaggggaagacgctgggcagcaatgccgacagcgatttcctgtggctggtggtggatctgtgcgcggatgcctatggcggcgttatctccggtcagagcggggagttcggccttgcgatgatgcaactggagcgcggcaacagggcaacggcattcgacctgcgcccgctggccgacgaactgcaactgtgccagcgctattacgaaaagtcctacgacgttgatgtcgttccaggaacgccaaccaacagcggtcgctacagctggggaaactcggcggcgagcggcgcaaccagctacctgtcggtgccattcaagacgcgcaagcgagtgacaccggtgattgtcatcaggcccaacaacaatgtagtcgaacctggatacgtcaatcaggatgacagcagccgaactcccgcatcggttcccacgatcgcgacgaatgtcttcgaggttgcttggggcaacgcgccgggacgctggggtggttggttccactggacggcggacgcagagatctactga

SEQ ID NO: 499845 - DNA, 1173 bp, Stenotrophomonas maltophilia
atgagcattgatcttcaacgaatcgacctggataccatccagcccaacggaaagcggggggagacccagcggcccgccttcaccaagatcaaccagaactttcaggatgttgcgttggcgctggagggaatgcctggtgccatcgcagactcagtctcgggaaagaaccgtttgatcaatgggaatttcgagctctggcagcgtggggacaacttcaccgccgccgctgcctactgtgcagacagattctttgcacagcagggagggatggacggagcagtcatattcaaatcacccgttgccccgggcgattcgaacttcccgagaagcctgtttacgttggccgccaattgcaacgggaatcacaacgccgccggacaccatttcctgttcgagcagcgtgtggaaagtgtgcggacctttgccgcatcggagagcacgctatccttcctggtctacaacgcaggcaccgcaggcagaaagatcgcagtcgagttcctgcagcgcttcggaacgggcggaagccccactgtcacggcgatccagccggaagttttcacgctcgtacagggcctgaaccggatcagcaagaccgtcagtcttccttccatctacggtaagacgcttggcggtggcgatgattcggtcatctgtgcggtatggctctcagcaggcagcgacttcaacgcgcgcacaggagggctcggcgcgcaggcaggccagttgtacttcggtgaaatgcagtgggaagccggcgcacgggcgacccgcttcgagtggagatcaccggcccacgagcttgcgctgtgccagcgctactaccagaagtcctttcctgttacagaggttcccaacagcaggagcagctccgccgtccatcggaacgccgtggccttcaacagtggtacctgccgcgttgttgcagagttcaaaggcacgatgcgcagcacgccaaagctgctgttccatgcaggcggagaaggtggtgacatcggatcgccgagcttctggaggtactacgacgccgcgggtggaacatggcgcgcgggaacgctgactaacgtagtcatggcaacgagccaggcgttcatggctgacgtaggcggtgcgggcttcctggtaagcggctctgttctactggcaggccactacaccgccgatgccgaactctga

SEQ ID NO: 499846 - DNA, 2640 bp, Stenotrophomonas maltophilia
atgagcgagacaccgctcggtgttgcgcgggtggatatcgaggtcaacagcaacctcggcgccgccacgcaggctgccaagcgcagcctggccgacatgaccgcctccgcacagcagcagtatcagcaactggacagggctgaacgcgcacgcctgcagatgctgctacagcaaagcgcgcaggtggacagcatgcggctggagcaggagatgctcaatgccgtactcaaggccagcgcagtactgatcaacgaaatgacccgtcagatggccagcaacgaacgcgccatccgcgcagcgcgcgatgaactgcgtgcctaccgcaatgacgccgaagcggcggcaagcgcgtcgggcagcgcggccgcaacattcggcggaaacgctggagccgattggggcggctcgacatttgccgaccagatcggcaaagcgacggagttgaagggtgcctacgacgatgccgccgaggttcttaccgggctggttggccgtttccccgcgctggccaatcccatggcagcggcggcggcagcactggctgccaccgtggggggcgtagccgtcgcctggaactccgccagtgacgaggcggcgtccttcgagcgatcgctgctgatcgtcggcgatcggctcagcgccaacgtgccgcagctgaccggctatgcgcaggccatgagcagaattgatggcatcaccatgagtgaagcctccgaagcactgaaccagatcgccatgacaggtcagttcgccggggacgaactacggatggtcgcgcaggccgcgctgcagtggcaggacgcaggtgtcagcagcgcggaagaggtcatcgcatcgttcgtcaagatcaggcaggacccggttgcagcgctcagggagctggagcagcagaccgatgtgctcaccgacgcacagcgaaagcagatccaatcgcttatcgcgcagggaaaccaggccgacgcctcggccctgctgatgcaggcgtatgcaggcaagatcggagaggtggcccccaaggtcatccaaagcgccacattgatggaaggcgcgtggcgcaaggcgaagaccgtcttctccgagctgtgggacatggtgaaggagccgttccgggcagacagcggcgacgatctgcgcaagaacatcgcagatgccgaaaccaacctgcgtcgctggcacaacaccaccctgggcgggaccacgggctcaagctacagccttgccgaatatgctcgtgccaagaaagagctggaagaggccaagggagcgctgcgcgcagtacagcagaacataaagccgatcctgatcgaagcgacgttgcctgccagccctccatcggcagacccacccgcgcgcgggccgtcccttgccgcagttccacgtctcccatctgtgccggccgaacccaccttgttcgagcgcatccagaagcagatcgaccagaacgatatccagcggttggggatagacaagaagaccgcaagcacgcgccttcttgacgaagctaccattgcgctgaaggatgcggaggagaaaggtgacacggctgccgtcatacgtctgaaaacggcacgtgccagcctggaagtcagcgatcaggcgcttgcgcagaagaaggaagagattgcggctgccgcccaactggagaagctcaacagatcgctgggagacgcagaagaagcgcgtcgcagcgcgaacgagcaggaactcctgggcttcggtcacggcaaggaagccactgcacggctcgcccgcgtcaatgccatccagcgtgagtacgatcaagggatgaaggcgctgcgcgatagcggcgcgcccgaaggcagtcagagcttccgcgaccagtcgaacgcgctgcgttcaagccgggatcgacgcttgaaggatgagcaggaccatcagggccgtcggatggagaagatgggcgattggcgcaatggcgcgcgcagtgcctttgaggactacaacgagtccgcctccaatacggccggcatgacccaggagctgttcagcaaggcattcaaaggcgctgaagatgctctgaccaagttcgttcttaccggcaagctcaacttcagcgacctggctgattcgatcatcgcggacctggcacgaatcgcagcgcagcaggccctgatgggcatcatcaacagtgtggtaggtgccttcgccggaagcatgggcgggggtgccagcgcagctccctcgacgggattcgccgccggtttcggcaacaacaccagctggctgaccagcggcaacatgacgcctcatgccctgggaggcgtctatgcctcacccagtctctctgcctattccggtggcatctacaacaccccgcagctgttcgccttcgccaagggcgccggcgtgttcggcgaagcgggaccggaagcgatcatgccgctgcggcgcgggccggacggccgcctgggtgtggccgcgcacggtggcgggggtggtggcggagtgggagtcagcatccgcatcgacaacaacggtggcaaggaagtcaccaccaacgaaagcatgctgcagcagttcggcaacgaaatcggccagttcgtggaacgcaagtaccgcgagctgcagagtcgtgacctgaaggcaggtggtgtgctcagcaggagtgccatgcaatga

SEQ ID NO: 499847 - DNA, 312 bp, Stenotrophomonas maltophilia
ttgatcgaggcggtgggggcactgtactggcgtgcccccaccgaggccgaactgaaccagctcggcctgaaggcaaagcacttccagccgccacagatcgaactatggccagaatgtgcacttcccatcgacatcttctcgcgggtctccacccagtggcgcaccggcgccggtggcccgacgggtctggactacaacgtggtctaccgggagctcgagcgtgaagggcttactgccgaaaagcacgcagaagtaatggcaggcatccgcgtgatagagcgggctgccctcgacgagatgcacagccaatga

SEQ ID NO: 499848 - DNA, 309 bp, Stenotrophomonas maltophilia
atgttccaggtcaaggcacctgagaccttcaagagcaccctgaccattgccggccatggccgcgagcagaagctcaacctgacctaccgtcacctgcagcaggccgcgtacgcggacctgctgcagcgcctggcggccggcgaggtgacgcctgcccaggcaatcctggacatcgtcactgagtgggatgcagatgtagcgctggatacggcaggtgtcgaactggcacttcagcagcagatcggcttggacggcgccatcgtaggtggctacgtgcaggctctgcaggtcgcacgcaagggaaattga

SEQ ID NO: 499849 - DNA, 882 bp, Stenotrophomonas maltophilia; identical to SEQ ID NO: 495661

SEQ ID NO: 499850 - DNA, 363 bp, Stenotrophomonas maltophilia
ttggttggcacctaccaaagcgttggtgggtgccaaccgttggttggcgccgatgcggctccggtagaggccaaccttggttggcgccccgtgccgaccaaggtcggcacctaccaaggcgttggtgggtgccaaccgttggttggcgccgatgcggctccggtagaggccaaccttggttggcgccccgtgccgaccaaggtcggcacctaccaaggcgttggtgggtgccaaccgttggttggtaccgatgcggctccggtagaggccaaccttggttggcgccccgtgccgaccaaggtcggcacctaccagagcggttgcctccgccatacccacgcggatgtcacatccgtgcgctag

SEQ ID NO: 499851 - DNA, 645 bp, Stenotrophomonas maltophilia
atgcatcgcgcccgtcagcatgctgccagccagacccgcgagcggcgccatcgcctcgcccacgaagccgcccgcctgatggccgaaggcggcatccgcgactaccaccaggccaaattgaaggctgccagccgtctcggcatccacgacgatgcctccctgccccgcaacaccgagatcgaagacgccctgcgcgagtaccagcggctgttctccggcccccagcacggcaacgaactgcagcgccgccgcgaagccgcgttgcgtgcgctggagttcctgcacggcttcgcaccgcgcctggccggcccggtgctggagggcaccgccgatgccaacagccccgtacagctgcacctgcacagtgacgacccggaagccgtgcaccgcttcctggacgagcacggcattcccgccgaatcgcggacgcgtcgactgcggatggaccgcgaacggagcctggacgtgccggtgtgggtgttcagcgccgaagagctgaccttcgacctggccgtgctgccgtatgacgccctgcgccaggcgcccttgtcgccggtggacgagaagccgatgcgacgcgcgtctgtcgcacagttgcggcagctgctggccgaggcggagatcaccgcgtatatcggcgggtag

SEQ ID NO: 499852 - DNA, 681 bp, Stenotrophomonas maltophilia
atgctcgtccagattcagaccgtaccactaggctcacagttggacattcagatcaaaagggcgcagcgtttgattcccgcccgcacagggcattcactaaggagagcgttcgtgagcaggacaagtgtctcccatccattgaagatcgcgaccttgcctgtcgggatcaacggcggtgggatcggcgtcacctttgcaccaggaaagcaccaagccgtcgctatgacaggctcttggtcgcgggatctgaacgtggatctagcgtcgatcgtcgactggggagcaaagcttctactcaccctgattgagccgtgggagttcgaggagctacaaatcacttctctagaagagcgcgccaaagcgcacggcttaatctggcacggcctgcccatcacggacggtgcggcccctgatgcgaggctgctagagccttggcgatcgctgggaccaaaactcgcctccgagctcttgtctggaaccagaatcgtagtgcactgcaagggaggattgggtcgcgctgggaccgtagcgtcgatgctgctccttgagaccggctgcgcttcggatggttccgatgcgattgccaaggtgaggtcagtgaggccgggtgcggtcgagaccccggagcaggagaagttcatcctgaactggtccgctcacaggattcccggtctggggtag

SEQ ID NO: 499853 - DNA, 306 bp, Stenotrophomonas maltophilia
ttggcagcttattacttcggcaacaccgcggaagggcaggcggcatttgcccagcagaccacctccggcgcgctggtcatcaacgatgtgatgacctatgcatcggtggaagaactgccgtttggtggagggggcgcgtcgggcatgggcgcttaccacggcgtacacggcttccgtcagttcagccaccgcaaggcggcagtggtgcagacggcggatggggcatcaaatatgcgcctgcgcgcgccttatgcggataaggtggatgcgctggatgcggcgctgggtagtgccttgaagcgctga

SEQ ID NO: 499854 - DNA, 405 bp, Stenotrophomonas maltophilia
gtggctgcaccggaggtcgcgcagcgcatcgacgcgcgcgcggattttggagcggcgctgtgcgaggagccgttgctcgcctacagcctgaatcggccgctgatggatgcgtggctgcagttcaaccagctggacgtgcgcccgccgctgcctgcgttgcttgggcaggatctacgcggattgcagcggccgttgcagttgggggtgggctggacggtgctgccgcactatctgtgtgcggatgcgcttaagcgcgggacactggtggagattgaggggcctgtgggacgagcgaggttggattactacttgatgtggacggcggcggggttgcggcagccgcgggtgccgcatgccagacaagctttgctctggcggctggagtccaagaagggtgtttcgtag

SEQ ID NO: 499855 - DNA, 2031 bp, Stenotrophomonas maltophilia
atgctgcagatcagagtgactgaagacgtcctcgagtcccagctgaatttgctgctgacccaaggaagtgttctctttgagggtgggaagtacaggctgactgaggcagcgcggcgtgacctgacaacctcgaataaggcagcgaaagctgagcagggagagtgcaagcaaagcttcatcgcaagctgcgtagagctatgtcctggtttggatcccgagcaagcctggactgaattttctcaggcactgattcgttccattaggatctctggtgccaatctgtatcacctcatccgtgacggaaatctgcgcaagaacatcgactggctggctgagctccggaagaggcatgggccggaacatgagacgggattgatggtcgttgccgagcgattctttgctccggaaaatcaggtgtgtcgctctcaagtacttagatttctgactgctcatttctttgctgaggcgacacagttcaccccagagacgattactgcgatcgagaagggaacgaagccacgctccattaaagttgttcttgataccaacttcattttctcggttctcgggcttcatgagaatcctgcggatgatgcagctaaatcactgcttgacttggctgcgagcagcaaaggaaagttggacgtcaagctctatgtgctccctagcacaattgatgaggcaagaaaggttctttctcatcaggttggcgctatcgaggcaatacgtccgtcccgagcgattgcggctgcggctgcggggcaaccgctatcaagcatcgcgaaaaagttctttgagcatgcaaagagagtgagcgggctcaaagcctctgaattctttcagccctacatcgatgatctgaaggcaattcttggctctcacggcattctggttcttgaatcacagcgggaatatttccatcaacgtcaagatgtgcttgatgacgttgctgtagagatggaagccgaggccaggaggcccgagaacaaacgcaagaattatgaaacattgttgcacgatgcagtgctttggcatgttgtggctgatcggaggcctgtaccgcccgatagcccatttgacgtccaattctggggcgtttcgattgattggcgtttgatcagctttgacaagaagaagcgcgctcaaacaggagccaaagtcccagttatccttcatccggaaaacttggtgcaacttctgcagttctgggtccctagaacacccttgcttgaagagacactaatcgacactataaagcttccactattcttccaatcattcgatgtagaggatgagaaggcgactcttaaagttctcgagcaactgtctcgctacgaaaaaattgatgatcttccggagcccgttcttaggcaggtactagcgaacaagattctcagagccagaatcacgcaggtcgaagcctccaatgacgatgaagcattggcgctcgtacgggatgagctgatatcgatccataacgagcaggctgaaagtttggagaagacaaggggtgagcttgtcaacgtatctgcaaagcttcaggatacgcaggcctcttacgatgatgccaagggtaagttgctagatagtgaatcaaagtatcaaagtgaagctgagaaggctcaggctttaagcgatgctcttaccgggcagacagagctgcgtgaaatcgcggagctaaagttcgcgaaagccaaatacttaatctacttcgtgatagtccccacgttcttcgctattttgctttccatcggatcctatcttgccgccgtctacggttttcctggtcgcgtgtccggctggaaaatgtatatgcttctggttgttcccgcatttctgattccttacgccgcagcatggatgatggtgagtaggtacttggaagcaaacaagaacttgaccgactggtggccgtcgaagttgggtgtgtttgggtcaaaggcgtggaagtggatcctagggctggttgcggcgtcgatagccactagctacgtagaggttataggacgcttgataacgggcgaatcctga

SEQ ID NO: 499856 - DNA, 1821 bp, Stenotrophomonas maltophilia
atggcaacgattcggaagtccacaaagcctgatgatgaggtcgcctccggtgactggaccttcgccagagacatagagggccagcagaacgagaaggtcattctggactggagcttcgaggtgcctggaggtggtcgcttcaccgatcaagcgcacacaacacttcatcagcagatgaccttctacctgcggtcagccctcgacaatggtgtgctttccgttggatcacttccggcgaccatgatgagcatcagagagattgccgtttacatgatccggcgaaagatagattcattgataagcctcacctctctccacagctgggacttcattgatcacctggagaaccagtacttggaaggtagcttcgatgaagggaggcccagggactggagctacgccacggcctacaagctgctgcgaccgctcgcgcagatctatgagcttaaggccaagtacaaagaagccggaatcgactgcctgccagagccgcccttcgatgggaagtccgccaatcgagtagtcgagattgacctgggtctgaagaaagggggcgggctggcaccaatacaagatgacgttgccgttccgttgctaagcagagcatgggaatggattcgctatggtcttgatgatgtgatcaagatccagaaccacttcctccagagaaggtcccagatgcctgaaagaggaccaccgagggtgaaagccttcaagcagctcagcgaggaacttcgcgactacgaaatggccatcgtgcccgatacgggcctgccatggcacgcaccgcttcatccacggacaagagtcgatgaggaaggaacggtagttgaagttagcacagtgcagagcgtgcgccggctcgtcatgaacaccattgctgcggccacaatctgcatccaagggtgcgttggtctgagatcgcatgagctgattggcctaaagatcagtcatgtgaacgacccgcttgatggcatcgttacgatccatcagtcctctgacggactgatggacatctttatgatcaatggggtgtcggcaaaggggaagaagactgatcacgcgtggaccgcgggtctgaggccttgcggtactgactatgtacccataccgatagtggcgcttgaggcgctgcgtcgcgtacttgagccctggagactgctaaagggggaaggaactagggaccttctgctctgcttctccgaagccaagtcattgccctctcatgcgaagcatctgggtcggttcacggcaatgcgcatcgcagcattgcagagagagttcgcggcagagttgctagtctcaaagcacgggctgagcgcagaggctgcatggcagcaaactaggagcatcaggcctctgcgctggaggaagacgtttgcccactacatttacaggacaaagcctgcgctacttggtgcgcttcgcgatcactaccgccatatgagcgagcgaattaccgagacgggctacatcggaagcgacgcggcgctactcgaagatctgcagggagagcggacgctggaggcagggcagttcttcctcgaggtcatgaccggtcacgctgtagcagctgggcctgcgaagaagctgatcgcaaagcatgcaagtgagctcgcgaactcgatcaatagcatgaatggtgatacccctatagacaaagcactagcgctcgtcagaatttcgggcttcgagatgtggacggggacctatgccagctgcctgatcaacatcctgccggctgagtctgcctgcaatccgcatgcggacctgctgacaggctggcgtcaacctaactttggggttcgatcccctacgtag

SEQ ID NO: 499857 - DNA, 1833 bp, Stenotrophomonas maltophilia
atgatggaccgacgcaagaagaggattcgaccagcgaagcaaccagatgtaccgggtgagaagaacaactggtggttcaaaagagcgcccggagtgctggaagttcacttcgagaacagagacggatcaaggaccaaggtcaatctctcaagttggctagccattggcccactgtgtgtttctctcgcaacggcatttgccaacacacaagccaacaagcagcaggctggcaggtactccgctgcgggaaacttcaagcaggcggcactaaagtactttcggtcgcaagaaacgcgctttagcacgcccgatgaggtgccagcaaacttcatcactcaaataaagcagaatcttgataagcctgatcccataaccaaaaaggtcctaagccagagcaccaaaaccaactacctgaaggcaatcgtgctcttggttccagaactcattcgcctcgacagccggtggagtcacattgaggtcccgcggtacgcggttgctagaacaaaaagcagctcagcgtcaaagactttggatgcggatggcatgaccgagacactcctagtcgccgcgaaggactgcgtgcgacttatgaaggaggtctggcctaggctggcaactgtgcgaaaagcgctatcagacctgaaagctggcaagcacgtgccgatcaatagccctgaggcgcaagtagctcgcgtgctcttcgacaacaaaggcaactttcccgcaccaatgaatctcggtaggaatgccggcagctggagtaaagaatacaggacgtaccaagcctatcggagtctcgcctacccgctcggaggtgagttgacgccactctatctgttgctcctttcgcatactgggtggaatggccaagtactgaactgtctggaactaggcggtattcagttcgtggaggtgctgggagctagaaggatccacttgcagtcagtgaagcgtcgtggaggttccaggggccggccaggtactagcagtatcatccggtgggccgcaaacactagtgataactcgctgtccgtcaacaacatcatcagcttcctgctcgaatggacaatgcttctacgcgactacgctgccgagcccctaagtagggatctgttcctccacgcggtgtcagcaagtggccgcaacgaagtttccggacttcgcattgactcctatgcgggacggctcgacaacatcccaactcggatcaccaactacatcatggtgtattgccagagcaaaggaagtccgtactgcggtgcatcggcgctcagaatgggaatggcagagttaattgacaaagctaccaacggagatgcggtcctgcttaagaacctcctgggccaccgactcatagacaccggccaggaccactacagaacagtggccatgctgcagcgaagtaaggagaacatggcaggtgcaatagccacgcaccagcgatggattacctctcaagggaaggttgacacgcgctcaaagcccagtaacagagactccaccgcagccacaccaggattcacctgccttgatgcctttcacagccctattggtggccaggtcgaaggacgcctatgcaccgcctatggcatgtgcccatcctgtcctctggcaggctcagataccgatgaagcttacgcgtttgctagagcgcttcagcttaaggaagagtacgaacgcgcccgaggatggttggggctcgggatttggaggtgcaagttccaacgcccatacgatgcccttgtcactcgatggatccccagcctcgactcaaccgagaaccgaaaacaggctgtccttgtgacgctgagtgcgctgcccgctctcgagtag

SEQ ID NO: 499858 - DNA, 1344 bp, Stenotrophomonas maltophilia
atgaagacctacgacgccgaaatcagggtggtcaggaacaacgagggcaagagtcctggttcaaacggaggactctggggtactgctttaccgaatcacttctgcttcttgaccagccgaactgacgggaaagtcatagagccggcgttcgacttcatgtgtgccacctatctaaccagggcggcgacgccgtgcctgaaggggggaaggaacaccgcgccaaccgttctggctgacatggccgacttccatcactacctggacgcctcaggcatcaaggtggccgatatctcatccgcacacttgaggggctacgccacagacctctgtcactccaagtcggcagcaacaggaaagaacctggccgcgagcacggttaatcgacgctggtcaacgctcacgaagttcatcctctactgcctacggcatggatatttgaagaacgtgatccctaccgccgagcgagacaccaaacgcggaaaggtcacctatctcgacattgacgcagatatctctggatcaggcagcaacctgcttatcactgcgcttgaccctcaaaccttggacctcttgcttgaggagttggggcctcctgtgaaggaggtcattgctcaaacagtcgtgctctgcgagggcgcaaccactgaccgacttatggctgaagtctgcttgcatacgggcctcaggcgcaccgaagtctgcaatctaaagctaaccgatgttgagaccatgccgctcgatcagctggacccagtgtcggagcttccggtggtgatagtgggcaaagggaacaaggcgagaaacgtcccgtttcctgtctggctgctcggcgcgatcaacctatacgtcaatacagcgcgagtgattgccatggcgaaaaggcaatcgttgatgtccgaacctgatcatggctacgtgttcgtgcaccacgtcgggaatgcacgctacatcggtagccgcgtgtccgagcagacattcgatcgtcactttgcccaaggccgtgaacggttcctaatgaagctggcaaaacttgagaacaatgcctactacaggatggctgtggcagaggcaatcacagttcatgcgcttcggcacacgttcgcaatcatcaagtacatcagcagaaggctcagcggcgacacgcaaccgagcaagtacgttgcctccatcctcggacatgcttcggtagagaccaccgaaaacatctatctgaacagtgctgtgacatacgagagcaagattcgcgagcgcatccggatgctcaacgagcaaaggcctcacatgcagctcggtcagcctagagctcatcctggcacctcagtccacttgggagaggctcaatga

SEQ ID NO: 499859 - DNA, 891 bp, Stenotrophomonas maltophilia
atgccaaagcaagtcagatcgctatccatctatcgagccacaattgaacggctacagcagtttcggctgcttagcccaccggtgacaaagcaagaagcactgcttctggggttcgagaaaattcctccagagggcgcttccatcgtgccgagtgcccaaggcccggctacgctgttcaatgcccgtggaagagaggtcataagaagggatcttcctatgatcagcaagtctcgaatgatcaatacttcttggaaggactggcacgggcatacccatcacgggacgcagacaagatcctatgacacatatcccagggagcacatcgcccctcctggggagtacctcacggcagtgaagtctgcaggtggcatcgcgatggcaacgagggtagttgatcgaacagagccggaagaagcaatcgtaaatttgctcaacctctacttggagtgcttcccccgttttgacatcgttgacccccagttagccgtacctctaaggattcagaagatcaattggcgcattcttccacccggggtctttccattcgcaagggccatggaggtcttggaaggctatctggagcagctgtcggataccgatcgcgagacagccacagcccgcatacgaacaatcacacggcacgagcctgacttcctggcagttgggcttggcggattcagcgactacatcgtcttcggattcacacgcaagcgtaggtttgttttcgagagtccagaagtcgggaacgcgacctacatttttagaaatgagtgggaagaagtgtcacagctgacgaagcgcgagatccttcaagagaatctgcaggaggcgaggatcatccacacggcacgttggtctctggaaatatcagaggcgattcagcgacgctga

SEQ ID NO: 499860 - DNA, 1677 bp, Stenotrophomonas maltophilia
atgccaatgagacccggcgaggcagcaagctttcggctgccacttccggtggactatgtgggagcgcaacgctggttgcggctatccttcccgatcggatttcctcgcaattctctgattcttcgcgtggaaccttcgccttggctcgtctggccccacgccatgaagacggggttgtgcctgcatggctttcaggagaagcccgtctccggtagcccggaggcgatcgtcaccgacactttgcgccgctttgcaaagatcgttcagctgtcgctgccgacatcaagctctgatgcgagaagccgcgaattcgagcaagagtccacttcatactggaagctgcaacatcacgcatccgcccagagtgtcaacttggttcaaagaccgtcaagctcaggggcgctctttgctgtaagtgacccgcgcctggatcagagaattggcggagagcccgtctggttagcccaagacccagacgcaatcgccagccatcttgaaacagtactcggacagcgggtcaagataagagatgccgcgcgcgccggattctacgtcaagctacaaagctaccccgatatcaaagctccggcaccaagcgagctgttcaagtggctgcgacctcatctcgcaagtgacgactacgcgcggttgctattctggtttggtgagaccagtcccattgccagtcgctgggttgctcttgaactgccaggtgacgccggtgcaccgatctactgcttgaacctgcgggatcgctcactcgcaagaaacaagccagtcaaattaggagttcgggcagggcgtagagtgacatcaaatgcgtcaaatccagacatcactctgagtcactctgcgatcaacattcttgatcgcgcggagatcctgtcgcgcgaccgaaccccgaaacttgactcgctctccaaggcgcgcgtcattgtagtcgggcagggttcacttggagcgcccgtcgcgcttcatctggcgaggtcaggtgtgggacacctaacgctgatcgatcccgatgaactcaccgccagcaaccttgggcggcacgttctcggtgccagcgatctgggtaggaacaaggcagaagcaatgtgcgaccgcctacggtcagacgttccgatcgtctctatcaaggcaattccaacatacgttgaactggctctcgtcaagaatcacgcagacttccagaaggcggatctcatcatcgtgaccagcgcggactgggagtcagaagaaatgctctggcgggctaagagcgtaggagccccttggaggctgattcaggcctggagcgagccgcatgctcttgttggtcatgcattagtcgctgcggacgttgaagccgatgctaggtcgctgttcgaggacaacgggagattccgatacaagttcaccaactggaacggaggcgacagcgtacccctacctgcctgtggacagagcttcatacccggcggtgggcttggagtgagtgcaatcgcttcgatggttgccgccgaagcaatcgaacagctgacatccagctcgaccgagccactttggataagccgtatcagcaacccacagagggcttcagaactcgagggacagtacgttggccccaaactatccagtggggcgactgagatgactctgaagcgagcatggcctgggactgcccccaatgcctga

SEQ ID NO: 499861 - DNA, 1260 bp, Stenotrophomonas maltophilia
atgaccctgctgtccgacttcgaatccaagcgtggaagctgggagtacttcctcttgcgcgccgcccgcgaaatatcgttgtccgagcctcagtacgagaagatcaatgctaggtacaaagtgctggagcgcattctcaacgctgcagacagcccactgctgcaaagtgcccatatcttcgtccaaggctccattggactgcggactaccatcaagccagtgaacggggctccggccgacctgggcacagttgatgcagacgcaatcgtatggctgcccaatgccggtggggcttcggcgcaatcggtgctcgatgaaatccataagcgaattgaggaaggaacgcgggtcgaagcgaaagtagagaagctccgtcgaggggtcaggatcgtctacgccgacgaaagcccgggattccatatcgacatcacgcctgcacgtgcaatctctggaaacgaagaaacgcacggcgaaggcaagctcgaagtgcctgatcgtgagattcaagcttggaaggcaagcagccctatcccgtacctgggttggcttcagcaagcgtctgagcagcagatctcgctggagagcattgaggttctggccacaaaagccatcgcaatggacgaggcgacgctggcccctctgccagactacgaaaagtacatcgacaacgacccgttgcgcgctacgatcaagctcctcaagcggcatcgagacgagtgggcgattcgagacggcgatgcgtcccatcggcctatctctgcggtcatcacaacgcttgctacgcgagcctacgaagaggtggcagccgattccagccgccgcccgcggcgcccgttggatgcgatcatcgagatcgtgaccaacatgagcaatcacatccaatacgccagcggtaagtaccttgtctgcaacccgaaggacgcggcagagaacttcgctgaaaaatggaacaggccagatgagggaatccgctacgtcaatgcattccgcaagtggcatgacgatgccaagcactcgatctctcttggcttgcaagagttcccatctgtcgagtccttcagtgaagcggttaaagaacgctttgcactcagtagcaacttcgtggtttcggtgaacaacgacgttcctgccaactggactctgccaggacgcaagcttggtctcactcgcaacgtatcgacgatgggatcggtcttcggcgggggcgtcgcaggtcatcaggcacaagaaggcgctggatcgcctgaacgccttggttga

SEQ ID NO: 499862 - DNA, 1203 bp, Stenotrophomonas maltophilia
atggaagcaacaagtgacgaagtgcaggacgtatcctcaaccgctgcgccggcagcaggtaaaggtgggcggtatcacacgtccgagccaataaagaggctggtctggacgagatcggcgggacactgtgaactctgcgggaccgatctgactcgcgacttccgcgtcggggccgacatgcagtggggtgaagtagcccacatcatgccagccagccccaaaggtccccgagccgaatctggccatgatgccaaggcggcaagtgagctgaccaatgacccggctaacctcatgctgctatgtcccggctgccatgacaaggctgacagagacgcagaaggctaccccaagtcagacatgacggggctccaccttgcttacctcgaacgaatccgcttagccgcaaccgtcccagatgcgggtagagcggtcggcctcatttttcaaagcgatcacttcgtaacgatcaatgacatctccgagcgcgactttgccatggcgatgtccggggagggcttggtcgcgttcggggacatcatcaaacatacgcttaggccgccaggggaagaaggccgtaactcggactactggcgtcaggttcgggaagacattcgctacagaatcgatcgcgaactccgccgccgtggtggtcgttacggcgatatccccacactcgcggtggttggcctagcagacataccctcactcgtcgtcctgggccagacgatcggggatcgatctaaccgcgtcatcttctcatctaatcgtgagcacggattgaagtggccggacagtgaggcagtccccccggagtaccgcttcgtggagccgccagccggagatggagagatcgcacttgtagtgtccatctccgcggcaatccccgaacgcgatgtactggatcgactgccgcgtgcacgtattgcaacgttcacgatggatgacccgacctataccgcagttcgcaatcgtcgcgtgattcatgcattcagggacgccttgcagatgcgcttgagcaagctcgaggtctcaactcctcatccaattcacctcttcatagcggcgcctgccgcgttctgcattgaactcggggctctgatgactactgagcaccagcacacctatgtgctctacgaccgtgatcggaacagcggagggcgctttgtagaaacattgactattacaccaggagatcgcgcatga

SEQ ID NO: 499863 - DNA, 1092 bp, Stenotrophomonas maltophilia
atggaacaggatgctcgaaagactcaggtacctatcaaaggccgaggctccgcttcacgcgtgccaagccggttcgatgcaacgacaacagtcggcgtcgatgatggctgggaatcgatctacgaagacctgcaggagttgccgcggctgagaactgaggtgaccgaagagcgcgcccggactgtaatcagccgcaacaactctcccgacgttggattcagtgcgtcggtcaatccctataggggatgcgagcacggatgcgtctactgcttcgcccgaccttcccacagctacctcagcctatcgccagggctggactttgagaccaagctctttgcgaaaaccaacgccgcagagcggttgcgcaatgagcttggtcgtcccagctaccaatgcgctgccatcgccctcggtatcaacacggacggataccagcccatcgaaaggagctaccaaattacccgccaatgccttgagcttctggccgaaacgcgccaccccgtgagcttcgtgaccaagagtgcattgatcactcgcgacatcgatctactcgcggccatggcaaaagaccgcctggtcacggtgtacttctcagtgaccacacttgatcgaaagctatcagcaaagctcgagccacgagctgctgctccgcacgcacggctaagggcgatggagaaactccataaggccggcgtgcctgttggtgtactggtggctcctgtcatcccccgcatcactgaccacgaactcgaggcgatcctcgaagaagcgcacgcccatggagcgcgggctgcaggctacgtgctgctgcgactacccaacgaaatcaaggacatctggaaagagtggctggaactgcactatccggaccgggcagaacacgttctcagcctcatgcgccagctgcatggtggcaaagagtacgacgccgcattcggtaccagaatgcgaggtacgggcccctttgcagatctactttcccaaagattcaagaaggtgcacagaagcttgggattcgcaaagctccctcccctgaacacccaactctttcagccccccagagagctgtcgccccagggccaactgttctga

SEQ ID NO: 499864 - DNA, 225 bp, Stenotrophomonas maltophilia
atggtcgaacatacgcatcaggcagtcctggccgacgtcatccgggcgagtcgcgtcgctcttggattcagtcaggaaggctttgcagaccatatccagatgcaccgggcttactacagcaagattgagcgtggcgagaagaatgtcactctcgccacacttgaacgggtggccaatggcctcgagaagaccatgtctgagttgctggcagaggcaggcctctag

SEQ ID NO: 499865 - DNA, 939 bp, Stenotrophomonas maltophilia
atggctgagctgatcgcccacgcctgctacggcatcgacatcggcggcaccaagatcgagctggtggcgtgcgatgcggcgatgcaggttacctggcgccgccgcgtggccaccccacagggtgactacgacggtttcctgcaggcagtcgtggcgctggtcgccgaggccgatgccgcactgggccgtagtgatgcggcgatcggcatcgccctgcccggcgtgcgcgaccgacgcagcggccgccagctcagcgcgaacgtgcctgcgttgaccggccacagcgtggccgcggatctgcaggcgcggctgcaacgcccgctgcatttcggcaacgacctgcagtgttttgccctgtctgaagcacacggcggtgccgccgacggctaccccagcatgttcggcgccatcctcggcaccggtgctggcggtggtttctgcgtgcagggccgcctgctgaccggtttcaacgggctggccggcgaatggggccactggagcgtgcccggtcatctgctgcagcgccacggcctgccgctgatcgactgcgcctgcggcctgcagggctgcgtggagcgttatgtgtccggcagtggcgtggcgatgatcgagcgccaccttggtggcagcgccgccgacgccagcgcggtgatcgccttggccgaagccggtgatgcccgcgcgcgcaaggcgctggacatccatcgcgacctgctcggccacagcctggccgcgctggtgctggcgctggacccgcacgtgatcgtgctcggcggcggcctttcgcagtacgcgccgctgtaccagcacctgcccgccgccatcgccgcccacctgttcaagggtgtgcaggtgccaccgatcgtgccgccacgcttcggcgatgccggtggcgcacgtggtgccgccctgctcgcctgccaaccctcgttttcctga

SEQ ID NO: 499866 - DNA, 4665 bp, Stenotrophomonas maltophilia
atgttggaacgactgaagaccatttcgtgtgccgcactggcgatgatcgcgctagggagcttggctccttgggctgcgcaggcgcaggaggtgcagaagaagtgggagagctacctgtcgatgggccagccgcgagccaccgaagcggcggtgcagaaggacatcaagtcgctcttttcccagtacgaaaaggacaaacccttcgattggcatgtcaaacgccaacgcgtccttggaaagaaggtcatctacgattaccgggtgagacccgagaagatcgttgctaccgactgggtctacatccactcagggcaggagtactcatccgaagatcagattcgtagcgtgatcctcgctacccgcgtcagcgacccgcagtgcccggcgacttcactcacggaggatccttgggtggagctccttggacttggcaggggcgacgacggtagcgtgaccaacgaggagaaggatttccattacaccttgaacttctatcatcagagcactcaagaatgctcgtcgatagtggggtgggagcatgtgcgccgggccagaacggcgctttgtccgaatcgaccatccctgacgtggaatgaggccctgcagatgtgctcactggtccagcaggacgagccgcacatgtcgcccatgctctcctacacaagcgcgccgctgccgccgcagcagtgtcctgttggtaacccgtgtgatccgaccactggcgataaatcccagcctgagccggatttcaaccttggatgggtgagcttccaacgccactatcactccctgacgagcacggcgggcggcgcgttgggtacgggctggacccattcccacaatctgcggcttaccacaggcgtagacgattccaccttccctcccagctccgcactgaaagttgggctgatcggcgccgatggcgggcagaccgcattccagaaagtgggggcaagctacgaagccatggacggaagcggcgatcgcgcggtccagcagggcaccaactggcaactttcacgtgccggagagcgcatttattttgatgctgatggcttgatgcagcgccgtgatttcgaagacggtacttcgctgacctatgcacacgacagccgcggccgcctgctcagcatcacccattcaaccggtcggcgcgtggatgtccagtacctcgcgccgggcgatgattcactgatctcggccctggtgatcgccggccagcctgtggtgagctacgcctattctccggccggggaactgatcaccgcgacctatgccgacggtgccagccgtacgtatcactatgaggacacccgcttcccgggctacctgaccggcgtgaccgccgaagacaaccagcgctacagctggtacggctatgacacgcaagggcgagtcacctgcagccgccattccggcgattgcagccaagccaacgtgggcattgatggcgtgcgcctggagtacaccccggcaggcaccaccatcgtcaccgacgcactgggcaagcagagtacgtacgcattgactgccagcggcaccagtggccttccgcgcaaggtcaatggcatcaccgaaagcaacggcagcatcactcgcgcctatctgcccgagggcaccgatttccggcgtcggctgcagtcggtgaccgatcgccgtggcgttgttaccaactacgcctatgcggaggccagcgacgctgccgcaggtgctgtcagtgtgaccaccaccaccgaagcggccggtactccggatcagcgcgtcagcgaaacgcgcgtggccatggacagcaatcggctggtgcagcaggccatcggtaaccgtgaggtgcgcatcgcacgcaatgcgcgcctccagccaaccaccgtcaccgtgcgcgacagggtgaccggtgatacccgcatcaccacgcagacctactgtgaggccgaagggccggagtgcccgctggtgggactgctgcgtagcgtggatggcccacgcagtgatgtggcggatgtgtccacctatgcctactacactgcggacgacgcgggatgcgcggccaatggtgcttgcagttatcgcaagggtgacctgcgcagtgtgaccaatgcgctgggccagacggtcgagaccttggcctacgacgcactcgggcggccgttgtcggcgaaggatgccaatggcgtgatcaccgcctacacctaccatgcccgtggctggccgacctcggtcaccgtgcgcggtgccaccacagccgaggaccgggtgacccagatcagctactggccgaccggccaggtgcagcaggtcaccgagccggacggcagcagtgtcacctatgtctatgacgccgcccagcgcttgaccgatattgcggacaacagcggcaacaccattcactatgcgctggacaacgccggcaaccggctcaaggaggacacgctggacactggcggcaccctgcgccggaccctggcacggaccttcaacacgcttggccagctgaccgcattgaaggacgcaggcaatcacgccaccggcttcgcctacgatgccaacggcaacccgcagaccgtgaccgacgccctgcagcgcgtgaccagccagcagtacgacccgctcaaccgactggcccagtccctgcaggatgtgggtggcgtcgcggcggagatccgcagtcagtacaacgcgctggaccaggtcacccaggtcactgacccgaagggcctgcataccacctatgcctacaacggtttcggtgacctgaccggccaggtcagcccggacagtggcgccagcagcttcaccgtggatgcggcaggcaatcgcaagacggccaccgatgcgcgcgccgtcaccgctacctatcactacgatgcactcaaccgcctgatcggcattgcctacccggaccccaatctggacgtgggctacagctatgacgtggcgccagcggtctgtgccgccgacgaacgctttgccaagggacgcctggggcaggtgctgcatgccaatggcagcacccagtactgccacgaccgcttcggccaggtcacccgcaaggtgcagaccgtcaatggtgtcgccagcacgctgcgctatgcctacagcaagtcgggtcgcctggccgcgctgacctacccggatggcagcgtggctgactacgtgcgtgatgcccagggccgcatcagccagatcggcctgacccggcctggccaggcgcgccagatcgtggtgaacaacgtgacctatgcggccttcggcccggcgaccggctggacctacggcaacggccgccagctgcagcgtccgctggatctggattaccgcccgcacgcggtgcatgacccggccgccggtggcctgtcgctgggctatggctatgatccggtcggctcgatcaccgagctgaagaacggcacaggctcgacggtgctggccaagtacgcctacgacacgctgggccgcctgacccagacccaggacggtacgaccggcacgccgatcgaaacctatgcctacgacaccacgggtaatcgcacttcgctgaccacttcggcgggcactgccagctacacctatcccgcaaccagccatcgcctgactgcggtggatggcgaagcacgcaaccatgacgcagcgggcaacaccaccagcatcggcagcaagacgttcatctacaacgatgccaaccgcatgaacgcggtgaagcagggcaatgccgtactggaaagctacggttacaaccatcgcggtgaacgcgtactgcgtaccccggccggtggcgcagcgcagatcaccctgtatgacgaggcggggcagtggctgggcaactactcggccacgggccaggcgcagcagcaggcgatctggctggacaactacccggtggcgctgatcagcgtgccgggtaccggtgtgccagagctggcctatgtgcagccggatcatctgggcacgccgcgcgtggtgatcgacccggtgcgcgatgtcgcgatctgggagtggagcaacaagagcgaggtgttcggcaaccagattccgagcgctgatccggatggagatggtgtggcgttcgagctggcgctgcgcttcccggggcagcaggcgacggatgcgagtgggttgttctacaactaccagcgggaatacgacccggcggtggggcggtattcgcagagtgatccgattgggttgacgggagggattggtacgtacctgtatgcttccgggaagcctctttcgaaggtcgatgaaaaggggctggtcgacgtctgggtatggatgccgctcccctatgagggagggctgccgagctatggaaagctgcattcctctttcgggcacatatcgacaacttcaaatggtgtcgattactcatttggccctgcgggcaactcaataagtacaaactacgtttcatctcagcttaatttgcgcactggaattaagcatacaatagaacttacaccgcagcaggagtcaaaactatcggcatgtctcgcgaggccgcagggggagtacagtgcaataaataataactgcgggacgccgttgcagaactgcatgcgggagattggtaaggagcttcagcctgtgaacatgattcttccggaatcaataaaccacctactttggtggatgtctgatgactcaaccattcatcgcgggaaaagatga

SEQ ID NO: 499867 - DNA, 183 bp, Stenotrophomonas maltophilia
atgctgcagcccgccagcattggcaagagcagcaccgctgcacgcaagatggcagccttcggcatagacatgagagccccagaacgggccggccaaatgtcaattaccatctgcaacccgtcccgcaaaacgatccaggaactgtacctcgtgccgaagttgctgcacatgcccatctattga

SEQ ID NO: 499868 - DNA, 435 bp, Stenotrophomonas maltophilia
atgaaagccaggcagattcttcggtacgggctggcctacgcggtgtcgtgtggagcactctggctgttcctgcactttgtgggcagggcgctttacgccttcgactcacatcaggttttcttctggctgtatgccgtcagccttctgttgctgggaattggcgcacgggttcccgccgctggccgcctgacgatcaggcggcttgccaagggggctggcttggggctgctcgcgggccttctggcccaggtcgtggtgcttgtactggaagcctacagattcagcggattcagcccatcgctgctctggcaggtaccggtttcgctgacggtgatgagcgtcgtgctgctcacgccgctctggggcgcagtgctggttgccctcactgccgcttgccgccgcgacaacaacccacatcaggcctcgaacccatga

SEQ ID NO: 499869 - DNA, 450 bp, Stenotrophomonas maltophilia
atgaagcgcctgactgccttttgcctcgtggttgcactgacatcctgtgcggcgcatccgaaccgcaccacgaagtgtccgccggcccatctcacctacgtcggcaccgagagagtcgacggactgacctacgggcgcttccagatcacccacaatgctgatcagccgcttcagctgtgggtggatgagagacgcaggttgaactcaaggaccgctcgcgcagagatgaggcgcacaggcgaggatgcctggcggcctcacaacgtgatccttgaggaaatcacgccgggagcgatcggggtgtcgatcggacagggtgaacagcagagcgtttttttcgacggtgatggcctgttcctgcccggcgcatccagcgcgggcgcgaattactccatcgtggtacaggacgctgccgattgcgaacatcgctcggcaacgttcattccctga

SEQ ID NO: 499870 - DNA, 1425 bp, Stenotrophomonas maltophilia
atggcctctacggcagcagtacaggacggctggatggcgcgcgcagcgctgcgttcggccgcctgggcggaaaagtggttccccgatgcgtatgtgttcgcggtgctgggcgtggtcatcgtcgcgctggccgcgatgggcttcggctcgaccccgcaggccaccgcgagcgccttcggtgacggcttctggagcctgattcccttcaccatgcagatggccttcgtggtcatcggtggctacgccgtggcgacggcgccggtggtcgcacgcttcatcgatttcctcgcccgggtgccgcgtaccggccgcggtgcggtggtgtacgtgggcctggtcagcatgctcgcctcgctgctcagttgggggttctcgctggtgttcggtggcctgctggtgcgtgcgctggcccgtcgtaccgaactgcgcatggactaccgcgccgccggtgcttcggcgtacctcggcctgggtgcggtgtgggcaatggggctcagttcctcggccgcacagctgcaggccaacccggccagcatgccgccggggctggtggagatcaccggcgtgctgccgttcaccgaaaccatcttcctgtggcagtcgatcgcgctgacctcggtgctgatcctggtctcgctgctgatcgcctggctgacggcacccgcggcgggtagtgcgcgtaccgccgaggagttccccggtgctgcacaggccgagccggaaccgctgcagcgacgcacgcgcccgggcgaatggctggaatacagcccgctgctgaccgtgctgctctcgctgctggcgttcggctggctgttcaacgagttcgccaacaagccggtgatcaccgccatcgccaacctcaatacctacaacttcctgttcatctcgttgggcctgctgctgcactggcgcccgcgcagcttcctcaacgcggtggccaaggcggtgccgagtaccaccggcgtgctgatccagttcccgctgtacggcggcatcgcgatgatcctcacccaggccgctggcggtgacgggcagaccctggcgcaccggctgtcgagcctgttcgtgcacgtggccagcaccgattcgttcgcgctggtgatgggcgtctattcggccgtgctgggcttcttcgtgccgtccggtggcggcaagtggatcatcgaggcgccgtacgtgatgcaggccgccaacgaactgaaggcgcacctgggctgggcggtgcaggtctacaacgcggccgaagccctgcccaacctgatcaacccgttctggatgctgccgctgctgggcgtgctgggcctgaaggcacgcgacatcgtgggcttcaccttcatccagctgctggtgcacatcccgctggtgctgggcctgctgtggctgctgggcatgaccctggcgtatgtgccaccggtgatgccatga

SEQ ID NO: 499871 - DNA, 141 bp, Stenotrophomonas maltophilia; identical to SEQ ID NO: 493045

SEQ ID NO: 499872 - DNA, 3093 bp, Stenotrophomonas maltophilia
atggccggccacaccgaatacgcctttgaaaccgccatcgaagccggcctgatcgggacgggcgactacgaaaagcgcacgcctgccgactacgacgaggcgctggcgctgttcccggcggacgccaccggcttcatccgcgacagccagccggcacgctgggaacagttgcaggcgctgctgggcgcgcgtaccgaggccacggtgctggatgcgctgggcaaggaactggacagcaaaggcacgctgcatgtgctgcgccacggcttcaagtgctacggcaagaccttgcggctggcgtacttccgccccaattcggcgatgaatcctgacgcggcggcgcgatacgcccacaaccgcctcaccatcacccggcaagtggccttccaatcggtacagaagcgcccggatggcaagccgcgccgctgcatcatcgacgtgacgctggcagtcaacggcctgccggtggtgacggcggagctgaagaatccgctgaccggccagcgcgccagcgatgccatccaccagtaccagcacgaccgcgatgaacgcgacaaactgttcgccttcaagcagcgcgcgctggtgcatttcgcggtggatccggacgaggcgtggatgagcacccggctcaagggcggggaaacggtgttcctgccgttcaatcgcggtcacgaccatggtgcgggcaacccgcccgtggatggcaactggaagacgcactacctgtgggacgaggtgttgacccgcgatagcctgctcgacatcctgcagcgcttcatgcatctggaggtcaaggaccgccaggtgaagaccgacaagggcgtgcgaaccatccgccgggaaaccatgatcttcccgcgctaccaccagctggatgcggtacgtcggctcgtgacgcacgccgggcagcgaggtgctggccacaactacttgatccagcactcggcagggtccggcaagtccaactccattgcgtggctggcgcatcgactggccagcctgcacgatgcgacggacgagaaggtatttcactcggtggtggtggtgacggatcgccgcgtactggaccagcagttgcagaacaccatctaccagttcgagcacaagacgggcgtagtcgaaaagatcgacgaggatacccggcaactggcgcgcgccttgtccggtggcacgccgatcatcatcagcaccatccagaagttcccgttcattgcccgtgccctttcgcgcctggagcgcgatggcgaggatgtgaagatcgacaccgccggcaagcgcttcgcggtgatcgtggacgaggcacattcctcacaaagtggcgaaactgccatggccttgcgcggcatgttgaaccgcgacggcattgaagccgccatcgctgcccaactttcggacgaggaggacgatgagctggatgaggcaacgcgggcggcgatcctgcgcgaggcgcagaagcgcactcgccagccgaacctgagcttcttcgctttcacggccacgcccaagtacaagaccaaggtgctgtttgacgagccgggaccgtccggcacgtcgcccttccacgaatacagcatgcgccaggccttcgaggaaggcttcatcatggacgtgctcgccaactacaccacctacaagcgcttcttcgggctagtcaaacaggccgaagacgatccggaagtgccacgcaaacaggcggccaaggcgctgacccgctacatggagctgcacccggtcaacatcgagcaggtggtctcggtgatcgtggagcatttccgcctgtatgtgatgcacgagcttggggggcgggccaaggcgatggtggtgaccggttcacggctggcggcggtgaaatacaagcgtgccttcgaccgctacatcaaggaccacaagtacgacggcattcgctcgctggtggccttctcgggcacggtggaagatccggatgacccgggagcttcctataccgaggtctcgatgaacgaagggctggccgaaagcgagttgcccgaagccttcgagcgggatgattaccgcgtgctgctggtggccgagaagtaccagaccggtttcgaccagccgctgctgcagacgatgtacgtggtcaagaagctggccggcgtgcaggcggtgcagactctgtcgcgcctgaatcgcatggcgccaggcaaggcgcgcacttttgtgctcgacttcgtcaacaaggaagaggacatctacaaggcattcaagccgtactaccagaccacgccaattggcgacaatgccgacccacagcgcctgtccgagttgcaacacaagctgctgttgccggccatcttcaccccggccgacgtggatgcctttgcagaagtctggtatcggcctgcgcgcgagcattcgggcagcgatcaccggaagatgaattcgattctggatgcggtggtggggcggttcatcgaacgcgaacagaaggagcaggacgaattccgaggactgttgaccgcctatcgcaacctgtatggcttcctgtcgcaggtcatcccgtaccaggatagtgacctggaaaagctgtatgccttcgtccgcaacctgatcgccaagttgccaccgccagatgatggtgcgccgttcgtcctggatgacgaggttgcgctgcgctatttccgcatgcagcagattaccgaaggttctatcgacctgagcaagggcgaggcgtatccgttgaaggggccgaccgatgttggaacatcgcgggttgccgatgagcccatggtcttgtcgagcctggtggaagcgctgaatgcgcggttcggcaccgacttcaccgaagccgaccagctgttctttgaccagatccgggccacggccgaagccagcgagcagatccgagaggcggccaacgccaacaacttcgaggatttcgcgtcctacctggagcggatcatcgacgagctgttcatcgaccggatggaaggcaacgaggagatcttttccaaggtcatgggcgaccgtgagtttcgttctgcggccagtcgccacttggcgttggacatcttcgagcaccttcgctcggcgcctgccagtgctgatcatgaggggttgccgcattga

SEQ ID NO: 499873 - DNA, 1215 bp, Stenotrophomonas maltophilia
gtgattttcgctgccgacaagcagaagcagcgcctgaaatgggcgttcgaaagctgcaaaaacggagcgtggggaagtgagccggatggcgaggatgacgtgatctgtgtccgcgctgcggatttcgatggtcaatctggacagttgaacgatggggagcggacgttaaggtccatctcctcggaaatattcggcaagatcgcgcttcgtcgtggcgacttggtgatggaaaagtcgggaggtggcgaaaagcaactcgtcggccgaacagtcctctttgacgatgatcgcccgagcgtttgctcgaactttcttgcccgatgccggccagccgatggcatagaccccgcctatctcaactacttgatgttggcgatctatgctggacggggaacttggccgcacatcaaacagagtaccggcatccagaatcttgacttgggcagctatctggatacgcgagtcagtattcctgcattggctatccagaaacgcatcgcccatttcttggacgagaagaccgcacggatcgatgccctgatcgagaagaagcaggtgctgctggagcggctggcggaaaaacgccaggccctgatcacccgcgccgtcaccaagggcctgaattcggatgtaccgatgaagccatcgggtgtggattggctcggtgacatccctacgcattgggatgtcgtcccattaaggcgaatggtcgatctggtgagagggcacgatcttcctcaacaggatcgggttgacggtgacgtggtgattatctcgtcagcaggagaaagcggcacacatgacactgccgctagccaagggccagggatcgtcaccggacgatatggaacgattggtcggttctacctagtggaagggccattctggccactgaatacaacgctctacagtagggctttgaactgcgatccggcttacgggcttcgcatgttagaagcgatggctcaccttttcgtgcttaacgcgatgaagtccgccgttccgggcgttgacagaaatgatctagcttctgagtacacacctaggccgccaaggggcgagcaaagggagatttccgaacacttggagattggtttagaagtgttgggccagtcagagtccctgatcgcttccggtattgagcgcctgagcgagcatcgttcagccctcatcaccgccgccgtcaccggccaactccccgaactcaacgactga

SEQ ID NO: 499874 - DNA, 1059 bp, Stenotrophomonas maltophilia
atgagcaaggaccttgcccccgccgacagcgggcagctggccatctacccggccggcgacggcatccgcgtgctaatgaccggccagacggtctggctcacccagcgccagatcgcggacctgtacgaggtctcggtgcccacggtcaacgagcatctgggcaatgccttcgatgaaggcgagatcgaacctgaacgaaccattcggaaattccgaatcgttcagcaggagggcgcgcggagcgtccgcaggctgctggaccactacagtctggaggccattctggccgtcggctaccgcgtgcgctccccccgtggcaccgagttccgccagtgggccacggcccggttgggcgagtacctggtcaagggcttcgtgctggacgacgagcgtctgaagggcaatgccggccccgtggaccacttcgatgaactgctggcacgcatccgcgagatccgcgccagcgaggcacgggtctaccagcgtatccgcgaaatcttcgccatggccgtggactaccgcgagggcgaacaggccacccagcgtttcttcgccatcatgcagaacaagatgcactacgccgccaccggcctgaccgcagcggagatcgttcgccagcgcgccgatgccagcaagcccaacatgggcgtcaacacctggaaaggcagtcgcgtgctcaagcaggacgtgggcaccgccaagaactacctggatgcgcaggagatcgacaccctgaaccgcatcaccgtgatgttcctcgatcaggccgagtttcgcgccatgcgtcggcaggatatccgcctggccgactgggatggctttctcgacaagttcctgcgcgataccgaactgccggtgctggacaatgccggcaaggtcagcagcagggaagccaaggactgggccgaaggccagtacgatgcctttgccgagcggcggcggttggaggctgagcaggtggcggaggcccagtacttggaagatttgcgcaaggcaactgacggcatgaagtccactatcaaaaaggacacgcagccaaccaggggaggaaaggcgtga

SEQ ID NO: 499875 - DNA, 384 bp, Stenotrophomonas maltophilia
ttgggcgaacgcgaccccgaggcggaaatctgccgtgatgccgcggggaatcctgaaccggacagcgagctgcgcgataccgagaacatcccgctgccggaaggcacggagctgccgctgccaatggccttcgggccggacaagcccaacgatgcactggtcgaagccttccgcgacaccatcgacgactacatggcacgcgaggtactgccgcacgtcccggatgcatgggtggactatgccaagaccaaggtgggctacgagatcccgatcaatcggcacttctatgtctacaagccgccacggccattgccggacatcgaggccgacatccgtcaactggaaggcgaaatcgccgacctgctgaaaggtctgctggcatga

SEQ ID NO: 499876 - DNA, 969 bp, Stenotrophomonas maltophilia
atgatccttccgggcgagggggtcgacgcgctgcagcaacgcctcaccaaggcattcggcagtcggtcccatggaattgagctttcgattgagcgcgacgatgccggcagcttcatgcagctcggcgcgcatgccattgcgctgctgccgaaggcggacttcatatccgcttcgaagactatggctatcaatctttcaactgctcaagcgagcactagcggtctctcaggcatcgttttcgtaattagggggcgcatgggtgcagcatcgaaacgttttgtctcggtgatcaaggctgagcttcatgatggtttcggctcatctgacgacgctgaggatgctgcatttaaatatttgaagaatctagctttaacgccttcgcagcgcttgtataaagtcgggttgctgcttgaagagacgcctgtacctgccaccatccttggtgattatagtcgggcgaattacagaggttttctgtttgatcatctgatcactgctacggagacccgatctgctgcagcttatttctatcaagcattcctcggcatgggaatacaaaagtcttcgaagaagctgacccaggacttttatgaaaatgtcagagcatttatcgcatcttctccattgtctgaggatcagcgttgggagctaaaagaggcgcttcgagtggagctccgcagtacgtcggctgtaataagtgcttcggattttgccgagcagaacatgcctaccgaggaaattcgggattcgttccttgattttatggatgccaggtctttccccaaggccgccgttgcgaaggacgtcgagttcgtaaaatcgaagctgcgtcgtccgcggaagctgagttttacaagtggcgtcaagatcatcattccgccggactctgaaaaatgcgtcgtcgaagttgttgatcagaacgacgagcaggctacggttgtggttcgtggtactttccatgaagagtga

SEQ ID NO: 499877 - DNA, 918 bp, Stenotrophomonas maltophilia
atgaagagtgatctcgacatcggcgatttcatcatcgaaaatcgagccagtctgcaggaatggggagatctgatcgctgctgctatcggggacaaacacggcgattcgttcaaggttcctgccactcctcgcgtgaaagatccggactctgcacgaaagaagcaactgaaaaagcagtacgccaatcccgtggttgatatgactgacttggttggagttcgcttcgtcgtgctcacctctgacgaacttggtccgatcctggagacgatcgaaaccagcgattgctggaatcataagcagacacgtgacccgaacgctgaggccagagagaatccggcgacgttcggttatcaatcgcatcactatgagctgcgacctactaatggagcgcaatggtgctgtgaagtgcaggttcgtacattgcttcagcacactatggctgagctctctcacgacgccatctataagtctcccatcccagtgccgtctcaggctgagagattggtagctcgtagcatcgctctcatggagacgaccgatgagctaatgtgcatggcaatggacacgattcgcactgctcaagctccttttgaagcaatgagaaaagaggctcttgttcaagcgtcttcggttggcggagccggtgcggatttgttggatgacttgttcgatgcctatcccgaatccattacgtttgaagggctagcggagttcagagattttattcgtagccgcagctacattctggaaaggatcgcatcgcgcaaagggcgcggcgtctttgccttcccagcatctacgctgttggtctattggctcgcattcaagcatcctcgtagtacatcgaggcactggccctatccgggctcagttagagatctagaaatgatctactcggatctcggcataggtcgttag

SEQ ID NO: 499878 - DNA, 990 bp, Stenotrophomonas maltophilia
atggcaaaggttcgactctactggcggggtagcaaggcctatctcgactgggcggaaggcggcgagcgctttcgccggtccattgggcaacctgacgcccgtgaggcggagagaatacgtgccgcgaaagaagcagagctgacccatggggtgcggatcttggcgcgcttacctaaggttcgcgactacctggagtggtatctggactggtacgaggccgagcacccgaccaccatctcgaaagccaggagtgaggtgaagcgcttcatcgagcgcttcggccaccggccgatcgacagcatccgagcggtcgaggtggagcagtacaagcgcgctaggctgctggacgacaaggcggcaaaggagactgtggggaaggagattcgacggctgaaggcggcgttcaaccgcggtgtcgaatggaaagagctggacgtgaaccctctggcctccgtgaaggcgcctcgcggcgtgcgaagcgtggcagtcaagttctatgaccgcgcggcgatgcgccggctgtatagggcgaaccctagtcgggcgccgctttggctctttatggcccacaccgggctgcggcggggcgagatcatcggcttggaaaaaagctcggtcgtggccggccgcctcctagtggagagcgatccggacgagaacggcgaaggacggacgaagtcagggaagtggcgggaggttcccctcaaccgctacgccaggtgggcgctacgtcatctgcctgacccgctggttacggtgcacaaggacactgtgtcggactggtttaaaaaagattccgagcacgccggtgttggcgggcacctacataggctacgccacaccttctgcgctcacatggcgatggctggcgtgccattgcgtcgcattcagattcttgcgggacacgcagactatgcgaccactgagaagttctacgcccatctaacccccgatggggatgaaagcgcggttgcgaagctgcacttctaa

SEQ ID NO: 499879 - DNA, 318 bp, Stenotrophomonas maltophilia
atgacccaggaacatatcagccacccggaagggttgccgaactgcaccgccggccaccgcgcgcgccacatccacgacaggcgctgcgcctccgccggcggtggccacatggtcgagtgcgcctgcaggtcgaccagcaagcatgccgatcccgacgcagccatcgcggcatggcgccggctcaaccgtccgccccgcagcgcgcggccactgtctccggcggccgtccccgacaacatcgtgcagttcaacctcagcctcgccgagcaggcgccggcccggaggaaagccgcgggaggcgccaatgggcgccgctga

SEQ ID NO: 499880 - DNA, 501 bp, Stenotrophomonas maltophilia
atgcgccgcctgggcgccgccggcgcacccatctctgccgatcaggttcgcgagtggagcgacaccctcctgcaggagctgtactcgcaaccgcccgtgcgctgggagtaccgcaacaagaacgacgtggggccagggtgctgggtgactgccacccctgagcacttctatcacgccgcgcagcgcggctgggtcgtgcgagccctgtgggaatccccgcgcgtcatccagccggaacgcgaccacgccttcaaggcaggcgtgtgcaccaggtgcggtgatcccgaggactgggcgggccccgattgttccccgctggtcgagaaggtcgacccgcgcactctgctgcccttcgacccgcagtggctggtcgagccgctggaatggctcagggatgcccgtccgaacctcaacccctacgaacgccgcaggagggccgagcaagccgccttgctgctggaaaagctggtcgcccacatcgaggagtgcaagaagccatga

SEQ ID NO: 499881 - DNA, 222 bp, Stenotrophomonas maltophilia
atgaatttcgaacaagtcgacatgctcgaggtgcaacttttcgccgcggggcgccgcttcacggcactgcttaagatcgagtcgtcgagtcgcgtgcatgtcagggaaatctgtctggagagcggggaggtctttcccacccatcacgtcccatactccagtgtggaagaggcaaagaacgccgcacggggaactgttgaggattgggctaatggcacctga

SEQ ID NO: 499882 - DNA, 2115 bp, Stenotrophomonas maltophilia
atggctgacggctcccgcggtttcaacttccccatgccgcagcgctcccgcctgcgccccggcgagatcgtcgtggatctgttcgccggcggtggcggcgcatcggaagggctcaagcaggccctcggcatcgatcccgccctggcctacaaccacgacgagctggccatcggcatgcacgccgccaaccaccccctgacccagcaccaccgcgaggatatctggcacgccgacccgcgcgtggacgtggccggccggcccatcggctggtttcatgcctcgccggactgcacgcacttcagccaggccaagggcggccagccgcgcagccgcaagacccgcgcattgtcgtgggtggtgctgaagtgggttggccagctgctgcgcgctgatcgactgcacgggaccaacaccgcgccgcgcatcatctccatggagaacgtctggcagatccttacctggggcccgctggtggcgaagcgctgcaaggaaaccggccgcgtcatcaagatggatggcacagtggcagcgcgcggcgagcgcgttccggtcgagaaccagcagctggtgccggacaaatgccatagcggccgcacctggcggcagttcgtggccgccctgcgtgcgctgggttacgcagtcgaatggcgcaagttggtggccagcgactacggcgccggcaccagccgcgaacgcccgttcctgctcggccgccgcgacggcgaggcaatcgtgtggccggaggccagccacgggcccgcaccgggccagaagccgcgcgtaaccgctgccgactgcttggacttctccatcccctgcccgtccatcttcacccgcgctcggccgctggccgatgccaccatgcgccgcatcgccaagggcatcatgcgccacgtcatcaactcagccgatcccttcattgtgccggtgacgcaccatggcggcgaatgcggacacgacgtgcgtgatcccatgcgcaccatcaccgctgcccaccgcggtgagctgatgctggcagcgccggaactagcccccttcatcgccgagcatgcgaacagcagccatgccctcggctctatgcgcgccgacgagccgctgcgcacggtctgcgccggggtgaagggtggccacttctcggtggtatctccgacgcttgtccagaccggctacggcgagcgcgagggcaaggccccgcgtgcactggacctgcagcagccgctgggcacgatcgtcgcgggcggtgtgaagcacgctgtggccgcgccgcacctggtgaagttccgaggcgacagcatcggcacggccgccaccgagccggtgccgacgataacttctggtgctggtgccgcacgcccggccggtgccgcgcatgcccttggcgtctccaccgctttcatggtccaggccgcgcacggtgaaggtcggccagacggccccaagcgctggggcaccggtagtaaggacacgcgcgtaccggtgggaaccgtgaccgccagcggcagcggcgggcacgcagtggctacagccttcctcgaacaggccaatggtggcttctaccagggcgcgggcaacgatacgcgagatccggtaagcaccatcactgccagcggtagtcagcaacgcctggtcaccgcccacctggtgaccaacaccagtgcgcactgcggcgcaggcggtgcaggtcaagtgccaaccatcaccagcgccggcaatcagacgttggttgaatgcaccctcagtcctgagcaggaagccggcgccctgcgcgtcgcagcgttcctggtgaagtactacggcagcggcatcgctgtggatttgcacgaccccgtggacacggtgaccaccaaggatcgcctggcactggtgaccgtccacatccagggcacaccctacgtgatcgtggatatcggcctgcgcatgctcaagccgcacgagctgtaccgcgcccaaggattcccacccggatacatcatcgatcgcacggccaacggcacgccgctcagcaccagcgccgccgtccgcatggtaggcaacagtgtaagcccgccgccgctacgcgccttggccgaggccaatctggaccgtgtgcaggccggtatcgcggaggcagcatga

SEQ ID NO: 499883 - DNA, 204 bp, Stenotrophomonas maltophilia
atgggtaagggcatgcctatcgggctgtgctgcgtctgcgatgagccgctcgacctcgccgatgccggtgtctgcaagacctgcggcaacggcttctgctggaacgactgcggcgagtggcaccgcggcgaacacacctgctccacctgcatggacgccgatgacggcgaccaggaagacgacgaggaagataccaatggctga

SEQ ID NO: 499884 - DNA, 822 bp, Stenotrophomonas maltophilia
atgagtgagttgtgccccatcctgcctaacagcaccagaatgcctagcgtgcgttcttgcctcctagtggttgaccagttggagtcgagccatagccttctcacactcgccacatacggcggtcagatcagcgacggccagtctcagtgtgacaaaaacagtccggtggaagtgcagcaattcctcttccgactcttggccattcaaaatcctgcaatcagcctgaacagtttccaccacgcccttgatcctgagcatccgagccgctgttggacggtcaacgtagtgcagacgtccagtgatctccccaaggatcggcaacgacagcttttcagccgccgcaagaaatgcgtctcgatattccttgtccgtcgcaaacgccattccacccaagctgtcgtggttcaaaccagccaaaatgcgctcaacttttatgcgcacgttgaccaactcaggggccacctggaccaacaccagaagttgctctgtgtcctccttgtagcttgtccgttcggcttgcactccagcaatgcgcgtagcctcttggcttgctcggttggcggctatcccaagcctccaaaccgcgtatgcagaggcggaagtcacgcctattcctacccacgcaacaccgatagccgttatgccagtgagaactgcggcgagcgctccgatcgcgctccacgcttcccaccagatatggcaatcgtgcgcgatgggccagcactgactaacgccatccaacatgctcattccctgatccccctgtggactgtccggcattctgccatggccccgctgcacacggagcgggcccatgggtaa

SEQ ID NO: 499885 - DNA, 213 bp, Stenotrophomonas maltophilia
gtgagtaaccagctcgacatcttcgatcacgacccggcccgcatggcagcggccaaccgcgcagccgccgagcacgcactgcacgacgtgcagttcaccgccaccgtccgacaggaacgccacgagttctacctgggcgaagccgaacgctgggaacacctcgccgcgcacagcgcgcgcaccaccaacaaaaggacatgcaggtatgagtga

SEQ ID NO: 499886 - DNA, 708 bp, Stenotrophomonas maltophilia
atgagctggtggaagggggttagtacgtgcccagagttgggtatcgacggctgcgtcgtttggtgggatggatgggcggttgtcgtcgccgtcgtcgcggtttttgcgaccatctttctcggcgtagctacgctttggctggggcggcaggcgaatcgtcttggagatcaagccaatgcgctttcccagatggcattcaattctcagcgcgaagctgagaaggtaaggcaggacgccgagcgcgatctccgcaatcgtgagaaagcagttgctttggcctactgcaacgtggaacttaaggagctgcagctgcggacgatggtgatatatgcgtttatggggctgggagcagatttctgcgaagatgctttcgttggaagcatcagtacacgcgagcttctcagtaagaacgcgaagaatctcaagactgatcgacttcggtctcttctgggtaggttgcacgctctgcccgaggaggaaggcgtggacctggctcgcttgcttggcatctgcgcaagtgttcaggaccaactggccctggcggcgaaatctcgcctggagccctccgatgaagtcgggttgcggcgccttcgagagacacattcgcggcagcgggcatctttgaagcgtgcaaatgagatcgccaaaaagtactcggatatggcagccgaagccattggagaacatgctgctagtcctggacgctga

SEQ ID NO: 499887 - DNA, 1206 bp, Stenotrophomonas maltophilia
atgctgctagtcctggacgctgaagtggttgccggcttgtggaaatctcgccgactgcgccggccgggcggttgctcggtgcgtgtcgtcggcgggcagcggtgttcgtgctttctctgccgagcgctgccgcatctcctcgcagaacgcgggccatccgggcggcgccgcagcacaggtgatctcagtacctggcattggctgtggttatcgcgatcgcgatggaattgccgaccttttttcttaccaagcgattgggatagcatcgacttggctttcgagggaaagaagcctcgatcgccgatcggtctaacatgcagatggacaatgcttttgaaatacgctcttgctgggatgcttggatttgttggcttaggcgctcttgtcgcagacgtgaatgctgccgctgtccgatgcgacacctgtcgaattgatggtgactatcgcgctgaggccgttcgtcaagggcccgggactcacctgatttttaatgttactgacaaccagattcagcagtactacgttggtacaagctccggtggcggcggtggtggcattgagccgagagccgcaggacctctggttgtgcgggagactccaccggcgggtgccgttgaagaggtgaaccgagctcatcgcgtacaagtcgttggtggtggcacacttcgtcccacgttcatcgtgccaatcgcgacgctcggcctcaatccgagcgcaagtgctatgacggcttacgagtacgtatcggactacaacctccgtgcaatggtcgaaattgcgacgggtagcacggatgtcatttccaaggtggtcggaaccgacgttttcacggcaatggccgacctactccagcacgttacgaactacacaggcctgcgcgatcaagcgaggatcataatgaaggtcgtgtttaaggacggctcctcggttgttgtcgtcgtcaacctcgagcatcagaatggacagtccgaagtcggtagtgagcgtaccgccgcagggcagttgattccgaccgatattcagcaggtgaatggtacttggactgactacggcggagagaatcttgcaaggatggtcacccatcttcaaggtctcggtgcaacgatgtcggcatctggcccgtcgtcgaccggtagtgtcaaggcaattacctgtagtggcgccggggtcgctaaggtttgcaacgtcgaatatatgatccgctga

SEQ ID NO: 499888 - DNA, 1128 bp, Stenotrophomonas maltophilia
atgccgctgcataccgaacgcttgatcctgcgcccctggcgcgacaccgacgccgtcgacctgtacgaatacgcccgcgacctgcgcgtcgggtccatcgccggatggccagcccacaccagcgtcgaggaaagtggcgagatcatccgcaccgtgttcaaccggccggaggtctatgccctgcagagccgcgaagatggccgcgccatcggctgcgtcggcatcctgatcggtgccgacagcaacttcgagatcggcgaacgcgaaggcgagatcgcctactggatcggcgtaccgtactgggggcgcggcctggtgcccgaagcagtgcgcgaagtgatgcggcacgccttcctcggcctgcgcctggacgcactgtggtgcggctacttcgccgacaacctgcagtccctgagcgtacagagcaaatgcggtttccagcatcaccacaccgaagtgaacaagttcaacagcttcctcggcgacaccacaccgaacacatcagccgcatcacccgcgagcaatggcaggcgcaacaggcttccgtgctgcgcgcgtgatcaccactcagccggcacggtgctgcatgaacagcagttccggcgtcgaagcgtcttccatcggctgaaagcccaggtcgcggtacagggtcaccgccgcgacgttgtcacgatagacacgcaaggtcagccgctccgccccgggcgactgcaacgcctgcgccatcagcgcctgcatcagtacacgtcccagtccacgcccgcgtgcccgcggcgaaacgatgatgcggcccaggtgcagcgtgccggaggtcgttggccagtactggccgaaaccaaggcagtggccatgcgcatccagcagcacccaacccgggcgctgctgcagttgcagtgcgtgcgcgaatgcatcggccgcgagcggatacagcactccaggaccggcccagcgctgggttgcgctggccgaatccagccacgcaccgatgacggcgtagtgcgggggctgcacggggcgaaggtactcactcatggcgtgcgcgcaaggaaggatggccgccatggtgcgcgatcccggtggccgaatcacgttgcacggcagcgcttgaattttgtcccagggcaataa

SEQ ID NO: 499889 - DNA, 1443 bp, Stenotrophomonas maltophilia
atgggcgtggcactctctcaggcattcgaagcgatacgccagggggacgcggtggatctgaagaaagcactggaagcggcgcgtgctgctgggcgcagggatctgatcatcaaaggcatgaccctgcgcaacggaacacatgttgctgaggctcagctggaaacactccaggacgtggagatgctggagcggctgatggggcaggtggcggagaaggatccgctggctgctgcggtgtctggctacctgcctcaggtgcccaagttggctacggtcccgtcaggaccactgctctccgcctgcatcgacaagcatctggccagcttgggaaagctggcgccgaagaccatcatcgaaagtcggcacagcctgcgaattctgttgggccttgttggggacattcctgtttccacactggacgctgaccacgtgcaggccttcatggacgcggtggagcattggcctagaaacgcaaccaagcacaagctgtatcgcgacctcagtgtcctggaggttctcgcgctctccaaacgcaacggcgaaaaggcaccggccagtgccacgctcagcaagcattgggacagattgagggtgttcatttcgcacctgcgcaaacagcggcttctacagcttgacccgatggagggcatcgcctcaccgtcggaacggcgaggagtggaggagccggaaacgggtcgcccgttcactcatgacgaactgaaagcagtgttcggatcgggtttcttgcgctgggcctcgaagtatccgcatcgcttctgggggccgatattgggtctatacagcggcgcgcgcgtgaacgaagtggcgcagctgcgcgcagcagatgtgatgcatgtgaatggggttgccggcttcctggtcacaactctgggagaaggaaacaaggtcaagaacacgagctcacttcggttcgttccattggcgcaaccggtgttggatgcaggtttcctccatttcgtagatgaggtgcgagcgtccggcgtggatcgcctttttccggaccttcccaacagcacaggattgggctttgggcgtcagctgtcacggcagttttcgacctacatcaagcggcaaggcatcaccgaagagggcatgggatttcatgcctttaggcactacttcattacccacatggatcgagcgctgttggccaccggcatggaggtcggcgcccgggacgtggccattggccgcatcaccggacatggcaaaccgcccaaatcggtcttgcggaaagtctacgtggacaacagtgggttggccgtgccggcagcagttcagccagagactttgcctctgcgagtggagacgctggcaatgttcaatccgccggtgaccttgccgttgcacgtcccgggtcaatttgcggacaacttgaaacgagttgccgcagaggcgaggcgaaccgcacgtggggcatag

SEQ ID NO: 499890 - DNA, 1311 bp, Stenotrophomonas maltophilia
atgccatcaaggattagaaaggggaagccagtgagaactcatgaggtatttggaatccagcctgaggttcgagagaactcttatgttgacagaggatcccttgacactgagttcaagaaattgctggatcggcgtcagacacacattgcaatccgtggcgcatcaaaatcgggcaagtcatggctccgccagcgcatcctcgataacccgatcattgttcaatgccgtatctcctacggtgtgacagacatctatagagatgcacttgctcggcttgatatcaagctcgaggttgagcgcggaactgaaagcaactgggggggcaagataactgccgctggcgaagccggcttcaagctcattgccaaggtggaaggtggcgcggaaggctcttatgaccggacaaattctagaactgaaaagacggtcggaaaagacatacatgaccttgaattcattgccgcgttgatcagggaatcaggaagaacgttagtcatcgaggacttccactaccttccaacaaaagtccaatccgagttttcattcgatctgaagacgctttgggactatcgaacctttgttgttgtggttggagtttggatcagcgagaacatgctaatcacccttaaccccgacctatctgatcgaattgaagagctttcggtgacgtggtctgaagcagagctcggctcggtgttcgtcaaaggatgctcggttctcaacttgcatcccgatgatgcagtcaccgccaagctcgcatcgatttcctatgagagcgttgggttattgcagaagctggcacttcgctatttggatgacgaactcggaatttctgagggcggccctcactcagttgccattgacatccaggatctaaggaaaattgatgatgcagccatgcacgtctccgagcaactcaatcagctctatcagacatttgcgaggcgcgtttgcgacggaattagaagcaggaccaatgccacaggcatctacgcacacgccatggcggcaatcatggcggcgtcagataaggaactttccactggcatatcagcaaaatctgttcatgcggtagcccatcagcggcagcccagagttcaactgagcaacctaaagctggtgctaagcaagttcccggaacttcaagtagacgatcaaggcagaggcttggtgatctcgtatgacccacaaggtgaaatggtcagcgtagtagacaggcagcttcttctctatcgccgatttgctaccgtcagatggccatgggaagagttgattgaggaagtatcctccggcgagaaagcatttgaatag

SEQ ID NO: 499891 - DNA, 324 bp, Stenotrophomonas maltophilia
atgaagatcgtccgcaccgtgctgatttccgccatcgctgcattgggcctggccgcctgtggcagcaaccggccgtccgtcgaagaagcccaagctgcaattggagccaccttcacccaagtctccagcggatcgatgacagtgaccggttaccgggacttcaagctttcggattgccgagacgcggccccggccgatggggtcgtttgcgacttggcaggcgaggtggtcctgaatatctcgggcaccgaactggtgcgtcccatcattgagccggtccgtttcagcaaggccaatggcatttggacggcgcacaggccctga

SEQ ID NO: 499892 - DNA, 243 bp, Stenotrophomonas maltophilia
atgggactggataagaagctggcgagtagccgggtcaaccgttacgagaacgagaccagtggcattgacctcgacggattgggcaaattggccgaagtgctcggggtgccgatggcctaccttgtggccgaagacgagaccgttgctgaggcaatcttggctttagctgagatgccccccaaggaaagaaaagaggcagttctgacccttcttggcacaatcgctggcaagccgactcgctaa

SEQ ID NO: 499893 - DNA, 888 bp, Stenotrophomonas maltophilia
atgcgggaaaagatcgctgcatggaagaatgccttagatggcgatgctaattctgttagccaagcgctatcgcatttggcatggaatatcgctgctttttcctctatcggcgaagctatacgtgaagctcccgagacggagggggggaagaagatcaatggagtgatgatcgacttgctggttgaaggcttttggggctcgaccatgcaggcaattcgacgactggtggacaaagcgcaccccctatatggtcgcaacggagtgtgctccttgggggcaatccttagtgatgttcgtgcagttcgaaatcgcatcacgcgccgggtgtatgttgagcaaatcgcggagcttccttacaactacgaagaagtccgtaggcgccatgaagaatatgcgtggcaacagggtcctggtgctttttgggtgccccgggagtttcactatgagatttctgagcaacggcacgctgagttcgattggctgagtggaacaacccctggaacgagttccgacgcggatgtcattcaggagggcatctttgatcgactggatgcacgtttggcacgtctagatcgcgttgttgagcatgccacgctgcattacgcccatgcggccacggaggcaagcaggaatgggcgcgtcctagaccaatgggggctcgatgacgcaaaagctgcgctgaaggaactatacgaggtagccgaattgattggcagatggttttgcttctcaggtgttggaatgctgttgccaacgcctcagttcgatcagtttgagcatctggatcaaccattgcttcaaggctcaagagcgtcgcttgatgcactatggaacgccttcgatgaagaaactcaacgttggtatcagatcaacaacgaagatctctaa

SEQ ID NO: 499894 - DNA, 1698 bp, Stenotrophomonas maltophilia
gtggcgatctacagcgttcaagtgaaaagtctcagccgtgggaagggcgacagtgcgaccgctgccgccgcttaccgggctggtctcgacctggacgatcccagcggcgcacgccacagctacagccgcaaaaccggtgtgctttccgtggacatgctggcccccaccaacgcgccggcgtgggcattggatccgcaccaactctggtccaaggttgaagaacacgagacacggaagaacgcgcgtgtcgcgcgcgaggtgctgatggctctgccccacgaactcacccccgaacaacgccgggggctggctcgggaggttggccaactgttggtggaacgttacggcgtggccgtgcagatcgctctacacgccccggacaagggaggcgatgagcggaactaccacgcgcacatcctcatgacccctcgccaagtgggtccgaccgggcttggcgacagcgcggccaggatcttggacgagttcaaggcaggtgctcaggagctgaaagcactgcgggccttgatcggtgagcgcatcaacgatgccctgagcgctgcctgccaatcggcacgcgtggaccaccgcagcctgcgcgaccagcaaggcagcgccatcgaaacgggcgatttctgcgccgccgccaagctggaccgtctgccctcccagcacgaaggcaaggcggtcacccaagcccgccgaaggggggagcgcctccctcgtgcaaagcgcaacgatcgcttgaagacggcgggggaacggcggttcaaccagcactcccgtcgcttcgaggaaatcaaagccaaggccgccgccgaaggccgattggcagccgtggacgaacaagccctgcatgcgcgcgccttggttgaacgccgcaaggcaggggctcagcggttgcaggctgggaccgaagcccttctggttccaaacacccccaaagccaatggcgccgttccagcacgtgaggtccgtcccgcttccctccaacccggttcctcagtgcccaaaaggaccactcgggtggtcggtcatcgggggaaagaggcagcgcccaaactgcctccgcaagtccacacccgggtcaccggtaatggaacgagggaaagcgaacaagcggcccacctggccaacctatggctggcccaggtggaaaaagacgtggccgatctgatccggcgtgccttggcttgggctcagaaccatgctgatcccttgccccgctcgctggcccgggactacctctctgctgagggagaagcccagttggccctcgtcgtacgaaaccaggcggcggctgacctcaagcaggcccgacgggcccggcacgatgcccgctactaccgcgatcgaggcgaaacagggctgaagggcaaagacaagctcgcccagcgcctgggctggacgcccaagaccctgcgggacctgcaagacgcggtgaaactgaccgaagagcaggtgggctgctccaagcaagccgagcacttggcggtcaccgctcaggaagccgctgtcatcgaagcaaaacgcctacagcagcggttactggacaggttcctgagggcagatccggaagagaatttccgcttttccaaacaacggccagcgtcttcagaaccagtccctgaaaagcggcatgtggttcactcaacactcaatccaccgaagtcaacatcgttccgccccccgcgcccctga

SEQ ID NO: 499895 - DNA, 381 bp, Stenotrophomonas maltophilia
atggatcaacgaagcaagagcaagcgtgctgtgggaaacgttgaaaagcagaaactgaagttggagcggatggtcggagcgctggccaaggagcaagccaagctgctgctcgtcgagcgcgaagagcaacgcaagcgccggcgtgcagaactgaagcaacgcgaagcggatcgccgtgccgatgcccaccggaagatcgaactgggtggtctggtaatcgctgccggggtggacagttgggatccggcagaagttgtcggaggattgttggttgtgagcgagcagctgttgctacaaccgacccgacgaaatgccctgcgcgagaaaggcattgcccatttggaggcgagggctgccactcgaagggcagggcaatcatga

SEQ ID NO: 499896 - DNA, 222 bp, Stenotrophomonas maltophilia
atgggcaagaatcagcacgtggtgaagcggccggatggctgggcggtgcgtggcgaaggcaactcgcgcgatacctctcaccaccggacccaggaagaggcaaggcagcatgcgcgtgagatcgccatcaaccagcgcagcgaagtggtgatccacgaccgtcagggccttatccgggacaaggacagttacgggaacgacccaaatcctcctaagggttga

SEQ ID NO: 499897 - DNA, 1338 bp, Stenotrophomonas maltophilia
atgccttacagtggcgggacaaggttgcccttcgagtcggcctccaagttgggccatctatcggtggttcagagcacgtgggtgaaggagctggtcagcgatttcgagcaagcgaaagcaccagcaacggataactctggaactttatggcagaccatcgacactcagggtgtactgcccttgcggagcgtctgggcagtagatggctcgttcgttgcggtgcgatcagaagggaagccgcccaaggaagtcgcgttcgtcaagaccgcgctcttgctggtcgatcgagtcaagattgatgcgatcgacaaggagaatccgcacccgcttctgctgcaggatgttctcaggggcagtgcgatctatcattccactgtgtttccgctcaagaacgtgcgcaccacgctgggaagcaactacgacgctgtccgtcacattgtccgagactcgttcaaaatcgatcagggtggtgcgttcttcgacactcttaagtggctggtctacaaaaagtggtccgatggcacttcgtcgtccccttccttcgaatgcccgcattgccataccttgatcgatggcttgcctcacgatgccgacgaaggtacttgtgatcattgcaagcaggtcgtctttgtgtcggatctgattggcttccatctcgacatggatgaggacagtgcgccagactcggtcgcgtcgtcctacatgctcgtcatggagcatctgatgctttttaccgccattcgggtcgcatggggacacaccgacaagtcgttggtcggcgagactctatttataaaggacggcccattatcgctccgtagccaatattccaagctcgtccccaacatccgcgagtttctttccttcgccgtgaatcaaggcagggctgtgcacatcatcggacaggaaaagagcggtgccttcgtcgatcacttgcagtcaatcgtgcacttcgctgctccgcacgagcggggagagcggggtagctatgccgcgttggatcacaattatgttcgtcgcgaggtctatcgctcgccagatttgtctaatccctatggtaagcgtacaaattggggggagaagctattcgtcaagttggacccgggaatgtccatggtcctgaatgttccaacgggagactacattgatgctggagaccgaccggtcccccaggacttgatcgggtttaagcgaatcttggctactctgccatcgatagtcagccataaatttgagggggcacttttccccgttgagctcgccaatggcatcgcgtctatgtcgagctacccgtcagctgcaatcctggcgaagttcttggaagaccagtcaccctaa

SEQ ID NO: 499898 - DNA, 1986 bp, Stenotrophomonas maltophilia
atgtccacgcttggaagcttgatgcagacctcggcaacgcaaggcaatccgatcgatgctttgcgaagctttcttgatgccgaggcaaataatgaagctgcaaagctagtaagcaaaatgcgctttgtggggtacgtacttgaattgggctttgactccgcaaagatcatcaccagcgacccttacaagctggcggtcgggggcattccgcgaggttcgtttctgatcatgacgccggtgaatgctacctcagcaccggcgcattttaccctccttcgcgtcacgggcgtatcgcccacaccccttagtagtcaggttcagcagacgtatttcgaactgcacaagaagtctatgcctgaactggacgtgtggacgcaaagcgaattgcagtggggtgcgctggactgcgacgtgttgggcatgttctatgccgatcccgctgcgatgcagcggctagcctattcgggtgatgtgaacaatgtggtgagcgcccatcgctacaaggttttctctcctgacgatgcgctgttgaagctgattgtcaatggcatggtcaagccagagagccagatcgagatcggcgcgctaaggacaatggagtgcggcctgtccagcgcaagcaccagccgcatccctgtttcaatctcgatgagagatttcaagggctgccggactgcgatgttcggcaagacccggcttggtaaatccaatgtggtcaagctcattgctaagggcatgcttgatgcaacggcagaagataagtcggttggtcagctgatcttcgatgtgaacggggagtatgccaacgacaatcctcaggatgggaacaaatccattcgctcggctaatgcggatcgatgtgaagtctatgctctgactacccgcccggagacgccatccaagccgttgcgactgaatttctacgaacagaccgactccgctatccaaattcttggctcgatgctggagcaggataacaatacggcgcactacgttaagagttttaccagtgcgacactgccctccattgaagggatcaaatcgctccctgaagaagataaggttcggccgatccggaaaatccagatgttctgggcaattctgaggaaggctggctttgatattgacgagaagcggctacgagcacttggactgatatctcgtgttgccaaacactttgatccgcattttagcatggaactccggtcggcagcctattcggccactggtgcaggaacgcctccctcatcgatcgattccattgaccttctcaagacagagcttgaggtaattgctcagtttcgccgtgacaatccgtccgatccggtgcttacgtctaagaaatcgaagaaagccacgttcgatccagacgacattgcgttgctggactttctcagtcctgcagcggggcgtacaggtccaggtatgctgcgagcctacaaggcttttcactcgccgcatgctggcgactttatcaatgagatcctagccctactggataacgggcttacggttatcctcgaccttggcaatgcgacagatgaaatacggcgctattttgctgacatgctgtccaaggctgtattcgcgcaccaagagcgcaagtttgtcagcaataccttgggtgggtattttgtgcagctgtacttcgaggaggctcataacctatttcctccggatgcgcgagacctaacaggcgtctacgctcgttttgccaaggagggtgcgaagttccacattggcatggtgtattcgacccagtcgccctccacgatcaacaaggacctgttggctcagacagagaacttctttgtcggccatctctccagtcaagatgaggcgcgtgcgttgggtcgggtgcagatcgcctttgaaggcatcgagcaggatattcttaggtccaagaccccagggtatatgcgcatgttgacgatgtcgcaccggttcgtcattcctgtgcaggcaaacaagttcgaggcgatctga

SEQ ID NO: 499899 - DNA, 864 bp, Stenotrophomonas maltophilia
gtggctatagggagcgaattggggaacatggagccagtagattgcgccacggaagcgctcagtccattcctgaagtgggctggaggtaagcgctggtttgtccggcatcatggaggcttatttcctgctacctacaaccggtatttcgaaccctttctgggcggcggagccgtctacttccacctgcgcccgcagcgtgcagtgctcaatgatgtgaaccccgaagtgatcgctgcgtatagggccatcaaagagcattggattggtcttaagaagagcttggcctaccatcagcgctatcacgatgcagacgatggctattattatgccgtccgcggacgagcgcccaaaaccttggtgcagcaggcatcgaggatgatctatctcaacaggacctgctttaacggtatctaccgtgtcaaccgccagggcgagttcaatgtgccgcggggcagtaaggatagcgtcctgatggacaccgacgacttcaagtcgatggccgccttgctagccacggccgatcttcgggtgggggatttcgaaagagtcattgatgaagccggtgaggatgatcttgtttttgcggatccgccatacaccgtgcggcataacctcaatggctttataaaatataacgaaatcctgttttcctgggctgatcaagagcgattggcgagggcgctcaagcgcgcggctgcgcgcggggcgaaggtcgtggccaccaatgccaatcatcactctgtccgctcgctttacgaaagctgggatttcctaacgcgctcggcaagccggttttcgcaaatctcagctgacggcgcaagtcgaaagcaatttgaagagctcatcattacctgcaatatttga

SEQ ID NO: 499900 - DNA, 837 bp, Stenotrophomonas maltophilia
atgaatttcatccatcaaagtttgatgctactggaagacgctggaatgtttgtcggatatccagacattcactggctagaacagagcggaatgcagttgtctcatatttctgctctacagggaaatcgaattagcatcgaacagaaccagcacctgaagctcctaatgatcttttcccttcttgatttccatgttgataccatgcaccccgacatggaaggcaagtcatatcgccagaaatatttggatctgccggtcaacggggattacgaccgaatgctgcgtgaactgttcagagtggcaaaggtgatgcggaatgcactcgtccacaatccgtcatccttcaccatcgccaacaatcaggtagccatcaactacacccacggaaaaaccaatttccgcttgaacatgtcattgagatccctagccatgttccacacctccatcgttatgtatataagggccgatatgggccggggaaactacttcctcggcatcatgcgctcgatctactcggacgtgcgtcttggcatcaagaacttcaatgatgatctcggcgataagctggaggcaccgccccccggccttaaattgaagtggcgtactagatatgttcactccaacgcccggcaccaaatcagcgatggacgtattcacatccttcctcccaagagagagctacaggaatgggaagggttggatctccacattgcgctaaatgaagatgatttcctgatcccgcaagaggcactagaccaggatctgtcgataagtgaactcgaagtcatcaacaactggaagcgagaaggccacttcccagcgttaaagcgcccctaa

SEQ ID NO: 499901 - DNA, 3312 bp, Stenotrophomonas maltophilia
atgtttgaccccgcaacaattagcctaataaaagcggctccaccgctcagctctcttgatctagaggagttaccccgccgcttcaccaacgcatttgcagagatcgttgccgctcgcgttcggctccgggggcttcgcgatgtggaggatcggagtgaagttctgatcgcgctgctggatcagatgcgtcggctggcagccactcaagaactgcttgttgctaccgcgccagagcgttctgaccgtactgcagcggcgttcgttgccggaaccgcgcaccagctgtgcttgatggccgaggttgtttctgagagcagtgagaaacgggcgcccttcatcgacgctgttcgcgtatcgccagagatctgtagcaccctgctgttcttgatcgctgactcgcaaagcgacgctgccgaactggcaagacgtctaaccgttgttggagaaaatcgttcagccgaggcgcagttgatcagggctatcggtgatctggcggcgggccgactcgaatcgatcattggaggagctgacgggccgcgctatgaacgtccatccgatcagagtgggatgggtctagctgtggacgctttgctgcggcggctacatgtaggagtggtcgagctcgcacggggattgctcagccgacccgcgaatggggccaaacctggagtggtttccagggctcgaaagatctttaccgaggttattgatctgtgcatagcgcctgttgatggcatctttgatgctggcggggcgagcgcaatcagtgtcttcccaggtccacttcatgtagctaaattgctgttcgctctttcaggtgatctcggtgctgctagcctctgcagagtgccagcaccccatgggctcgacgaggatcaatggtggggggttgttcggcgagccgctagcaagcgtccgtatctttggccaaatcaccgcgctgcgctcgaccaagggtatctcacaaagggcgtgtctgccgcagtcagctttccgaccggcggggggaaatccacgctcgctgagctcaaaatcgccacgtctcttctcgatggtgggaaggccgtggtccttgcgccgaccttggcgctcgtcgatcagatagcctccacacttcagcgagcatttggtgaccacagtgtcattggcgatcttgatgaggaggttgatttctctgcagtgatcgagctgccagagatcatcgtcactacgcccgaacgatgtctcatgctgcaatcgctgcagccggatgcgttcaaggacgtcggattggtgatgttcgacgagtgccatcttctgcaccccagggaggcagatcgaagtcgccgcagtatcgactcgatgctttgtctgctaaatctcactcagctggcgccggatgccgatcttctgctgatttcggcgatgatgcagaatgcagcagagatcgcgggttgggttgccgacctgactggacgcccgtgcctgcctcttgatttggcatggaagccaacccggcaggcccgaggatgcgtggcctacagcgaagagcgaattgccgagctcaacgagttgcttcaagacaaccaggctgtagccaccactgttggggtgccggcgaaggtgaagtcggagcttaacgcggcgccacttgcattcttctgtcttcgacagacatgggaaacgcgcaagcgtagcgactatgcgctgatggctctgctggacgaacctatcggttttgcgacgggggttaataaatggaagaaggaatggtatctaacgccaaacggcaacaaggttgctgggacgatcgccgcagcggctgcggaggatgggctgaaaacgctgatcttcgtgcagagtacagttgctgccgagtccaccgtccggcactttcgagagttgctgcctgagcgccgcgtttcgctcactgatgcagagaatgtgttgaggaggctggttgaggaagagatgggtggaccgcagtattgctacctgaagctcgacgcggatgggcaagtggtgggaggtgctgccagccaccacgcacagctgataaagaatgagcggctcctacatgaatctttgttcaagcggcgggatggcattagcgcactctttgctacttctactcttgcccaagggatgaatcttcccagcgatatcgtgctgatcgccggcgacagtcgatgggatgttgatggcgacaaaatgaagcagcttgatgctcacgaattactcaacgcggccgggagggccgggcgagctggtgagggtagccaaggctttgtgcttgttgtgccgagcaaaatcatcagtattgatgataagaagagcaacatcacgagccattggatgactcttcagggaattttctcccaatcagatcagtgtctagtgattgacgatccattaacggaactgctggatcggattcattccggagtgcacgaaggaaatgaagagtatctactttctcggctgcctgttggttacgaggaggcttcagacgatccggcgagggtaatgattcagcggagctttggcgcatatcgtaagcgccaggcgggaaaggctgaatggatcgaaagccggattgcgtcagcattggctcggcgagctgaactatctcctaagcaggaccttacttggctagagcgtgtcgcagcgtcttctgggctctcatacgatatcgtggcgagcttggcagaattcctcgaagctcgtgaagaatttcctgagacttcgttcggctgcatggagatgctcttcgactggatcgaaaatagtcccgaatggctgctgcagttgattcggccgaatgatgtcgaggggctgtttggaggtgagtaccgtcggctcaaagacgacaaaaagaagggcgagctggctctcccaaaaatcaaactacttcttggagcgtggatgtcaggcaagcctctatgcgatcttgagcgagcgatcggaactgcagagagttccatcaagacatgcgagacagcgcggcatttcgctgtccgcttggcagcggacttggcctttgtagccggtctccctgctcggatactagccgccaaagctctggctgcaggtgaggagccctcaatcccgattactttcttgacgctaagtggggtggttcggaaggggtgcgcgagtccagagcttctggcgaatttaattcacttgaagggtgcctcacgtccggccgcgcttgcagcctttgcgcaggtgcagctgcatctccgcccaggaagcgcgttcgagagctttgagaatgtgcggaagcgagtgcggagggcatataggctctcggagttggatcagctttag

SEQ ID NO: 499902 - DNA, 801 bp, Stenotrophomonas maltophilia
atgccattgacgctcacgccagtgacgcacgggaagctctgccacggttcccgatgggtaatttctgatgaagatgatcttgcaagtaaggttgcgcacatcgcactcgggcggtcgcgtcacgtggtagcgattctcgccaagatagataagaagaagcctgctacccgcgtagatacggcgaaagatgcgatcaagcttctaaccgtggaaaaggggagtaagccctaccatcgtgatggctggatctttcaagcaatttcctggatcgccgctcaccgaaatgaagctggagctgtagtccgtattcctcatggaatccttgcgcacaagggtttcgatggcatgcagctgcgactcgatacgaatgaagagaatgtcgtcgcagtcgtcatcttcgaggacaaggctacgaaaaatccaagaagtaaggtttctggtgatgtatggaatggctttcgggcattggagcgaggcgagcgtatgcctgaactcattcaggaaaccggagcaatattggaagcgcatcagctgcgttttccaaacctggatattgatgacgcggtagagaccatcctatgggagcaggcgcggcactaccgggtcgccgtcaccgttgacggcgcttgtgacgatgataccgagcggaaagctctcttcaaggggttcgatgaagtggcgcccggggcgcgtaagcgccgacaggctgaaacgatgtctatcccagatcttcgaaagtggatggataagttcgctgccaagactgtcaagaagatcgaggcctggagagacgatgtttga

SEQ ID NO: 499903 - DNA, 420 bp, Stenotrophomonas maltophilia
atgtacgtgacggtatcgcctaccggtaccgtcaccttccgctacgactaccgtctcaacgggcgccgcgaaaccatcacgattggccgctacggacctgccagtatttcgctggcccttgcccgtgaaaaactgatcgacgcaaaaaaggctgtcgctcaggggaagtcccctgcgctggagaagcagcgcgagaagcgtcgcctaaccaccgacgaaacattcggcgagatgaccggaaagcggctcgccggcgcccagatggccgatagcgccaaggcgatgcgaaagagcaccatcgatcgggacattttgtcggccttcgagaaccggcagctcaacgaaattgccgttgaggctgcgcggtggcacctggtcattcagcgcgcagcccgcgaacttcctgtatctttagcataa

SEQ ID NO: 499904 - DNA, 639 bp, Stenotrophomonas maltophilia
atggcactaggtgcacaccgcctggccaaggcttacgaaagcacgacggcagtttcatacttctacgccaaggatcacgttccatctgatgaccaattgcgcaccgacatgctcacgatggcgcgtctactgaagagcatctatcgaggcgagccggcacagaagcgtagcggccagacttcaccggatgttattgcagtggtcgaggcgatcgaagaggccgcctcgggtcgcaagaattctggacagggctttgggctcactcagcctcagcgccgtgcagtggagctgcgggcgatggcactggccaaggagcacttcggcagcgcgggatatgaaatcaaggatacgagtgccaccgcctcttacgatctagagatcagaaaagaaggccaggttcactacatcgaggtgaagggaaccaccggcggattgggggacatcgtgctcaccaagaacgaagtgcagcaccacctaaagcatcatccgaacaacggcctgttcgtcgtccacggtatccaactgcagtcgcacgacggcatacccgtttgcgccggcggaaccgcgcacattcagcagccgtggcaaatctcagatgcgaacctgcaagctctcgcctatcgatatcgtattgcgtag

SEQ ID NO: 499905 - DNA, 972 bp, Stenotrophomonas maltophilia
atggctgcacagcaggaagtgttcaattcggatgggttggtcattggcaagacctacagccgcaaggagatggctcatgcgggtggtgtaaaaccccctactgaatcccgtgatccacgctggacgaatggcgtagtttccttcagtaacgccaccttgctgcttgtaaccctggaaaagggggatggcggctatgatgattcctttgagggtgagcaattccactggcagagccagtaccgccagagccaaacatctaagcgcatcgttgcgttgaagaagggcgccgtgaaggcacttctattcgtccgcatctatgcaaaacgggggcgggacgcgcagccgttctactactgtggtgaggtcgtacttcggtccatggagaggaacaatcccgtcgattgcgtcttcgatgtcaaggaagctttgcaaggcagaagcgatgcgctcgacgagattcttcgttggcgccccattcgtcctggggacacgctcggagcggagttgtttagtgcgcaagaggcggcagagcaggaggcggaggctgcggatgacacagatcgtcgaaacaagacgttgcgggccatctacgtacgccgggggcagcgagcgttccgccgaaagctactgaaaagctacgacaagacgtgtgccgtaacggggtgcaagattgaggcacttctggaggcggcgcatatcagcccgtatcttggtgaccacacaaattccgttaacaacggattgctgctccgtgcggacattcatacgctctttgaccttggactactttggatcgcggaggacttcatcattcaagtcgcgaaatccgcgcggggcgctccttacgccgacttgcatggcaagcctttgaaactgccaaaggccgcaaacgatcggcctagcccggaaaggcttcaacagcatgcgaaggtggctgctgcgcgcagaaaaaagtaccgagccgcgcactga

SEQ ID NO: 499906 - DNA, 168 bp, Stenotrophomonas maltophilia
atggagagcgccctgcaggccatgcctgaggaactaggcgccatattcgacagcagcgtcccccagtgtatggtcgaaagcgcgattcacgactatgccttcggcaaactagtgtttgtctcgtttcagaattttatcttccagtttcaagcagaatcagtccagtga

SEQ ID NO: 499907 - DNA, 1383 bp, Stenotrophomonas maltophilia
atgatttattcattcctatatcatgagcgggtagtaaatattgtgccaatcggcgtgcgagaaggtgcattgccgaacatctatgagtctgactcgatgacattagtagttgggccaaataactcaggaaagaccgagttgctggctcagctctgcagggcgatcgcgtcacgagaccaaaccgcgcttgaaattgatggcgatatagaagatgttggagttgtttatttcagtccggcgtccttcagaaaaagcaggttcccccagagacatcctagagtaaaagttatttctcaaaagggggttgacgtttcgaccgacggccacgagatcgtaagaaggttgcgtgatgatttcggcttcaccggtcggcttgtggtaaagctcaagcactctccggtagatgcggttagagcactattagctcgcgcgatggaaataccgtctcgcattccacgttttagcgagctggataagctggtcgaaaattaccagaaagcctcaatgaactggaggtcagaggagatcgagagttcgcccaccagccgagagaggcaggaggcaatgaatttcgcccaacgtgagctgaggctcggaatccagtatctggttgaagagaggctggggcacaatgcaaatgtttatctgatagcccttgccgttcttcttgccaaaggaaggcgaagtaagcaacttgcacaggagttcttcgagtgtcttaatggtaggccgtggagcgacggtttcatggacactgtttctacggttgagggtgtctccgctgtgtacactctcgaggagcttatcgtcggcgttgatgtcgcttggcaccagcaagcagatttcctggatgaagggagcatactttccgtcgagcttgatggcctaagttctggcgcagaagcactggtggcgcagtttgttcgtatatccagtgcagtgcgggagctctcaaattacgggtcgtcaaaaatcattttgttgattgacgagggcgatgcattcctgcatatcgcgtggcagcagctctacataaaagtccttgatgatttcgcaaaatcaatctgtccgaattttgcgaccatccaggttgtggttgcaactcactcgcctgttctaatgtctgactttcctagggactttatattaagagtatctccagattctggtggtgttgctgagggggaattggtcagcttcgccgcgcctcttgagaacattgtggcttcaaccgctggtgctggatctattgggaagaaggcaactcaaatcatccgaagagagttggagagggggagggcggcggatatgagaataatagattggattgatgatccgttgttgcgaaagtatttgatggagcaaatagaacatgctggttaa

SEQ ID NO: 499908 - DNA, 2382 bp, Stenotrophomonas maltophilia
atgaacaacacgatgccgatctggctggcggccctgcgccgccggctgcagccgctgtggccctggctgcgctggggtacggccgccacgctggtgctgctgctggtgctggatttcgccttcccgccaccgctgccgaagcagcgtgataccagcaccctggtggtggctgccgacggcacgccgctgcgtgcattcgccgatgccgagggcgtgtggcgctacccggcttcgatcaacagcgtctcgccgctgtacctgcaggcgttgctgacctatgaagaccgctggttctggcggcatccgggcatcaacccgctggcgatcctgcgtgccagcggccagctgctgcgtggcggccgcatcgtttccggtggctcgaccctgaccatgcaggtcgcccgcatcctcgatccgcatacgcgcacgccgtggggcaagctcaagcagatgctgcgcgcggtgcagctggaagtgcacctgagcaagcagcagatcctggccctgtatctggagcgcgcgccctacggcggcaccatcgagggggtggaagcggccagctgggcctacctgggcaagccggcggcgcagctgtcgcatgccgaggccgcgttgctggcggtgctgccgcaggcgccgagccggctgcgcccggaccgtcatccggaagcggcgcagaaggcgcgcgacaaggtgctgtcccgcatgaacgagctgggcgtgtggacggcggacgaagtggaagacgcgcgcatcgagaacgtggtggcgcgctcgctgcgcccgccgctgcacgccgcgctgctggcgcagcgcctgcactcggcgcatccgggccaggcacgcatccagagcagcatcgacatcggcctgcagcgcacactggaagaacgcgtggccagctatttctcgacgctgcctgaacgcacctcggccgccctgctggtggtcgacaaccagaccctgcaggcgcgtgcctatgtcggcacgctggcgttcggtgaccggcagcggctgggccacgtggacatggtgcaggcctggcggtcgccgggctccacgctcaaaccgttcctgtatgccatggcgctggacgatggcctgatccattcggaaagcctgctggtcgatgcgccgcagagtttcggcagctaccgccccggcaacttcgacatggctttcaatgggccgattggtgcctccagcgcgctgcggctgtcactcaacgtgccctcggtggacctgctgcagcgggtcggtccggcgcgcttcgccgcacgcctgtcgcactccggcatccagctgcgcttcccgccgggcagtacacccaatctgtcgctgatcctgggcggcaccggtgcgcggctggaagatctggtcggtgcgttcgcagcgctcaaccgcaacggcatcgccgggcgcgtgcgctacaccgatgacgaaccgatgatcgagcgtcgcctggcctcgccgggcgccagctggatcgtgcgcgagatgctggaatcgaatccgcggccggggtatagcgtcgggacgttcgatgtcggtggccgcccgcgcgtggcgtggaagaccggcaccagttacgggtaccgcgatgcgtgggcgatcggcagcacccgccactacaccgtgggcgtgtgggtggggcggccggacggcacaccgctaccgggccagtacggcgcggtgaccgcgctgccgctgatgttcgaggtggtggacagcctgccgcgccagcgcggtgattcagctgctgcaccgatgccggccagtgtcagccaggaggacgtctgctggcccaccggcgaacgtgccgagggcctgccagcggcgctgtgccagcggcggatgtcggcctatctgctggacggtgcggcaccgccgaccttccccgagcgcgaggcgcggcgctggcagccggggcggcagcgttacctggccgacgcgcggaccggtctgcgtgtatccgctgattgccgtttgccgcatcaggaagtcgcgcgggagatcgcgcgttggccggcgttgttgtcgccgtggctgccgaaggccacgcgcgaggcttcgcagctgccggcgctgtcgccggactgctgcgacgacgggcgtgaggccagcgtcgcgctgcacgtggacgggctcaatgacggcgccacgctggcgcgcgcgccgaattccgaacacggcgtgcgcctgcagttgcgcgcgctgggcagcgagcaggcggtggactggttgctggatggacgctggattgcacagacccacggcgcgcagctgatgcagcgcgagttcgccgatccgggcgcacacaccctgaccgcgctggcagccgacggcgcgtggacgcaggtgcggttcaacgtcctgcgatag

SEQ ID NO: 499909 - DNA, 4908 bp, Stenotrophomonas maltophilia
atgagcggtccggcacggcggaagcggtggggatgggcggcggccgtactggcaggaggcctgttgctggggctggccggctgccgcaatgacagcgggcagctgcccaaggccagtggtgaagccatcaccaccaaggccgagcaggtgaaggaattcaccctgctgcgtgcctacccggaccagaagaatgacggcctgtcgctggcgctggagttctcgcgcccgctggtcggcacccaggatttcgacaaactcgttcgcttcgaagagaaggtcggcaccgaggacagcagctggaccctgtccgatgacggcctgaccctgcgttacccgttcgtcgaggccggcaaggagttcagcctggtggtctcgccggacctgctggccgccgacggcagccggctgggcaaggaactgaagcagaaggtgttcagcggcgagctgaagccggtggtcggtttcgcctcgcggggcagcgtgctgccggccaaggacagccgcggcctgccggtggtctcggtgaacgtgccggaggtcgacgtcgagttcctgcgcgtgcgcgagaaggacctgccgaccttcttcagccagtaccagcgcggcggccgccgtggcagctgggagctcagcagcgactacgagcgcagcccgatcaacaagctggccgagccggtctacgtcaaccgcttcatcctgggtggcaaacagaacgagcgggtgctgacctacctgccgacccaggacatcaaggaactgcaggagccgggcctgtacttcgccctgctcaagcgcaccggtgactacgagggcgagttcgataccgcgttcttctcggtcagcgacatcggcctgcatacccgtgcctacaaggacaagctgttcgtgcacaccgccggcctcaaggacggtgcgccgctgaagggcatcgacctgcgcgtgctcgacgccaagggtgaggtggtgctgaagggcagcaccgacggcaacggcaatgcgctgctgaactacaccctggatgccacccacgtgctggtcgccagcagtggcaaggacaccagcttcctgccgttcaaccagccggcgctggacctgagtgagttcgccgtggccggtcgtgacaacgcctggttcgacgtctacgcctggtccggccgcgacctgtaccgcccgggcgagaccgtgcgcctgtccgcgctgctgcgcgacaacgacggcaagccggtcaaggcacaaccggtgttcctgcgcctgaagcagcccgacggcaagaccttccgcgagacccgcctgcagccgggcgaccagggctacatcaacttcgagcaggtgatccccgccgaggcgccgaccgggcgctggcaggtcgagttccgcaccgacccggccagcaaggaagcgatccagggcatgaccctgcgcatcgaggagttcctgcccgagcgcatgaagctggacctggacagcgcgcagaagacgctgaagccgggggaggacctgcgcctgcaggccaacggcgcctatctgtacggcgcgccggccgatggcaaccgcttcactgcgcgcatggcggtggctgccgagcagaagccggtggagggcctgccgggctatttcttcggtgacccgaccctgcagctgccgcgcgaggccaaggacgtgatcgataccacgctgccggccaatggccagctgcgtgaggatgtggcgttgccggaagaggcggccaaggccaaggcaccgatcgccgtggtgttgtccggcagcctgtatgaaaccggtggccgcacggtcacccgtaccctgaagcgggtgatgtggccggccaacgcgctggtcggcgtgcggccgctgttcaaccccgacgatggtgctgattccaacggcaacgcacgcttcgaactgatgcgcgtggatgccgccggcacaccgcagccagccaagggcctgaagatcactctggtgcgggaactgcgcgactaccactggaccttcaacgacaaccgctgggattacgatttcacccgccgtttcgagaacaaggaaacccgcaccgtcgattccggtagcagtgcggttgcctttgatttcccggtggagtggggcgagtaccgggtggacgtgttcgatccgtccaccggactgaccagccgctacccgttccgtgcgggctggagctggggcgatgacaaccgtggcctggatgcacgcccggacaaggtcaagctgggcctggacaagaccggctacaaggccggtgacaccctggaagtgacggtgaccccgccgcacgccggcaagggcatcctgatggtcgagaccgaccgcatgctgtatgtgcaggacatcgaggccaagccgggctcgaccttcaagatcccggtcaccgccgactgggaacgccacgacgtctacatcaccgcgctggtgttccgcggcggcagtgcgccgagcaagatcaccccggcccgcgccgtgggcgtggtgcatgtgccgatggaccgcaagggccgaaccgtggccgtcggcctggtcgcgcccaagcagatgcggccggaacaggacctgccggtaacggtcagcgcaccgcagctggccggcagggccgcgcacgtgaccgtctcggcggtggacgtgggcatcctcaacatcacccgtttcccggtgcccgacgccggcgcgcacttcttcgcccagcgtcgcctcggtatcgatgcctatgacatctacagccgggtgatcgagagcttcgatggtggcagcggcaagctgaagttcggcggcgacatggcgctgcaggcactgccgcaggccaagcgcccgaccgcgcgcgtgcagaccgtggacctgttctccggcccggtgcagctcgatgccaagggcaatgcccgcatccgcctgaaggtgccggacttcaacggcaccctgcgcgtgtccgcgctggtctacagcgatgaccagtacggcaagcgtgacgtggaaaccatcgtgcgcgccccgatcctggccgaagccagcatgccgcgcgtgctggccccgggcgaccgcagcaccgtgaccctggacgtgcagaacttcaccggcaagccggggcagttcaacgtgaaggtggaaagcgagggcccgctgaacctgggtgagggcagccgcagcgtgcagttgaatgccgatgccaagaccacgctgagcttcccgttgtcggctcgcgagggccacagcgtggccaaggtgcgggtgcgggtggacggcaacggcttcaaggctgatcgccgctacgacctaccggtgcgtgcggcgtggccgcaggtgctgcgttcgcaggtgcgcacactcgatccgctggccgcggtcagcctcgacaacagcctgaccgatggcctgatggcagagtcggtgaatgcccgcctgctggtcagcccgctgccgccgatcccgttcgccagtgcactgcagggcgcgctgaactacccgtatggctgtgccgagcagaccaccagcaagggttacgccgcgctgatcctggaccaggcgacgtcgtcgatgctcggtgccgacggcctggatgccaagacccgtagagagcgcatggaaggtgcgttcggtcgcctggcgtcgatgcaggtggccaatggcaacttctcgatgtggggtgacgacggctacgtcaatccgtggctgaccccgtacatcaccgaattcctgcttgatgccaaggacgccggcttcgccgtgcccgacaacgtgctgcagaaggcgctcaaccggctcagcgaggatctgctgtccggcggcaatcagttctatggccaggaggatcgcgagaagctgaagttcgccaaccaggcgtattcgggttacgtgctggcccgggtcaaccgtgcaccgctgggtaccctgcgcacgctgtacgacaacgagcgcagcaaggcggtcggcggcctgtcgctggtccacctgggcgtggcgctgtcgttgcagggtgatgccaagcgtggccaggccgcgctggcggcggccttcgccaagtccagcagcgagcgcccgtcgtacttcggcgactacggcagtgcgatccgtgatgacgcgctgatgatcgcgctgacccatgaaaacaagctggccaagccggcctgggatgcgcgtgcggtcgatctcggccgtggcctggatgcgcgccgcaatgccggctggatgtggctgagcacgcaggaacaggtggcgattgcccgcctcggcaaggccctggccgccaaccagaaggcgctggtggccggtgagctggtgatcggtggcagcaccgaagccatcggcgagcgcaagctgttcggacgcaacttcagcgccagtgagctggccagcggcgtgcgcttcaccccgcaggggcagccgccgatgttcgccagcattgatgtggccggcatcccgcgcagcgcaccggcaccggacaacagcgtgctgggcgtcgagcgcagttactacggcaccgatggcaagccgtggtcgccgcgcccgctgaaggaaggcgaagcgctgatcgtgcgcgtcacggtgactgccgacaccacgatgcccgatgcgctgctgaccgacctgctgccggcgggcctggaaatcgagaacttcaacctgggcgacgccaagcagtgggccgacgtggtggtcgatggcatcaccatcagcgaccgtggtgaggccgccgacaccaagcacgaggagttccgcgatgaccgctatgtggccgcgctgaagctctcgcgtggcagcaaggccaacgtgttctacctggtacgcgcggtgacgccgggaacctactcggtgccgccgccgctggtggaggacatgtaccggccgcagctgcgcggcgtcggccgcagcaacccgaccacgatcacggtggtacagccgtga

SEQ ID NO: 499910 - DNA, 285 bp, Stenotrophomonas maltophilia
gtgttcggcctgtgggtgatcgtgaaggcggcgctgtatggcgaccgggtggcgggttggccgacgatgatggcggtgatcctgttcctggggggagtgcagttgatcgcgctggggctggtgggagagtacctggggcggctgtacgaagagtccaagcagcggccgttgtacctggttgacgcgtggctagcatccgccgtggcagactcggccctgcaacccaccctcggagggcaggcagatgacgacggtacggcaactgttggatggcaagtctcctga

SEQ ID NO: 499911 - DNA, 444 bp, Stenotrophomonas maltophilia
atgccgacagcacgcaatgcaatgcagcgccaagccgtaggtgttgctttcctggcgctgctggcatgcaccatctattccttgcacgcaccgttcggcctgccagaagaagttctgctttcgattgcagcgcccttgatggtcggcatgtcgatagcgggtttcccgcgatggctcgacaacaaggtaacccgctggcttggccttgtaagctacagcacctatctggtgcagttcccgctgatccaactcctgcagatgcatggcatctacgcgcaaatagatgcgcacatcggacacggtggactcgcatttgccactgcagctttggtcacgctcgcctgcgtggtagtgacggcagctttcacatattacttcgtggaagtacctggccaacgtctgtacgacaagctgcgcgggggcaggctcacgcgaacctcataa

SEQ ID NO: 499912 - DNA, 2619 bp, Stenotrophomonas maltophilia
gtgcatcgtctttccctcgttgtccgtctgctcctgctgctggtcgcaacgtcggccttcccggcaactgcagcgcccctgcaggcacagtgggagttccgcatgctgcccggcgacgcgcagggcgcagctcatccaggcctgcagcaatggcgtgcggcgacggtgccgggcagcgtgcacaccgacctgctggcgcatgcgctgatccgcgacccgtacgtgggtgcgcccgaagcggagctgcaatggatcggcctggcggcctgggagtaccgcgcgcgcttcgacgtggacgcggcgatgctggccaagcccaatgccgaactgcgcttcgacgggctggacacttatgccgaagtcagcctcaacggcaagccgctgctgcgcgcggacaacgcgcaccggacctggcgcgcgcgcgtggaagggcatctgcgcgccaggggcaatgaactgcagatcgtgttccgttcgccaatccgcagcctgttgccgggcgtggaggcaatgccacacaagatcgctggcaactatccttcgccctatggggacgagccgaaggacgcgatggtcggaaacttcgcgcgcaagccggcctaccacttcggctgggactggggcccgcgttatgtcaccgccggggtctggcgcggggtcgacctgcaggcctgggatacgcaccgcctgaccagtcttgccgtgcgcaccgatgcattgagcgcggagcaggcgaagctggcggtgctgctgcaggtggagcagggcgcagcggccggctccgcggtggtgaacgtggatgtgcgcgatccgcagggccgcaacgtggcccaggtacagcgcacggtgctgctgaagcccggccagaacacggttgaactaccgattgaactggcggaaccgaagcggtggtggccggtcggccatggtgcgcaggatcgctataccgtgcaggcgcgcctggatggcggtgccgacgcaacgctggtgcgcgagcagcgcatcggcctgcgcacggtcgaactgcgccgcgaagaggacggcaagggcgggcagggcttcgccttcgtcatcaatggcgtgccgatcttcgccaagggcgccaacgtcattccgttcgatgccttccccgcacgcgtcgacgcagcacgtctgcgccaggtgctgaccgccgcgcgcgacgccaacatgaacatgctgcgcaactggggcggtggctactacgaggacgacgctttcttcgacatcgccgacgaactgggcctgctggtctggcaggacttcatgttcggcggcggcatgcagccgggctacgatccggccttccgtgccagcgtggtggccgaggcgcgcgacaacgtgcgccggctgcgccatcaccccagcatcgtgctgtggtgtggcaacaacgaggaagaaaccgcctggaaggactggggtcacggccgtgacctgaaggcggccgacccggcatttgcggtgaaggtctggcagggctatgtcgacctgttcggcaacgacctgcgccaggtagtgggcgaggaaggactgggcgtaccgtactggtccagttcgcccagcaacgatctggacgagaaggccaacgattccacccgcggcgacaagcactactggcaggcctggggcaatccggcgctgccggtgcaggcctacctgcgtgagacgccgcgcttcatgtccgagtacgggctgcaggcgtggccgtcggtggcgacggtggaccagatcgccacccgcgccgaacagcgcatcgacagcccggtgatccgcgcgcaccagaaattcatggccggcgagggcaacagccgcctgctgcactacatcgaactgggttacggcacgccgaaggacttcgaggacttcgtctacctcagccaggtcatgcaggccgatggcatcgcactggcggcgctgcatcatcgcgcctcccggccatacacgatgggttcgctgtactggcagctcaacgatgtctggccgggcgcctcgtggtccagcgtggattatttcggccgctggaaggcgctgcacttcgccgcgcggcgtttcttcgcgccggtcacggtagccgcgctgcgcgatgagggcagcacgcgggtgcgcctgatcaatgacggtgcggcgctggatgcacgttggcggctgcgggtgatcgacatggacggcaaggtgctgcgtcgtcgcgaggacgcggtgacgttgacggcggagggcgtcacctcgatcggtgattttcgcgatgccgagttgctggccggtgccgatccgaagcgcacggtggcggtgtttgagctgctgcagaacggggcggtgagcgcacggcaggtggtcggattcgtcgaagccaaggaccaggtattgccgcggcagaagctcaaggccaccttgtccatcgaaggcgaccactatcgactgcggctggaaagcgcggcgtacgtgcgcgcggcgtggatcgacttcggcgcgctggacgtgcaggtcgaagacaacctgctggacctgttgccgggcgaaacccgcgatatcgcggtgcgcggcccggtggatctggttaccctgcgcgaggcgctgagggtgaagaccctcaacgaccgttga

SEQ ID NO: 499913 - DNA, 1227 bp, Stenotrophomonas maltophilia
atgagcacctcgcccgatttccgttcgcccgcgttcctgcgcgcccacatcgccgataccatggcgttctaccacccgcgctgcatcgatcccaacggtggcttcttccactacttccgtgatgacggcagcatctacgatgccagccatcgccacctggtgagcagcacccgtttcgtcttcaactacgcgatggcctaccgcgagttcggcaatgccgagtaccgcgacgcggtcgagcacggtgtgcgctacctgcgcgaggtgcaccgcaacccggccaccggtggctacgcctggaccctgcgtgatggcaaggtcgaggacgacatgaaccactgctacggcgtggccttcgtgctgctggcctacagctgcgcgctgaaggcaggcatcgagcaggcccgcgcgtggatggacgagacttggcagctgctggaagcgcgcttctgggagccgcagcacgggctctacaaggatgaagcggacggccagtggaacttcaccggctaccgtggacagaacgccaacatgcacatgtgcgaggcgatgctggccgcgttcgaggccagtggcgagcagcgctatgtggagcgcgcgctgcagctggccgacaacatgacccgccgccaagcggccaaggccggcgggctggtctgggaacactacgatgagaactgggagatcgactgggactacaacctggacgaccccaagcacctgttccgcccgtggggcttccaaccggggcaccagaccgagtgggccaagctgctgctgatcctcgatcgccacgtgcaggccgactggctggtgccgaccgcgcagcacctgttcgacgtggccgtggcgcgcagctgggacgacgcgcgaggcggcctgtactacggcttcgcacccgaatcgcgccggcagccgggcatggatggcgcgccgattggcggcgacagcttcgtctgcgacgacgacaagtacttctgggtgcaggccgaaacgctggctactgccgcgctgatggccaagcgcaccggtgatgaccgctactggcagtggtacgagcgcatctgggcgtacgcgtgggagcacttcgtcgaccatcagttcggcgcctggttccgcatcctcgatgccgacaaccgcaagtacagcgacgagaagagcccggccggcaaggtggattaccacaccatgggcgcgtgctacgaagtgttgaacgtggtgcgttga

SEQ ID NO: 499914 - DNA, 915 bp, Stenotrophomonas maltophilia
atgctcgcccgtcgccgattcctgcagttcagtggtgctgccgttgcgtcctcgctgtttgccccggcgctggcgcaaccggtttccgcctcgtctggcatacccgccgcgaacgccgccattgccggcgccgccgatttcgccgcgctggagaaagccagcggtggccgcctgggcgtcaccgtgctgaacaccggcaacggccgtcgcatcggcgggcatcggcaggatgagcgcttcccgatgtgcagcacgttcaagtcgatgctggtcgcccatgtgctgagccttgccgatgcaggccgcgtttcgctcgacacccgtgtgcccatcgccgggaaggatctgctgtcctacgctccggtggcgcgccgccacgtgggcaaggatctgaccgtgcgcgacctgtgccggggcacgctgaccaccagcgacaacacggcggccaacctgctgctggaggtggtgggcgggccgtcggcgctgacggcattcctgcgcgggcagggcgacagcattacccgcaatgaccgcaacgagccggacgtgaatctgttcgcgaagggagacccgcgcgataccaccagcccggccgcgatggccaccagcctggcccgcttcgcggtgggcaatggcctgcagcctgcatcgcgccggcagttcgccgattggctcatcgacaaccagaccggcgatgcctgcctgcgcgccgggctgggcaagcgctggcgggtgggggacaagaccggcagcaacggtgatgacacgcgcaacgacatcgccgtgctgtggccgcatgcgggcggcaccgcgtgggtggtcaccgcctatctgcagggcgcatcggtcgatgacgaccagcgcgcagcagtgcttgcacgggtgggggcgctggccgatgcgatgatcggatga

SEQ ID NO: 499915 - DNA, 1287 bp, Stenotrophomonas maltophilia
atgagcgacccgcagtggcaactggaaaccctggccgtgcacggcggttaccgtcccgacccgaccacccgcgcggtggcggtgccgatctaccagaccgtggcgtatgccttcgatgacacccagcacggcgccgacctgttcgacctgaaggttccgggcaacatctacacgcgcatcatgaaccccaccaccgacgtgctggagcagcgcctggccgcgctggaaggcggcatcggcgcgctggcgctggcctcggggcaggccgcgatcacctatgccatccagaccatcgccgaggccggcgacaacatcgtcgcctccagtgcgctctacggtggcagcctcaacctgctggcgcacacgctgccgcagtacggcatccaggcgcgctttgccgatccggccgacccggccgcgttcgccgcgctgatcgacgaccgcaccaaggcggtgttcgtcgaatcgatcggcaacccgcgcggcaatgtcaccgacatcgctgcgatcgccgaggtcgcgcatgccgcgggcgtgccgctgatcgtcgacaacaccgtggccacgccgttcctgctgcgcccgttcgagcacggcgccgacatcgtggtgcattcgctgaccaaatacctcgggggacacggcaacagcctgggcggcgcgatcatcgattccggccgcttcgactggaccgcacagccccaacgcttcgcacggctcaaccagcccgaccccagttaccacggcgtggtctataccgaagccctggggccagcggcctacatcggccgcgcgcgggtggtgccgctgcgcaatacgggcgctgcgttgtcgccgttcaacgcgttcctgatcctgcagggcatcgagaccctggccctgcgcatggaacgcatcaatgccaatgcgctggccgttgcgcagttcctgaaggcgcatgccaaggtcgcctgggtgcgctacgccggactggccgacgaccccgagcatgccgccgcgcagcgctatctgggtggacacggctcgggcgtactgaccttcggtctgcccggtgggcgcgaggccggcgcccgcttcctcgatgcgctgaagctgttcacccgcctggtcaacctgggggatgcgaagtcactggccacccatccggcttcgaccacgcatcgccagctggatgcagcggagctggccaaggccggtgtcagcgaggacaccgtgcggctgtcgatcggcatcgaacacatcggcgacctgcgctcggacctggaacaggccctggccggcgcctga

SEQ ID NO: 499916 - DNA, 618 bp, Stenotrophomonas maltophilia
atgccgcggacacccccgcgaacccaccccgcccgacctctgacagtttccgtgtgcgtccgccacggaaaatcaaaagaaaatcaaagtcaacagcggatcgcttcgctcgcatccacgcgtagcgtggatgtgtgtcgaccaaggtcgacacctaccaacagcaatgatgcgtcgggatctgtcagaggcggggcggcatgggcttgcaggaccgttggcgccatgggcccgaggcacgcctcgggcgggttgggcaggacgctcaaccccggtcttgccgcgtgcgcaggacagcgcacacgagcaaggcgccatcgagcccccagggacgggtttacggcgtgtcctgcaagcccataccgccccgccaaacccaatatcccgaccgctgctgttgatgttgactttgactttgcttccagcggggcccgggccgcaggcccgggcaacaaacccctaccggtcgtcgtgcagggtgccacccggcaggaacacccaggtgcgggtgacctgcaggatgtcgatctcgtcctcggtcttcggcagcggcgggaatggctgcgcaagctgcaccacccgcagcgccgcctcatccagcaacggcgtcccgcttga

SEQ ID NO: 499917 - DNA, 1245 bp, Stenotrophomonas maltophilia
atggacggcgacaggggcggggacggcacgggtggggccggactggggacggaccatctggcggtggtggcattgacactgttggtgggcggcagcgtgatcgcactggtgggccagcacacggcggcacaggcaggccccgccatcgtgctcagcctgttgctggctgcactgggggccagcctggtgctgtgttgcctgcaggatctggtactgcggttgccggcgggcgagggcctgcacgggctgctggctgccagctgggggccgcgggtggcgggcgtgttgggcatggccctgctgctggagctggtggcgaccacggcgggcgtggcgcagtccatggccctccatctgcacgcggtgctggccgccgaaggcctccagccctgcgactggctgccggaacaggtcacggcggcggtgggcctgctgatgctgggcgcactggcattgctgccgccacggcgtgtggtgctggtggcctgcgccctgttgacggtgaagatcggtgcgggggtgttgctgctggcgctggcggcacgtcatgtgcattatgcgcactggatcccctggctgccaccggcgaccgcgccgtatcgcttcgggctgggcggggtgctggcggctgcggtgccgctgctgggggtatttgccagcgtcggcttggcactgggctttcctgcgttgcgccgccagggcgcgatgtggcaaccggcagtgctggcgttggtctcgttgctggcgatgctgctgctgatcgtgctggcagcactgcaggcagggctggtcgagttttccgcgcttgccagtacccggccactgtcggtggcgctgcagatgcatccgcaattggagtggatgctgccgttgttgccgctggcgggggctacgggcctggccgccctgcagctggtgctgctgatgctggccttgcggctggcaacatcgctgtggccaggggtgggtgatgccgtgggacgctcccgcggtgtgatcgtggcggcggtcggactgccggcggtgatgctggtgctgtggctgccgttgggcaccctgccggcgctgccgggtccggcaaccctgctggtgatggcggcgctgtgcctggcggtgctgcggcggcggaatgacatgaggcagggcgcaaccggtcgcgaactggtgctgccgatgctggcgcccttggcggccgcgctgtgcgtccttgcggcgctggaacgcctgcgggcatggccgggctga

SEQ ID NO: 499918 - DNA, 2796 bp, Stenotrophomonas maltophilia
gtgaaacacccgatccaacggcccgccagccgccgccgcagcaccctggcatcgtccatcacccacatcctcaccggcggcgccctgctgctggccggcgccgtcgcttcctcctccgccttcgcgcaggaaaaggccaccaacctcgaccgcatcacggtcaccggctccaacatcccgcgcaccaacaccgagacaccgtcgccggtgcaggtggtgacccgccaggaaatcgaccgcaccggcaagacctcgctggccgagtacctgcagaccatcaccgccgatggcgccggctcgattcccaagaccttcggcaacggtttcgccggcggtggcgccggcatctcgctgcgcggcctgggcgccggctcgacgctggtactgttgaacggccgccgcatggccacctatggcctggccgatgacggacagaaggtcttcaccgacctcagcaccattccgctcgatgccgtcgagcgcgtggaagtcctgaaggacggcgcttcggcgatctacggctccgatgccatcgccggcgtggtcaacatcatcctgcgcagcgacttccagggcgccatcctgcgtggctcctacggcctgtccggtgacagcgatggcgacgcccggaaagcaaccctgaccgccggtaccggtgacctggccaccgatggctggaacgccttcttcagcctggacgttggcaagaccgacgcgatcaagatcagcgaccgcaagaaccgcaagtggatcggtaccggtgacacccgcccgtggggctatgacaagaccgcccagttcctcggcggtgcctacacccgtggtggcacctccggcggttccggcccgaacggctcctacctcgacgccaccggccatctggtgccgctgccgggttgcgccggcctgaccaccatcggtgggcagaccccggccagcatcgccgccgatggctgcctgtgggatccggcgcagcagtaccgcgacctgattccggaagagaagtacgtcaacgtgttcggtcgcgccagcttcgccttcggtgaaggcggcgagatctacaccgagatcggctactcgaagaaggaaaccatcttcagcaacaccccgtccggcgtgtcgggcggctggggctatccgggcggcccggtcaatgccaacagtggccccggtgccaccgtgctgggcccgaaccatcccgacaacccgaccccgggcacggcgcgccgcgtgcgttactcggcctgggatgtcggcccgcgcgtgaccgacaacaccaatgagttcaaccgcttcctggtcggcatcaagggcaactggggcgactggagctacgacaccgcctacctgcactcgggcaccgacctgaccaacaagcgcaccggcttcctgcgctacagcgccgtccagtgtgcactgggcaatgccaactgcgccggtggcgtgtggcgtatcggtgatgatgccggcaagaactcgcaggcgctgtacgactacatctcgcccacgatcagcgcccgcgccaagtccagcctggacatgttcgacttcaccgtctcgcgcagcctgatggacctgaagggtggtccgctgggcctggcgatcggtaccgagtggcgcaagaccagcaacagcctgaccccgcagacctacaccgaccagggcgacatcatcggcctgggctactcggcctatgacggcacccagaacgtctacgccggctacgtcgaactgtcggcaccggtgctggaacagctggaactgtccggcgccctgcgttacgacaagtacgaaagcggcgaaggcaaggctacgccgaagctgggcgtgaagtggaccccggccgactggatcgccctgcgcgccagctacgccgaaggtttccgcgcgccgaacccggccgagaacggtgacggtggcctggccgccttctccactgcggtcgacccggtgcgttgccagatcagcggcggcgctgccagcgaatgtggcgccaattcggtggcgatcatcaccaagccgaacaagctgctgaagccggaagagtccaagagctactcggtcggcatcgtgctgcagccgacttcgaccacctcgatgaccgtcgatgcctggcagatcaagcgtaccaacgagatcgtgcagggcagcacggcggcggcgatcctggccggcaacgtgctgcgcgacagcaacaatctcaatggcgtggccaacagcggcaccatcctggcggtcaacaccggctacgtgaatgccagctcgtcgcgcgtgcgcggtatcgataccgatatccgccagaccttcgagatcggcccgggccagctggagctggacctgcagtggagccacatcctgaagttcgagcgcaccgaaggcggcgacacggttgattacgtgggtacccacggcaactgcgacgtcaccaactgcatcggtacgccgaaggacaaggtcaacttcggcaccacctggaagcagggcccgtggagcgtcagcggcatcgtcaactacatcagcaagatggacaacatcgacagccgtggtggcagctacctggccttctacgctgacggtacgccggtgaagaagatctcttcgttcaccacgatggacctgtccggtcgctggagcatcaacgactcgttcgaactcaacgcctcggtggccaacgtgttcgaccgcatcgccccgctcgatccgaccacctacggcgcggtgaactacaacccgatgcacttctccggtgcgctgggccgttactacaccgtcggcttcaagtacacgttcaagtaa

SEQ ID NO: 499919 - DNA, 1002 bp, Stenotrophomonas maltophilia
atgaatgaagtggtgtggggcatccacgcaggccgcaccggcgatgccgatgccttgttcctgaagcaaggctgcattgccattggctgggatgccatgggcgacttgtcgctgctggaaggcgaccgtgatgccttccggcagtgctatgtgcaggcctacccggaggcgaagaagggcggcattgccacggtgtctggcattccctaccggttcctgcacgagatgaagcccggcgacctggtggtgtacccctccaagcaggacaaatacgtgcacattggccgcgtcactggcccataccagcatgttgccgatgccacccagaggtacccgcaccgccgcagcgtgcaatggttgactcacgtgccgcgcctgcagttcacccaaggcgcgctgtacgaaatcggctcggcgctcagcctgttccaggtcaaaagctacgccgacgaattccgcgcggcggtgggcggcaagtccccacctgcgttgccggtggaccaggaccattcggtgggcctggtcaccgatgacatggaagacaccacccgcgacttcgtgctcaaacgcttggcgcaagaattgaagggcttgccgctggaggatttcgtggtgcacctgctgcaatgcatgggctaccacgcgcgcaagacccgggtgaacgaacccagcgtggacgtgattgcccacaaggaccacctgggcatcgagccgcccatcatcaaggtgcaagtcaagagcagccccaacacagtgaccgacaaggacgtgtcggccctgtacggcaagctgtcccatggcgagtacgggctgtttgtgaccctgggcagctatagtccggcctgccgcagttttgagcagggcaagggcaacctgcgcctgatcgacggcgatgaactggtggacttggtcttcgcccactacgagcagttcgatgcgcgatacaagggcctgctgccgttgcgccgcatctacgtgccgcaggtactggaggccgactaa

SEQ ID NO: 499920 - DNA, 336 bp, Stenotrophomonas maltophilia
atgccccatgcctcgattccactgacagaggcggggcgcaagcaggcagacgcgctatctgcgcaactgcctgcccagcctcccaggattcttgcctcgcactttgtgagggcactggacaccgccgagccttacgccaagcgactgcaggtcaagatcgaggaggagctgttgctgcaggaattcgacatggtcgccccggtgttgatcgctggcatggaccaatcgcaacggcgtccgatagcgattccactgttgcttctggcagcgcgcccagttacgccagctgttctcttgggccgctgtacgattcatagaactgtgcccacttcctga

SEQ ID NO: 499921 - DNA, 648 bp, Stenotrophomonas maltophilia
atgacgtaccaccgacaaggggtgccgggtctacaaaccaatctttcccttggcgagaagaagtcgcgtgacgcgctgttcaagcggtacgggcaatctgacgacaaggacctggtgctcgcctcccacaccctgcggcacctacagaaaaccgagctcttccgtctcggtgtggccgacaccataatctccaaacgcttcaatcgccggagcgtggcccaaagctacgagtacgatcatcgcagcctggcggaagagccagatcaactcgaactacctgcaggcgtggaaacggcgctaggcgagaaggccagcactgtcgcgaagattatccaatccggcaaagccagcaggccaatcgtggatgagttaaggaagatccaaagcaccgagggtgacacagccgcattcgaactcctgaagattgaagccgacggctttcacgcaactccctacgagcaccgcttgaacagctttactttcgaaccgtgtcccaagtatcttgaatgctttgccggctgccgccacctttcggcaaccaacttgccggagaaccgccgtcacctgaaaacgctcgaactcaagctggctgcgggtgtcgaggtcgcagaagccagatcatcaaagagtatcggccgcacgaagtag

SEQ ID NO: 499922 - DNA, 288 bp, Stenotrophomonas maltophilia
gtggactggctgccgcgttcgtccatcgagacctccgacgatgtgctgggtgtggtgtcgctggccgagcaaggcatcggcatctgccagagctatgcgttcatcgtgcgcgagcggttgcagcgtggggagctggtggaggtgttgccgcagctgcggggcagatcaaggccgttctcggtgatctatgcgccgcatcggcggcagtcggcggcggcgcgggcgatgattgagttgttggtggggaatgcggctgatcgcgcgccgttgcttagcgagacggactaa

SEQ ID NO: 499923 - DNA, 1140 bp, Stenotrophomonas maltophilia
atggcaaccattgttcagacccctgcggggacctggaaagcgctcgtccgcaagcaaggatggccaaccgccaccaagactttccgtaccaagcgtgacgcgagcgactgggcgcgccgggccgaggatgagatggtccaaggcgtgtacatcgaccgcgctcagtcggcgcgtatgacattcgacaaggcgctggatcgctacctttctgaggttgtgccaaccaagaagccggctacacaagagaccgataagtattgcgccgagccattgcgcgccgccttcggcaagtactcgctggccgcgatcagtcccgacctggtcgccgagtaccgggacaagcgccttgcgactccactccagcgcaagctccgcgcgtctgggaaggctgcgccggttctggacaaggcaactggcaagccaaagaccctcagtcccaatacggttcgcctcgagctggcgctgctcagccacctgttcaacactgccattcgggaatggcgattgggtctggtccgaaatcctgtctccgggatccgaaagccgtctcccggtgaaggtcgcgacaggcggcttcgaggggacgaggaagcgagattgcggaaggcagtagttggctattctaaccccatgctgggctggattttcgacatcgctttggaaactggaatgcgcagtggcgagatcgcaggccttcgcatgcaccaagtggacatgccgcgccggattgtccgcttggcggacaccaagaacgatagcgcaaggaccgtgccgctatcacgccgagcggcggcggtactgaggcaggcacttgaaaatcctgccaggccggaaggctgcgatttggtgttcttcggggagcctggccgtgatggcgcgcgtcgtccttatttgttttccaaggtttggaaccagatcaaggcctcgctgggactgaatgacctgcacttccacgatcttcgccatgaggcagtcagcaggcttgtcgaagccggcttcagtgaccaagaggtgtcagcgatcagcggccacaagtccatgcagatgctgaagcgctatacccatctacgcgctgaggatttggtggaccgtctggatgtcatgcagcgcaagtcggcgaagctggtaagcggagactag

SEQ ID NO: 499924 - DNA, 177 bp, Stenotrophomonas maltophilia
atgctgctggatcttccggatcttctggcatatgcccgtatcgaagatcatggcatcaccatcgacttccgcaatgcggatctttggggggaattggaggagctagtctccgcttaccagcttcgccgacttgcgctgcatgacatccagacggtccaccaaatcctcagcgcgtag

SEQ ID NO: 499925 - DNA, 156 bp, Stenotrophomonas maltophilia
atgatgaagtcttgccacaaaccccaggggccaagcggtctcaacttgagcattgaacgcctcagtgaatgcgccgcagatcgtgcagtacatgcgatcgaaatccgggccaacgtggtaattccgggctatgccctcttcatcctggctttttaa

SEQ ID NO: 499926 - DNA, 171 bp, Stenotrophomonas maltophilia
atggaaatcgggtggcagatgcaggagataaacgagtacgccgaaggccttgaagccgagtcgcttatccctgatgactgcgttggaaagaacggtgaaatcgcgttccacacggtgtcgcaggattgcccggccccgatcccatccggccccatttctcgattgctctga

SEQ ID NO: 499927 - DNA, 312 bp, Stenotrophomonas maltophilia
gtggggagacttttgaaagatctggaacccggcctcgcccagcaggtgctggacgagctggcgggacttatggctgccaaccgggtgagaacatccagaatcgcgcttctgcgtgagctggtggcacgcgcgcgttccggggcattcacccctgcgcacgctccgagtgtggctcgcaggcgcacacaggaggccgaacaggttcttcagcgggccgcgaagacccaggaagccaaacaaggcgcgagtgatgtggccaaagcgcgattcgccgagattgccgcagtgctgcgcatgtcgaatacgaactga

SEQ ID NO: 499928 - DNA, 480 bp, Stenotrophomonas maltophilia
atgagcgggtccaaaggcgtagggcggctcaactcccggatcgacaaggaactgcttgatttggccaaggccgaggcgcagcgacgacgactcacggtgaggagcatcgtggaggccgccctgcgtgagcgctattcgtccgatgttgagaaacaggccgaatgggaattgctcacggagttgaggacgttgcgtaggcaagttgaccagctggacttcggttaccgagtcctgaccgagatcgtcacattgaccatcccgaacctgtttgcccggcttggcacgcccactaccgtcagcaacgatgccgggcgtggtttctacaatgcgctcattgccagcgtcgaaaaggtcttcagtcagggcacgccgctgctcgacaccttgtcagccaagctgttccgtcttgagccggattcgagcgccgtagcggggcagcacgaagacatgggcagtggtgcaaatgggccggaaatttga

SEQ ID NO: 499929 - DNA, 273 bp, Stenotrophomonas maltophilia
atgacccagactgctgcccgcctcgacctgcgcctcgattctgacgacaaggctcgcatcgcccgcgccgctgcgctgcgcggtgtgccggtatcggccttcgttcgcgaagccgtgctgcgcgaggccgacgccgccatggccgcggagctgaccgccacgctttcgcccgaggaatcccgtcgcttcctggatgcgctggacaagcctttccggccaagctcgcggctcaagaaggcgatggatgctgccgcccaggcagccgggcgctga

SEQ ID NO: 499930 - DNA, 492 bp, Stenotrophomonas maltophilia
atggcattgcaattgaccctgctggacggtcgccgtcacgaccgtgccagcttcgcctgtggtatcccggccttggaccactacctgcaaaggcaggccagccagcaccagcgcgacggcattgccaccgcccatgtcttggtcgacgacaaccaccctgaccgaattctgggctattgcagcctggcggccgcccaacttcttttgcaggacctgcagccggaggatcgcaagcggctgccggcctaccctgtgcccgccgtccgggtgggaagactggccgtggccaaggcggagcatggcaagggccatggccgcttgctggtgggacatgcggtgaactgcgcactcgtgttgcggcagacgcttggcgttcgtgtcctgctggtcgatgcgaaagacgaacgagtagtccccttctatacatcactcggttttcggctcaccagcgcagatgcgcgcgtcctgtacctgccactaggccgggcatga

SEQ ID NO: 499931 - DNA, 1260 bp, Stenotrophomonas maltophilia
gtgatcgaagcgctgcgcatcgccacggaggctgaagtcgccggccgcggcggcgctggccagctgcttgatctcggcattgatgcggccgaggttggccttgaccgtatcaacggtggttgtcatcgcggccttttcgcccgggtagcgtgcaatgtcgcggctgagatcgccgaccgcgtattgctgcaccacgtccagcacgtcgtgcagggtctgcacgtggccgccgaccagggcgttggtttcctgcaccatcagcccgtactcaccggggaaggcgctggcgtcgatgcggtagctcagttcgccgccgtcatgacggcgcgccatttcgcgctggccggtgatgaccgcatgcagctgctgctgcatgccggccatggcctccagcaggcggccggtttcgtcgtgcggctgcgggccgatgtggctgtccagcttgccgccggcgatgccttcggccacggcggtggcctgcttcagcggcacggcgatgcggttgccgatgacccagctcagggccagcacgatcagcaccagtacgccaccagagaccgccatgatggcggtgaacaccagcgcctgtttctgcacgtcgtccatgtagacgccgctgctgaccacccagttccagggcgcgaacaggccggcataggcgaccttctcgacttcgcccttgctgcccggcttggcccagcggtagttgacgaagccgccgccggcgcgagccgcttcgacctggtcgtagtagatccgtacgccgtcgtcggtgcggaagtccttcatgtccttgccgaccaggtccttgcggaacgggtgcatcagcaggcggtagccggtgtcgtagatgttgaagtagtaggtatcgttcccggcgcgcatgacctccagcgcctgcagcgcggcgctcttggcggcctcttcgctgagctcgccggtaccggccaggcggtggtagtgctgcaggatgccgtagctcagttcgacctgggtcttcagcgcgctcttgcgggtttcggtcaggtccaggtactgcatgcgggcggcgatcaccgagagcgcgatcacgccgagcgcgatgagcagcgtcagcaggttgagcttgcgccggacggaaagattgcggaagtagtgttgccagcgatgcaggagattcatcgagcaggaccagatcgaagcgggcgggcggcgccgtgccggtcagcggcgggatacgccgtgacaaccccgttatcggccgcgcgggcgggggattga

SEQ ID NO: 499932 - DNA, 669 bp, Stenotrophomonas maltophilia; identical to SEQ ID NO: 498422

SEQ ID NO: 499933 - DNA, 273 bp, Stenotrophomonas maltophilia
atggacgaaaccacgcagcagaacgccgcgctggtggaagaagccaccgccgccgcacgtgcgatggaagaacaggccggccacctcagcgaggccgtgtcgatcttcgtggtggacgaagccgaggtcgtcgccgccccgcgcgtcaccaccccggcaccgcgcgccgctgcaccggctgccccggccccggctgccccgccggcccgccgcacggcgggtggtcgcccgatggccaccgaactggccgacggagactggcaggagttctga

SEQ ID NO: 499934 - DNA, 615 bp, Stenotrophomonas maltophilia
gtgttcgctgcctacacccaggccgaggcatcgacaacgcgccgtttcggcggcagcggcctgggcctggcgatctgccgtgaactggctgcatcgatggaagcagaactgtgcctgcgcagcgcgccaggcaagggcaccaccgtgtggctggaactggatctggacgcctgtgagttgcctgccgaggcattgccgcttccggcagaggcggcgcggccactgtcgtcggcccgggtgctagtagctgaagatcaccccaccaacctgcacctgctggagcagcgcctgcatgatctgggtctgcaggtgcacgcctgcaccgatggtcgccaggccttcgaggcctggcaggcgcgggcgttcgacctggtcatcaccgactgccacatgccgcacatggatggctttgccttggcacgggccatccgcgccgacgcctgcgcggttcgcgcgcaggtcccgatcatcgcgctcacggccagcgcgctgggtcgcacccgcgaggcctgccgcgaagcgggcatcgatcatttcctggccaagccggtggcggcgcaggaactgcggggcttgctggccgtgctgctggcgccggaatcaatgcgccagtag

SEQ ID NO: 499935 - DNA, 1056 bp, Stenotrophomonas maltophilia
atgccaactccctccacccccgaacgacaggcagcgcgcgcggccggcctgcgctatgtcgacgacacccagccgggcatcagccggcgccgcgccggcaagggcttcagctaccgcgatgctgatggccacgcgatacgcgacgccaccaccctgcaacgcatccgcgcactggcgatcccaccggcctacaccgcggtgtggatctgcgcccatgccaacggccacctgcaggccaccggtcgtgatgcgcgcggtcgcaagcagtaccgttaccaccccgattgggccagggagcgcgatgccggcaagttcgaccgcatcatcgcctttggcgaggcgttgcctacgctgcggcggcggctgtcgcgggatctcaagcgccccggtttcccgaaggagaaggtgctggccatggtggtcgcgctgttggcggacacgctggtgcgggtcggcaatgagacctatgcgcagcagaaccgttcgtttggactgaccacactgcgaaaccggcatctggagctgctgcgcggtggccgcgtgcgcatgcgcttccgtggcaagtccgggcagctgcaggaggtcaccgtgggcgaccgcaggctggggctgctggtgcggcgcctgcagcagctgccggggcaggcgttgttccagtaccgcgatgacgacggtgcgctgcagccggtcgactccggcgcggtgaacgactacctgcgcgaggtgatgggcgaggacttcactgccaaggatttccgcacctggggcgggacggttgcggcggtgcaggcgtttgccgccaccgaactgccggaaccggccagccagcgcgcgctggcgcaggcgcagcgcgcggtggtgtgcgaagtggcgtcgctgttgggcaataccccggcggtgtgccgcaaggcctatatcgacccctgcgtgttcgccggctgggagcgcggcgaactggccacgctggccggcctgcgtgggccgcgccagtgggaacaggcgaccctgcgcgtgctgcgcagggcgcgccggctcagccgcagtagatcgcggtga

SEQ ID NO: 499936 - DNA, 1323 bp, Stenotrophomonas maltophilia
atgggtacgctgcaggtctggatgaatggtgtggaagtcgcactttgggatgatgtccggaacgggtcatcccggttgtcgtatgtcagccagtggatcagctcgccccagtcccgaccgttgtcgctctctctacccctgctcccagatggcgagagccatcggggcaacgtcgtcaacgactacttcgataaccttcttcccgataacgtcgccatacgcaaccggatccgcgaccggttcgccacgcgcggcagcgatacgttcgatcttcttgaagccattggacgggattgtgtcggcgcagtgcagctgttgccgccagcgcgtccacccgaagacatccagcagatcacgtgcgaggtgttggacgaagcaggtgtcgctacgatcctgcgtcaggtgacgacagggaacctgcctggcgcacccagccgtgatgatgcattccgcatttccatcgccggtgcgcaggaaaagaccggtcttctgctgcatgctggcaaatggtgcattcctaccggcaacacaccatccactcacatcttcaagctgccgcttggcattgttggcaacatgcgggcagacatgcatcagtccgtggagaatgaatggctgtgcatgcatctgctttccgcctttgatatccccgtggccgagacgcagatgggccgcttcaacgaccaacgtgctctcattgtcgagcggtttgaccgtcgcctgtctgccgaccgccggtggtggctgcgactgccacaggaagacatgtgtcaggtctttggtctgccggctgccagaaagtatgaatccgatggcggccccggtatcgttccgatcatggatctgcttcgacagtccgaacaccccgaggatcgcgcgatcttcttcaagacgcagattcttttctggatgctggccgcaaccgacggccatgccaagaatttcagtgttcacctggaagccggtggacgcttccgcctgacgcccgtctacgacgtgctgtcggtatatcccatcctcggcaggggacccaatcaactcgatccacgaaacgcacagctcgccatggccgtacatggcaagaaccgccaccggaaactgcaccttgtgcgacggcggcactggaatgaaaccgcgcgcgcctgcggcgttgccgatggtgcagaaccatggatcaagacattgatcgcggccgtcgagcccgccatccagcaggtcacccgtcagctcccggatgacttcccctcaaacgtgtccgaaccgattttcaacggacttcgtgctgcggcagcacgcctttccagcatggcccccgaggcttga

SEQ ID NO: 499937 - DNA, 315 bp, Stenotrophomonas maltophilia
atgacctacgcaaagcacaacgcaaaacgcggcgcgaagtccgccgcaaagaagtactacaagcactgggccgaatcggggctgggcaagggcaacgtgctgatggaagcccgtggcgagaagatcgtgcgccaggtggaaatctacggcaccaagatggtctgggccgacgagcacgcccacagcgatgaccgtttcctgctggccgaccagccggtgtcgttcctggatttcgacgaggacgacgaaatctccgcgcgtgaattcgaagccgcctggaagaaggcacgggaagccaccggctacccggtgtaa

SEQ ID NO: 499938 - DNA, 2046 bp, Stenotrophomonas maltophilia
atgaagactcccacccttgtggccgccctcgcggccgctccgttcgcccctgaagctttcgcacagtccgccgatgccgcgctcaccctcggcaaggtgcaggtgcaccagcatggcgaaggccagctcagcgcgcgccaggtgctgacttcggtggacgtgctcggcgcggaccagatcgaagaccgcaacgtctcgcacagctgggagctgctggggcagatgcccggcatccagctcaccgaaacgcggcagggggccgaatcgggcaaggtcagcttccgcgccttcaacggcgagggctacctcaacgccatcaagaccctcatcgacggcatccccagcaacgtcaacagtggcaaccagcgcttcatcgacatgctgttcccgctggacatcagctacatcgaagtggtgcgcgggaccaacgacccgcgctatgggctgcacaacatcggtggcaacgtgaacttcggtacgcgtcagggcggcagctacaccgatgcgcgcctggcctacggcagctacaacacccgtgatgcacagctggcggttggccgcgaagccaatggcttcgcgcagaactattttgttggcacccaggccagcgatggctatcgcgaccacgacacctcgaagaagtactcgctgggcggcaagtggttcttcggcacgctggacgaagggctgcgcgtgggcctgacggcgcgcgcctaccaccatgaggccgacgaaccgggcttcatgaccgccgaggaactgcgcacgctccgccgtggcagcgagctgcgcaacggcaatgatggcgatgaccgcgacatgcggcagatcgccgcgcacgtcgacctgaagctgtccgacgcactcaccttcggcacgcggctctactacaaccgctatgaagacgaccgccgcgtgaccttcagcgatctgcccaccggcaacctgccgcgtcagcgccgcgtgtgggatgagcgccagactggcctgctcagcacgctgacctggcaggccagccccgcgcttactgtcgagggcggcctgaactacgagcagcaggacaacggctatatccgcgagcgctacgcctacgccgaaccgaccgattacagccagccgccggcgcgcgtgcagaacgacgatcgccacagcttcgacaactggggtgcctacgtgcaggccgtctaccagccggtcgaggcctggaagatcgtgccggcctaccgcgtggaccgtttcagtggccgcacgcacctgatgaacggcatcaccgctcggctgcaggattacggcagcatcggtcagcccaagctgagcatcatccacagcctgggccagaccacccacgtctacgcgaactggggccgcaccttccaggtgctgaccgggtccaccgcgccggcctacctcacccccgggcaggcaccgatgcagccgtccaccaacaccggcatggagctgggcctgaagttccagccgttccagggcgcccaggcgcgcctggcggtgtggcagcaggacgcggaaaacgaggtatccaacatgccggccactggcaccacggtcaccctgggcaagacccgccgacgaggcgtggatgcgcagttgagcctgcaactgggcgacgactggacggtatgggcttcgcacgcctaccaggaagcgaagatcacccgcgacgaccgcgatgccggcatttccctgcagggccgcgaagtggctgccaccccgcgccatatcagcaatctgggtgtggattaccgcgccacggatgcgctgcggctgggcctgcaggcgcgtgcacagggcgattactacctggaagaacgcaacgtggccggcaagttcggtggcttcgccgtgctcgacctcagtgcggcctatcagctcaccccgcgtttcagcgtggacctgcagctgaagaacgtcaccggccgccagtacgcctacgcctggtacgacagcttcttctgggacagcgcccgcccgatgttctcgccggccccgggccgcagcgtgttcgtcggcctgaacatgaagctgtaa

SEQ ID NO: 499939 - DNA, 1068 bp, Stenotrophomonas maltophilia
atgctgtgtagacttcaatgcgcagggctgaccctgcttgccgcagccgtctgtggccttccgatcatggcccaggcagcggtaccggttgccgcgacacccacctgcacagttgcgccggccttcgctgctgccgtggcggagcccgaggtctatgacagccatatcagcttcagcaacacggtcaaggtgcaggtcaacgtcgatgcgcagggccgcgcccacgatgcgcgcgtgctgaacggctcccgcaaccgggtgctggatgatgcagcccggcaggcggccctcagctggaagtatcagtgcacgggcccgggcggcatcgcgcaaccggtcgtgcctgttccggaaccggcttgccggctggaccgcctgagctgggcggacaacgaacccaggttctccagcgcagtgcggtccagcggtttgcgcggctcggcggaagtctggttgcgcccggtggccggcgatccggcaaaaacggaggtgaagatcggccggagcagcggggatgcacgcattgatgacacgctgctcaacgccgcacggaactggcggctgacctgcccgccggacgcgcccgtgaagcacccctggatcagcttcacccagtcattcaacttcgaaccgcggcgccagccagcggccacggaggcatcagagccggagccagatgatgtggtgattgcaaatgatgccctgctggaattcggcaccgtcgccggcttcgtcgaagcgctgccgaagatgaagggtgtagatcttgcgccggatcagtcgagtcagccggggatgacgctctacaacaccagtcttggcgcgatcatgcgggaaatcgagatgaccgagggacggttgaagccggtgaccatgacccactggctggtgatggtgccgccccaccgcacggcaccggccgtggtgcgcaccttcaagcgcgaagtgatcgatgccaagacgggcaaggcccacatgcagaccgatatctcgatcctgtgtgaaagcggccctgccgaatgcgctgaactgcggcggcgacgcgacacattgctgcgatccccctga

SEQ ID NO: 499940 - DNA, 288 bp, Stenotrophomonas maltophilia
atggcccaatcgacccacaaccccgattaccagctactgctgaccgtcctgaaggcggcccgcaagcgggcgggcgtgtcgcaggtcgatctggccgaacggctggggaacacgcagaccttcgtgtccaagtgcgagagaggcgagcggcgcatcgacgccgttgagttggtcgagttcgccgaggcgctcggcgtggagccgctcgggctgctgggcgagtacctggatcagcgcgcggcaaggctgcgcccgaggtccaagaagagcagcgcgaaggtgcgctga

SEQ ID NO: 499941 - DNA, 510 bp, Stenotrophomonas maltophilia
atgaaacttctggccttcttactcttcgccatgattaccgggtgctcgaccacggcaggcagtggcgcgaacgtctcccgcagtggattcgacggcgcacgggtcgtgaccatcaacggccacggcaacgcctgcaagtcgatgcgctgcaccggcctaggtgcgcaatggacatctaagaatccggccgagtcggtcttggtcgtctatatcttcaacgacatcaagggcattactggcgcatcgctcaacatcgacggacagacctatgacctctcgactatgcagcccttcaccaacttcaatgagttgggcgcagcgacgcaggagtctcgcaaggggtttcttgtgccgttagacctcatccgcaagatcaccgcttcgcagcggacttggctgcgagtgcagaccactggtggatacgttgaggacgccgtcatcgatggacagaccgacagcaaggcgtatcacgcgctcaagcgctttctggcttcagtggagcagggctaa

SEQ ID NO: 499942 - DNA, 543 bp, Stenotrophomonas maltophilia
atgagtgacgaagcggcgcaggagttcagcgctatccagcgagttcatgaggccctgcagccccttgatgacgaggcgagggcgcgtgtccttacctacatcaccagcctcctcgggatcaacgtcaaggttgcaggaggacgggtgggatcggcttcctccggcaatgacgatgagggcgatgacgagagcattgacgaaggggcggcgaaggggacaaagggtgctccgacctactccaccttcgccgagctgtacgccgccgccagcccgaagagcaacggcgagaaggcacttgtggtcggctactggctccaagtctgtcagggcggagagagcttcactgcggccaccgcgaacaaggagctgactcacctcggccacaaggtcgcgaacatcacagacgccatcgattcggtgaagaaccagaagccgatgctcatgctccagctcaagaagagcggcaatagccgtcaggctcggaagctctacaaggtgagccacgaaggcgtgaagcgcgtggaggaaatgatcggtggatga

SEQ ID NO: 499943 - DNA, 744 bp, Stenotrophomonas maltophilia
gtggatgaggcccggctcgcggcagctctggccggacttctcgggccgacgcttgccgcggatctagcgggcgacctcgtgaagatcaggcgtgactgtgccacgcgcacgcttgagcgcgctgcgcccggcaagttcgtcgagaccttcgtgcagtgcctccagcacatcgacaccggaagctacgacgccaagccgagcgtggacgactacctcggcaagaaggtcgagaacacctcactgcccgagggcctacgcatctgcgccgccagggtggcgaggtcgatgtacaccttccgcaacaagcggaacatcgcgcacaaaaacgacgtggacaccaacacccacgacctggcattcacccatcagggggccgcgtggatcacggctgagctcctgcggtgcgcgacaggcgtgtctatgcaggaggcgggcgcgctgattgcgcttgtgcaggcaccggtcggtaccctcgtcgaggagataggtggtacgcgtctcgtccatgcggacgtgccggtgaaggccgaactcctgatcctgctccacagccactatcccgacgcggtaccggtggactcggtactcaggagcttgagccgccgaagcgcaggcaccgtccggaatcgcttgcgcgacctccacgcggagaagctcgcccacggcgacgcccggtctggctaccggctcacgcaggcgggtcacgctgcggccgtcgttgagatcaaggctctcgccgtatag

SEQ ID NO: 499944 - DNA, 297 bp, Stenotrophomonas maltophilia
atggcctacgaacccaagaagttctcccctgtggagctcgccgagctccacgcactacccgacgactcgctgctgactgcccaggaggcggcggccttcctgcgcctgaagtatggaacgttggcctggtatcgctgccagggcggcggccccacgttcacccgcgtcggaccgaagctgatccgctacaagctgggcgacctgcgcgactacgcaaagggccagccgatgggcgaaggcgtccggcgcgccgcgacggcgatgctcgccgcccgcaccgccaagtcggagggctga

SEQ ID NO: 499945 - DNA, 1923 bp, Stenotrophomonas maltophilia
gtggggcacgccgccgcgacgccatcgtttgaggccgcgtccgagtaccgcgacgtccgcctcgacctgattcccctgcgccgccgcgacaagatgcccgccgataagcggtggcaggaacgcgcctacgaccagggcgaggtgctggagcgcgcgaggcgcgacggcctgaacttgggcgtgcgcctccccgccgacgtggtcgtggtggacgtggacccacgcaacttccccgcggggcgcgacagcctggccgagctggccgcggagttcgacctaccgctcgcgtcggcgccgcacgtcctgaccggcaacctagaacaccccggccaccacttctacttccgcaagcctacgggcgccgtgctgctggacagcgtggacggcttcgcgggcgtggagctgaagtcgctcggccgccaggtcgtcgcccctggctccgtgcacccgaccggcggcctgtaccgctgggcgctcgactcgcccccgctgcaccgcatgccggacctgcccgcaagactggtcgaggcggcgcgcaggccggagaggaagcgggccacgggcgcaggtgagatcaccgccgagcagctcgcgtcgtccctggagcacctggacccgaccgacttccgcgagcacgacgcatggcgcgagctgatgatggcctgtcaccacgcgaccgacggcgtcggacggcaggagttcatcgactggagcacgtccgacccgaagttcgcggaccacgagtggatcgtcggtcgccgctgggactcgctgcacgccgaccgcgacgacgcggtgaccatcgcgacgctgcgcaggcgtctcaacgaagccggcgccgacatcgcgccacccgacgcggccgacgacttcgacgtgtgggacgaggccgaacccgtcgaggagcgcagccgctggaacttcctatcgctggacgacgtggagtcgctgccgccgccaaagtggctgttgcccggcgtgctgaccgagggcagcctcgccgccatctacggcgcgccagagtcgggcaagtcattcctcgcggtagacatgtcgatggccatcgcgggcggtatcgactggcacggacggcaggtcgagcgcggcggcgtcctgtacatcgccgcggagggcgcgcccggcctgggcaagcgcttccgcgcctggaaggcggacaggtgcgcccagggtcgcaggttcgacctgcacctcatgcgcgacgacctcaacctcgcggccgagaaggacggcggcgtgcgcgcgttcgcccaggccgtgaccgacgagctggggccgctgcgcctgatcgtcatcgacaccctcaaccagacggccgcgggcgccgacgagaactcggcgaaggacatgggccgctacatcgcgagcatgaagctgctgcgcaacgccacgggcgcgacggtggtcgtggtgcaccactcgggcaaggacctgggcaagggcatgcgcggcagctcggcgctactgggcgcgatggacaccacggtcgaggtggagcgcgccagcgacgggcgctcgatcaaggtcgctgtgaagaagcagaaggacgccgagcgcgaacccccgatgcgcttcaacatggagaaggccggcgactccctggtactgcgtcccaccgtgatggtcgatgtgcagggtgagttcggcggcgcgatggaccccatcctggagctggcacggcaggaggcgaacgagcgcggcggcagcatcccgttgaaggatctggtcgcgatcgtctgcgagcgggacgacgtctcggacaagactgcgcggcgcaagatcgagaaggcagtacccgaaggacgcagcaacgcaaaggcgtcgatcgacgggttcatggtctggcaggagcctggcgacgagcgcaacccgaagctcggaatccaggtcaggaccgaggggtaa

SEQ ID NO: 499946 - DNA, 513 bp, Stenotrophomonas maltophilia
gtgctttccatcccgaacaccttcacgcccgagcggcgcgagctgttcttccaggtgctggaggacacgtgctcgcccaagcaggccgcggcagcggcgggcatcagcaggcagacggccttctaccacaaggccaacgacatcgagttccgcacccggtgggagaaggccatcgaggtcgccctggactcgctcctggacgaggcgtacaggcgcgcggcgatcggctacgacgagccggtcatccaccagggacgcctggccaccaccgcggacccgacgaccggcgaggaaaggccgctcaccgtcaggaagcacagcgacaggctcctggaggtcctcctgaagttccgctacggcgaccagatggccgacaggctgcgcgtcagggtcgaggacacgggtctgtcggccgacgccctgctcgcgatgcccgccgacgagcgtgcccagctggtggcgctgctctccaagtacaacgcggcgcggccgcaggaggaagacgatgagtga

SEQ ID NO: 499947 - DNA, 246 bp, Stenotrophomonas maltophilia
atgagtgacaagctgacggtggccgaggtggtgcagcgcgcggcccagatcgacgccatgctggatgcgatcaccgacacctcgcccgacgcggtccaggcgatgggcgggcgcgacgccctggcccgacgcagcgagatgacctgcatcggtccggtgccgcgcctggacgccgagacctgggagcgcatgtcgcaggagtacgaggggcggcgcgagcatggcagcgtcaaccgcgggcactaa

SEQ ID NO: 499948 - DNA, 429 bp, Stenotrophomonas maltophilia
atggcagcgtcaaccgcgggcactaacggccacgcggtcgccgtcgaggtggacggggtgcgatacccctccgccaggtcggccgcggcagccgtggggatcggctacagcgccgtgacggcgcgctgccacgaccccaggcacccgaactaccgatggctcggcgccacgccgggcaggcgcgagctgaggcccgaggacaggcgcatcgccagggcgccggtcgagccagcacgctggccctgcgacggcggcaagcggcgcgccgacgtgctggacctcaacgagggtccgcccaaggtggtgcgccgcatcggctggctccgctgcatgtgctgcgggcgcttcaccttctccgaggacgtggtgcgcgtgcgcctgtgcgaggagtgcggcggcctgggcagcgcgccagccaaggacgcctga

SEQ ID NO: 499949 - DNA, 726 bp, Stenotrophomonas maltophilia
atgaagatcaccctcagcgacacccccctcctcagcacccagcagatcggcgagctcgcctcgaccctggacctgctgcacaagcgcaccctcgccgcgatcgagcggctgaacaaggacatcgcgacccgcaagcagcagatcgccgcgcgctggaagagcgcccccggcatcggcggggctgacgtcgcccgcttcgccgagcacgagaccgtcgccaccgtccgcgagatcaaggacaactccaaggcggagctggacaagatcctcaaggacgcgggcgcgccgcacgcccagctgatcggccagcggcagttctacgacagcccggcgaaggtcctggcccgcgcggccctgggcgatccgaagcgcaccgagtacctccagcagctccagcacgccggcccggccgagctcgcccacatggcccaggtcgccgtcggcacgcgcaacgtcgcactggcctcggccgtgctgtccctgatcgaccgcatgccctccaaggaccgcccggtcggcccggtcgagctggcgacggcgatgaagcaggacgacttcctgaaggtgcaggagtacatcaagctgggcgacgcgcgcctccagggcatcctggtcgccatccgcgcctggaactccggcaagtcgaacccgctcagctcggtccagctcgccatgcgcgagcaggagatcgaccacgacctgatcgagggcgacggcgatgactga

SEQ ID NO: 499950 - DNA, 282 bp, Stenotrophomonas maltophilia
atgactgaccgacgcgcccactacccgccgtgccacccggcgatgctggcactcgcggccctggtcgcggcgatccagcacaggtgcgacccgttccccgagcttgaagccgccgcagcccgcaacggcgtggccgtcggctccgatcagttcgacgaggccgcggcgctggccgggcagccgtactgccgagcgctggacctgtacgtcgaccgcgagaccaagcgcagggcggacgccctggggtcggggatggcgcacctggcgttcctcccggcctga

SEQ ID NO: 499951 - DNA, 381 bp, Stenotrophomonas maltophilia
atggcgaactacgcgatcgcgtttgacttgaatacggtcggcatgcgtgccgccggtttcacgaacgctcgaatcactcgtgtgtaccaagtggaaatcccacaggcactggcggcctgtggcttcactgcacaccctcaaggctcgctgtatcacaccgttagcgaccaggatccaattacggcgctgatgaccttgcaaggagttctgcaaacgcaggccccaaacttctgtgcctacgtaaatagggtgcacgtattccgtatggaagagtggagtgatgtcactgcattgatcgcgaatcggcccgctgcgcctagtccgactgccgaagaggagcttgaagagcaggacacccttgctatggcagccaatcagtaa

SEQ ID NO: 499952 - DNA, 516 bp, Stenotrophomonas maltophilia
atgaagctggaagcaatccccactaaggaactgctggccctgcacaaccggatcgccgacaagcccgcaggccccaagaccttcacgacgcgcgcgaagctcgtcgcgcggatcgagcaggtcgcggccgacaagaacatcgacctggcctcgttcgggcagccgaagaagcccaaggcgaccgcgcagcgcgcagagccgaaggccgaggccaccgaagcgccggatgcgaccgagaagaagtcgcgcggcctgggcgtgggcgcactcgcacgcgcgatcctgatggaccccgcaggttacccgcacgcgctggtggcagacatggtcaacgcgcagatcgagggcgcggcggcgacggcgaagtcggttcggtggtatgccaacgacatgcgcaagaagggcgtcgaggtgccgacccgtcagaaacaccacccggcagacatggacgaggagcagtcggccgcggcgctgtacacggtccgggtggtcgaacccgcgacatccgacgactga

SEQ ID NO: 499953 - DNA, 456 bp, Stenotrophomonas maltophilia
atgaacctcaaccttttcagcaacgactctgacgaaagcaacttcaagttcggcggggagatggtctcgggcagcggcgtgcgcgccgtggcggcgtgcgtcgtgctccgcgagccgggggccgactacgacctcgaagacccggacgcgccgtacgaactcaggggtgcgatcatcgacctcattgacggggaggaagcgtacagcggcctcatcggctaccaggacatcccccgctacgacgactacctgctgctgcacgccgcctacggcaacgactggccgacgctggcgctgaccgcctacatggagcgccacggagggatgagccgcaagaaggccaaggtcgccgcaagcacgatgtgggcgaaggcggtggagcgctacaaagagcggcgcgcgatcatggcccgcgaagcaaaggaagccgaggaggcaaccagagaagcagcatga

SEQ ID NO: 499954 - DNA, 1206 bp, Stenotrophomonas maltophilia
atgaagtcgaagatcacccagtccctcgtcgagagggcaccccggccagagccgggcaagtcggtcctgtacgccgacaccgagatgagggggttctacctcatcgtcacccccaccaagcgcagcttctacgtgcagtccctcgtcaacggccgtcaggtccgaacgaagctgggcgaccacccggcgatggacgccaagcaggcccgcgacgccgcacggcagacgctggtcggcatgcggggtggcactaacccgaacgaggagcgccgcagggcccgggcgcgcggcatcaccctgcgggaggggctggacctgcacctgaactcgcgtcggctggcagacaagacccgcagcggctacgagtaccacgtcacctactacctcaaggactggctcgacaggccgctggccgagatcggcgcggaccgtcagggcgtgcgcgagcgccaccgccggatcaccgagaggagcggcgccacctcgggcgacaacaccatgcgggtgctgcgctcggtctacaaccgtgccctgcggcagttccccgacctgccgcccaacccggtgggcaacgtggacatgaacggcatgcgccgacgcgaggtggacgccagccccgacaagctcaaggcgtggggcaaggcagtgctgtcgctgggcaacccggtgcgccgcgacctgcaaatgttcatgctgctgtccggcatgcgccggacggcctcgtgtgaggcgaggcgcgcggacctcggcgacggccacctgcacgtcccgaaccccaagggcggtgccgccaagaagttcgacctgcccctgtcgtcggcgctcgccgacctgctggcgcaccgcgaggcgaacgcagacggcgtaaggcgcaagacgccctacctgttcccggccgactcggcatcgggccgggtggcggaggtccaacagcacgagctgggcgacctcaccggccacgcgctgcggcacgcgtacgcatccctcgcgttgcaggctggcgtgccgctgctggaactgcggtttctgcttaaccacagcgcgtccagcggcggcgtcacgatgggctatctgcacccgtcgatcgatcacctgcgcgagcaccaagagaaggcatcgcgctacatcctcgacgcgctcggcctcgtgcacgagccgggaacgtggccgccgaggctggcaaccacgcccacgggggcgttgtaa

SEQ ID NO: 499955 - DNA, 1179 bp, Stenotrophomonas maltophilia
atgacacgcggtcggaaaaggaagttcaacccggagatccctggtcatatcgaccagggatcgctgccacgcgggatatattggggcgaaggccgttggtacgtgctcgacccgcaccccgaaggcatagggcagaagaaggaaacggtggcctcgcggcgcgcccgcctttcggatctgcacgcgatcatggaggcgcgagccggcggcaacgttcgtggaaccctcgactacctggtcgaggtgttcaagcggtcgagcgagtacatcgacctgtcgaagaagtcgaagcagggctacgactactgcgcagcaaaggcgtgcacctacctcttgcgcgatggtcgcccgctgggccaacagcgcatcgagcatctttcggtgccggtcctgcagcgagtggtggaaaccttggccaccggccggcctgccataggtaggctgcccctgatcgcggcaacaccggcggcagccaaccgcgttgccagctatctgcggcgtctgttcgcttggggaatccggcatggccactgcacgtcgaaccctgccgacggcatacgcaaggtgcgtgagaagcgcgacgcgcgcatgcctgaccacgacgcgttcgacgcggtgctgcgattcgcgcgcgcgtgcgccagccggcaggcgcataccgctggcagctgcccgccctatctccctgcagtcatggtgctggcctatgcggtccgcctacgcggcattgaggtgaacactctcaccgacgcccacctgcagactgagggtattcgcagcaatcgccgaaagggttcgcgcgacaacgtgacgctgtggaccaaggatctgcgcgcggccgtgaagtggctacagtcctaccgggacgaacggatgcgggctcatgggcgaccggtaccgatcaagcctgagcaacgatgcctactggtttcggagtccggcaccccgctcacgaaatcagccctcgacagcgcctggcagcgcctggtccgccgcgcggttgcggagggcgtgatcgagaaggaccagcggttcgcactccatggcttgaaacatcggggaattaccgacagcgaggataagagcgctggcggccacgtgaccgaagccatgcgtcagctgtacgaccattccgtaccggtggtgaaagcggccgtgaaaccaaaaaagaagggctaa

SEQ ID NO: 499956 - DNA, 225 bp, Stenotrophomonas maltophilia
atggcgcagatcctgcacttcaccgatctacaacggatctgcgcccctgatggtccgccccccacacccaccacggtggagcggtgggcggacagtcaagggattttgtataagtacgaccggcgcgggcgcatctggaccaccgtcgaggccatcaacgcggccttgggtctgcagggcgcatcggcgctgccacaggcaacaacactgctggaattggtctga

SEQ ID NO: 499957 - DNA, 273 bp, Stenotrophomonas maltophilia
atgacacagctgcagaagactgcgccgcgcgccctcctcgcctgcccggatggccacccggctcggtacatccatgatctacgccgcgagggcgcgggcggtggtcacctcatcgaatgccgttgcagcaccacggcgaagcacccgacgttcgacctggcgtgggcgtactggcacaagcaacacggcctgcagccgaccaccgcgccagtggaggaacccttgccgagcaacgtgctacagatgaaattgttcgccgcagggagggcttga

SEQ ID NO: 499958 - DNA, 156 bp, Stenotrophomonas maltophilia
atggctgagcaactactcctcttccctggcacaaccaccgatgtagaagctgctatccagaagatcctgaccctgcgccgcaagtgttgctgcagcggacaggctggcgaagacattggtctgatcagagccgctctgatgcaggaggccgcatga

SEQ ID NO: 499959 - DNA, 225 bp, Stenotrophomonas maltophilia
atgagtgcgtgcgattgcatggacaaggtcgaccagcgtctggctgaggctggcgccaacacacagctgtcccgttccttcttcctaggcgccgccgtcagttccacggtgaccatcgctaccaaggcggtggagaagaagcgcggccattcgccctgggctgtagcgcccacgttctgcccgttctgtggcgtgaagctgtctagcgaggtggccaatggctga

SEQ ID NO: 499960 - DNA, 177 bp, Stenotrophomonas maltophilia
atgcttgagctgctccttctctgcgtggcccccgcatctgccggcgctgtcctgcacaagctgtggaccacccgccccactcggcggcgccacagcggcctggccgtgggccagatccctcaggcgctgcgccgccgcgcccccatggccgttcgccgcaccggaggtgctgcatga

SEQ ID NO: 499961 - DNA, 324 bp, Stenotrophomonas maltophilia
atggctaagtaccgcaaacacccggcgctccttggcccgcaggaaacctccgcgcccctgtccaaggtcctttacggcccccagggcagcgggaagacgctgcacggccaggcgattgccgccaacctgggcctgcgccatgtccgcgacctggacgatgtccagctcacaggcgaccgcctgcagcgccacggctacctgtacctggccaactgccgggactacggccaacgggcggcgcagttgctcgggagccgactgctgcacatcgaccaggttctgaccgcgatcggcattcgccgccagggggtgcgcaatgcttga

SEQ ID NO: 499962 - DNA, 426 bp, Stenotrophomonas maltophilia
atgcacgacatgatcagcaagaccaaccacgccagggcaaatacggaggtgtcaggcaccggacctgaggcgaaggctagcacggctgggggaaagtgtggatttgccgcaccaccttccccggtcagcagcgcgaccctgacaatgcacatcacccataacaaggtgatcgtcaccgcacagttggatatggggggcaacaagaccgcccagcaggtgcttgagcgccgccggggcaacgcggttggctgggtgcagaccagtggcagcgaggacttcgccgtcgaggcagagtggatctccgccgagctagccgagctggccaaccgcctgcccttcccgtttgaggtcgccaacatgctgccaagcgttaaggctagccacaacgccgtggccgctgccgcgcaggaggtggcccatggctaa

SEQ ID NO: 499963 - DNA, 477 bp, Stenotrophomonas maltophilia
atgtccaacccctatacgtccggccacatctctcccaaccatacgcgcctgcatgcggttcgcctcgacgcagtcgtagccctgtattcggctcgtacgcaggaagagcgagatgccctgtttgagcaagcagccattctatcgaccgcgctcggccttcccgttccggtactgccgccaaacaaggcgggcttggcaagtgccaccgtggctgcattctggactgtggtcgcggaggccgtagcgtccgggatcctgcatgaccattcgcacgcagctgatcgcctagcaatcagtctgccggaagttaggaaagccgcactgcagatgggtcggcccctgccatcagggacacaactgacccgcgcccttacacgctgcccaaggctaattgcagccaatcacaccgtaaacagtcgcgtacgcgaaagggagggcaagggcatcgcggttcgatgctgggtgttcaagaagtga

SEQ ID NO: 499964 - DNA, 2697 bp, Stenotrophomonas maltophilia
atgcaggaagaaatccgccagcaggttctgtcgcgcatcgagcgcgactatggcctcaagcatcgcaacggcacgccctacatgcgcggcggcaagtgcccgcactgcggcaagaaggagctgtacaccagcttccagacaccgtgggtgctgcgctgcggccggcaggccaagtgcgggcaggaagtgcgtgtgcgcgacctgtacgacgacctgttcgatgactattccaagcacaacccgcagacgaaggaggcaccgcacgcggccgctgatgcatacctggctaccggccgcggcttcaacgtcaaggcgctgaaaggcctgtatacgcaggaggactactacgaccggtccaagcgtgaaggcaccgccaccatccgattccccctggtcaagggcggctggtgggaacggctgatcgatcgcccccaccgcttcggcaagatgaaggcacgctttgcccccggcgagagctatgccggcgtgtggtggggcgaagctgccaaagaccagctgcgcacagcacgccaggtttggattgtggagggcatcttcgacgccatcgcgctgctgcagcgcggtgtgtgcgccgtcgctgccatgtccagcaatgcgtaccccgagctgtcgctcaaggaactgcgcgacgcacgccccaacgatctgcccaccctggtgtggggattggacaacgagccgagcgcccgcgcctacaccgtcaagcacgtgcgccgggccgaaaagctgggcttcacctgcaaagcggcccagatcgagcagccgggcgacaagaagaccgactggaatgacctgcacctgcgtgcccaggctgccgaagatggggatagccagtggcaggccgatatcgacctggcgctgcacaacggcgcgctgctcttggcgcgtactgccatggataagggcctcatcatgtatgagcgcgagaaaaacaccgagttccacctcgaacacaactcgcgcctgtactggttcgagttcgacgccctgcgctacgaaaagctgtgccgcgagcgcgccgtagaccgcgacctggccagcgaggatgaactggaagccgaggagctggccaagatccagcgggcgagcgcctccatccgccagatcgccaactgctaccccgaggccctctacttccagaagcacgaggccaccgacgagagctggtacttcttccgggtggacttcccgcacgatgccccgtcagtgaagggcacattcacgggcgcgcagatcgccagcgccaccgagttcaagaagcgcttgttgagcttggcacagggcgcactgttcagcggtaccggcaagcacctggacaaggtgatggacgctcagacgttcggcatcaaggacgtggctacggtcgatttcgtcggctacagcccggatcacaaggcatacatcttcggcgacctggccgtgcgcaatggcgaagtcaccatggctaacgccgaggactatttcgagttccccaagctgcggatcaagaccacgcagcgttcgatccgcatggacattcagcgcgaccacgaagcctatcggacggaatggctgcagtggctgtggacgtgcttcggcacgaacggcatggtggcactcacgttctggttcggctcgctgttcgccaaccagatccgcaccgcgcacaagtccttcccgttcttggaggctaccggcgaggccggcgcaggtaaaaccacgctgctgacgttcctgtggaagctgctggcccgcagtgactacgaaggcttcgacccggccaagtcatccaaggccggccgcgcccgcgccatgggccaaacctcgggcatgccggtggtgttgttggaagctgaccgcgatgcgcccgacaaggcgcacgccaaatcctttgaatgggacgagttgaaggactattacggtggcggcacgctagccacgcgtggcgtgcgcaacggcggcaacgagacctatgagccgccattccggggaacaatcgtcatcagccagaatgccgccgtggacgccagcgaagcgatcatgacgcgtatcgtcaagctgcatttccgcaagcccaatgccaccaccgaaagccggttggcggcagacaacctcaacgcgctgcaggtcgaggatctgagccacttcctgatcaaggcagtgcgcgccgaggcgcaggtgatggagaagtttggcgagcgggtgcgcttctacgaggccaagttgcgcgagaacaaggatctgcgcatggaacgcctcatcaagaaccactcccagatgctggctctgctggatgggcttcgcctggtcatcgacattcccgaagatatggtaacggccacgcgtaaggcgctggttgccatggcaatggagcgccaatcggccgtcagcgcagaccatcccctagtcaacgagttctgggaagcctacgagtacttggaaagcctcggcaacggtgagcgtcctgtggtcaatcactcccgtgacccgcagcgcattgccgtcaatctgaacgatttcatcgccaaggcagcgcaccacagccaaccagtggcggatctgaagttgctccgtgcgtacctgcgcgactcccgccgctacaagctgatcgatgccaatctgacggtgaacagcgccatcaagaccaacagcaccggaggtggcgtcgctgtccgctgctgggtgttcaagaagtga

SEQ ID NO: 499965 - DNA, 636 bp, Stenotrophomonas maltophilia
atgcaccccaccaccgacagttccatttcacaggagagaaccatgcaacaaacagaagatcgcgcgacgcgagccgtcaacttcataaacttccacggcctgacgctgatggtggtggagcacgaaggtgtcgagtacgtcgaggccaagccgctgaccgacctcgccggcatcgactggcggggtgcgcgccgcgccctccaagagggtgatagcgccattctgtacggcgccacgcgcctcgaaccaccctcaatcgccggtttggggggacttaagtcccccccggaaggcgtcctatatctccgcctcgaccgctcccgcatgtacatggcacgcatcagcaccgaccgtatgcgggcaaacggtaatggggacgctgctgaccaggttctggcgctgcagatcgagtgggcgggggtacttcacaggtacgaaacccaaggcatcgccatgaagaacgggcggaacggaatcctgcgtgacctgctcgcactggccaagacccgtgatggcctgaacgacccacgcgagcgaagtgcattcacccacctgctgcacgaagagatgcgcgcaatagggcttcccatggacagccttgatgccccgcaaggcaagctgcccctgaacgcctga

SEQ ID NO: 499966 - DNA, 258 bp, Stenotrophomonas maltophilia
atgggcagacacaacggccacgtgccgccgcaccgcaacccgccgccgcctcatgccgacccgcacgggcacctcatcagcgccgccgacctgacgcgcctctggcgtatctcctacgccgtcgagctgatcgccgtcctgcctgcagaggcggcaaaggtgctgggcatcaccgccgaccacacgtcagccgtggccgagtacatcaccgatgacctgcgcggaatcctcgcccgctccaaaccggcggacgaatag

SEQ ID NO: 499967 - DNA, 309 bp, Stenotrophomonas maltophilia
atggcgggtgcctccaacgtggtgatccctgatgccgccgtgcgtccggtgatcgtgctggaaactcaggtgcctggctttggcctgcgcgcgtccttcgaccaacgcggcgtgctgtatctggcgttgatacacatcgaatcggacgcggccgccaccgtctccgcgcacaagtccaaggatgtgcagcgcgccgccaccgaaggcatccagaccggaaccgtggtctatctgctcgccaggggcgaagccgaccggttcttccaatggctgcgcaccggcgacaactatccgggcggggtgaactga

SEQ ID NO: 499968 - DNA, 243 bp, Stenotrophomonas maltophilia
atgcctcatggcgccccttccacgcccggcaatccttccgcgcgtcacatttcctttgtcttcggcctgattgccgacaccctcgaatggcccaatgaggcatatcaggcgttcatcacgcgcctgctcgccctcggcgtggcacctcacgaaatcaccctgagcgacgttatcgccgcctacgccgctacccgtgacgccaacggcggcgcgcctggcaccgacgacaaggcggtgcactga

SEQ ID NO: 499969 - DNA, 207 bp, Stenotrophomonas maltophilia
atgatgcgacacaaaacccagcgtgacggatggtctaccgccactgcgccgaacttcgtcagcagccccagcggcgttgaatacgttccgtacaccgagaaggcccgcaaagcggccgaactgcgcgccctggtggaagcccacatcgccgccggtggcgactaccagcagctgccctctgccgccgttgcacaggtgtccgcatga

SEQ ID NO: 499970 - DNA, 333 bp, Stenotrophomonas maltophilia
atgaccgccacacgacgcacgactcagcccaaattgcgtacgccggaggaagcccgccagcacctgcgcgacatgggtatcaccgtggtcgcatttgctcggcagaacaacctcgaccgtcacgcggtcaacgatgcgttgcggggcgttggcaaaggcaacttcggcaaatcgcatgaagcggctatcgcgcttggcatcaagcgcgatcccaattcttgcacagttcccgccaattcccgtcagtcgcccgcaacacgtgacaagagcggtaaagcctcgaaaaagaccaccgccgccaagaaggcgcccaaggctcggagcaaggcatga

SEQ ID NO: 499971 - DNA, 432 bp, Stenotrophomonas maltophilia
gtgagtgtgggtcttaggctgaaagaagaaaggaagcgtctgggccttacccaggaggccatgggtgtggcgtgtggtgtcaccaaacgcacacagatcttctatgagatggacagcgttggagcgagcgcggcttacctgaccgctgcctacgaactcggcgcggatatcgtgtatctgctgaccggcaaccgcgagcggttggccgaggccgacgcggatctgcttgatgcctggcgcaatgcgtcggcttcggcacgcgccgccgtgatggccgcgctgcgcggtgttacaccggcggcgacaacagctgcgccccggaccagcttcgagaacaccagcatcggccagcagatcagcggcgatgtggatctgcgcgggcaaaaggtcgttgtcaaggctccgaaaggatcaaagaaagccgcccgctga

SEQ ID NO: 499972 - DNA, 1032 bp, Stenotrophomonas maltophilia
atgagggccaccccgtaccccattccggcttggcgcgtggtgctcgatggcgtggacctgaccagccgtcttgccccgcgcctgctcgacctgtcgctgtcggagagccgtggcgacgaagcggaccagatcgacctgcgcctgcacgaccatgacggacgcctggcgctgccacgtcgcggtgtcgagctgcaggtggccatcggctgggagggcagcggcctgttcgataagggaacattcgtggtcgatgacgtggagcacagcggctcgcccgacattctgagcatccgtgcgcgttcggcgaacctgaccggtgcggtgcgcagccgccgcgaacgcagctggcacgaaagcaccctgggcgacattctcggggcgattgccggcgagcattccctgcggctggcagtggccgcggatctggcgcgccagcccattccccacctcgaccaggccaacgagagcgacatcaacctgctcacccgcctgggcaagcgcttcgacgcggtggccacgatcaaggccggcacattgatcttctcgcccatcggcgccggcaccacggccagcggcgagccgctgccaggcgttcagatcacccgcgccagcggtgaccagcaccgctacagcgtcgccgaccgggagaagtactccggcgtacgcgcgtactggggcgaccgcaagggcgcccgccgcacgggcgtgctggtgggcacctcggagaatgagaagaagctgcaggccacctatgccaacgccgacgaagcgcgtcagcaggccgaagcggagttcaaacggctggatcgcggtacggcacaactgagctacacactcgcgctgggccgcgccgatatctaccctgagcagacggtcaccgtcagcggcttcaagccggagattgatggcaccgactggctggtgtccaaggtcacgcacaccatcgacggcagcagcggtttcagatccagcctcgagcttgagcgtggcggcgaatccagcgcagaaccttcggcttcagataccgagtga

SEQ ID NO: 499973 - DNA, 402 bp, Stenotrophomonas maltophilia
atgatgatgacctacggcacctttgtgttttcgctgtctacagctgcctacgatcagctgcagcggcaaatgagctggcgccacgccagcagcgagcgcctgcacgcgcgccctgcacgccagtatgtcggcctgggcgaggacaccatcaacctgcaaggcgtgatcgcgggcgagctggcatcgaatctgcacgtgttggatgatctgcgcgcccttgccgacgagggcaagccgcaagcgctggttgagggcgcggggctggtctacggcgcctatgtgctggttggcctgaacgagacacgcaaggagctgttcgccgatggcacgccacgcctgatcgagtttcagatgcagctcgaacgcgacgacgacggcgccgccgccgaggtgccggcatga

SEQ ID NO: 499974 - DNA, 2865 bp, Stenotrophomonas maltophilia
atgagcggcggcaaccttcgcctgcaggtagtcctgcaggcactcgatcaggccacagcgcccttccgcaaggtcttggccggcagcaaggggctggccggcgccctgcaggagcagcaggccaccctgcgccgactgaacaacgcccagcgcgatgtgagcgcgtatcgccagcaacagcaggccatgcggtccacccagcagagctatcaagaggcccaggtccgtgtcgccgcgctggcccgtcagatggccaccgctggcacgccgacccgcaaactcagccgtgagttcgctcaggccaagaccgccgccgcccagctgaaaaaccagcatcaacagcaggccgttgaactgcagcgcctgcgctccggtctggaccgtgctggcatcagcacgcgccagctcggcgcccatgagcgcaagcttcgcaccgacattgccgctgccacccagcagatggaacagcagcgcacgcgcttggccgcactggatgcggctcaggcacgtagccagaagatccacagcgccggcatgaatgccgccgcgcacggtgcaggtgtggcgttcgccgcattcggcgccctgcgcgcgcaggcacttcctatcgcccaagccatgagcttcgagtcggccatggccgacgtgaagaaggtggtggacttcgacacgcccgatggcttcgagaagatgggcaccgacattgaggaactgtcgcggcgcctgcccatggtgcccaccgacattgccaagatcgtcgccgccgccggccaggccggtatcgccagcaacgaactgacccgtttcgccgaggacgcggccaagatgggcgtggccttcgacagcacggccgaagaagccggccagacgatggcgacctggcgcaccgcgttccgcatgggtcaggatgacgttgtcgtgctggccgacaagatcaactacctgggcaataccggcccggccagcgtccagaagatcagcgaggtggtaaaccgcatcggtgccctcggcgaggttgccggcctgggcagcggcccgctggccgcgctgggcgccaccgttgccggtatgggtatcgagtcggaagtgtcggccaccggcatcaagaacatgctgctcaccctttcctcgggcgaggcggcaacggcccgtcaggtggcatcgttcgacaagctcggcctcaaggcgggcgacctggccaaggcgatgcaggacgacgccggcggcgccattctcgacgtgctggaaaagctcaagcagctgcccaaggccgagcaggccgcgacgatgacgcagctgttcgggcgcgagtccattggcgccatcgccccgctgctgaccaatctggacctgctgaaagagaacttcggcaaggtcgccgatgaacagaagtacggcggttcgatgaatgccgagtacgccgcgcgcgtgggcacggccgagaacggcctgaccctgctcaagaacagcgccaccgtgctggcccagcgcatcggtaagaccctgctgccgacggtcaaggaaatggccgcgcgcattgccgccgtcgccgacaagatggccgagtgggtgaaggagaatccgcagctggtggccaccatcgccaagctggtcatcggtggtaccgcattggccgtcgcactcggcgggctggtggtggccggtggtgtcggcgccatggccctgagccagatccacaaagccgtctcgctgctcagtggcggcggcgggctgggcaagctggtgggccaggtgctctccctcggtggccgcgcgttcccgatgctgttcaacgtcggccgcatgctgctgccgctgctgggcggtatcagcctgccggtgctggccatcggcgttgccatcggtgtggtcgccgcgctggtgtggaaatactgggagccgatcaaggcattcatgatcggcacgtggcagggcatcctcgacgtggtcaatccgatcatggatgaactggccaaggcgctcgaaccgctcggcccggtgtgggacatggtgtccggcgccatgggcaaggcgtgggattgggtgaagaagctgttcgccccgttcgaggccaccagcgaacagctgcagggcgccactgatgctggccggggcttcggcaacatcctgggcaacgtgctgaccgtgaacctcaagatggcggtcaaggccatcggttggctggtcagtgtgttcaccacgattctgcccgcgatccagaacgccatcggcggcgcgtggacctacctgcagggcgcatgggatctgatcgtgggcctgttcaccggcaatggcgagaagatccgctcgggcctgagtgcgatgtgggcaggtgtgaaccagatcctgctcggctggccggcgcagatgatgcaggccggcatcgacatggtgcagggcctggtcaacggcatcgtgtccaagggcggtgctgccatggaggccgtcgccggcatcgcctcgggagtggtgggcaagttcaagggcatgctcggtatccacagtccgtcgcgcgtgttcgcacagttcggcgacttcaccatgcaaggtctggccggtggtctcgaccgcagccagggcgagccgctgcagcaggtaaccagcctaggcgaccgcatgaagcaggccggcgcaggcatcgcgctgggcgcggctgcaatgcccgctatggccggcggcgcgccggtgatcgccccaagcgctgcagcggccgcagcgggcggctcaggcgcttccagctacaccatcaacatcaccgcgccggaaggcaccgatggccagggcattgcggccctggtgcgcgccgagatcgagaagatcgagcgcgacaaggcgggccggcgttcctcccgtctgactgactga

SEQ ID NO: 499975 - DNA, 138 bp, Stenotrophomonas maltophilia
atggtcaccgtgatcgccatcgtagttgcgctgctcctgctcgggttcgtcctggcgctgctggtgtgggcgttgagcgcgctctgccgtctgctggccgtgttcgctcccgatccatccgataccacgccgccgtag

SEQ ID NO: 499976 - DNA, 312 bp, Stenotrophomonas maltophilia
atgaccgccaagaccaacaccgccatcgccccgaacaccatcgcgctcgactaccccatccagcgcggcgagcagaccatcgaaaccatcacgctgcgcaagcccaatgccggcgagctgcgcggcatcaagctggtggatctgctgcagatggacgtgggcgcggtggccacgctgctgccgcgcatcaccgagccaaccctgaccgctgctgatgtgaacaagctggaccctgctgacctggtcgccatcggcaccgcgacggcgggttttttcttgccgaaggcgcagcaggaattcctcgctgtgtag

SEQ ID NO: 499977 - DNA, 510 bp, Stenotrophomonas maltophilia
atgtccctgcccagcaaactgaaaaacctcaacctgttcaacgatggcgccagctatctcggccaggttgtcgaggtgaagctgcccaccctgacccgcaagatggaagagtaccgcgccggcggcatggtcggccccatcgatatcgacctcggccaggagaagatcgaactggaatggaagtgcggcggcctgatgcgcgacgtgctgcgccagtacggcgccgtgcgccacaacgccgtgcagctgcgcttcgctggtgcctaccagcgcgaagacagcgccgaggtcgattcggtggaaatcgtcgtccgtggtcgccacaccgagatcgacgccggcaccggcaaggtcggcgacgacaccgagttcagcaccaagacctcggccagctactacaagctgagcatcaacggccgcaccgagatcgaaatcgacatggtcggcatggtgttcatcgtcaacggcgtggacttgctcgccgcccagcgccgcgccatcggcggctga

SEQ ID NO: 499978 - DNA, 1170 bp, Stenotrophomonas maltophilia
atggctcaggactatcaccacggcgtgcgcgtcatcgaactcgatggcggtatccgtcccatccgcaccgtcgccactgccatcgtcggcatcgtctgcaccagccaggatgcagacgacgcaaccttccccatcgacaccccggtgctgctgaccgatgtgcgtggcgccatcgccaaggcgggcaccaagggcacgctcgcaggcgtgcttgccgcaattgccgatcagtccaacccggtgaccgttgtggtgcgcgtggatgaaggcgaggatgctgcgaccacgaccagcaatgtcatcggcaccgttgcaggtggtcgctataccggcctgcaggcgctgctggtggccgagagcaagctcggcgtgaagccgcgcatcatcgccgcaccggggttggacaccgaggcggtcaccaccagcattgcttcgatctgcaagaagctgcgcgccatcgcctatgtcggcgtgggcgaggccaagaccgtctcggaaatcctgctctaccgcaagaagttcggcgaccgcgaactgatgatgatgtggcccgacttcctgacctgggacaccacggccaagaaggaagccgtgagctacgccacggcccgcgccctcggcctgcgcgccctgatcgaccagcagaccggctggcacaagaccctttccaacgtgaaggtgcagggcgttaccggcatcagcgcggacgtgacctgggatcttcaagacccgcagaccgacgccgggctgctcaatgccgctgcggtgaccacccttatcaacagccagggctaccgcttctggggttcgcgcacctgcagtgacgatccgctgttcgccttcgagtccgccacgcgcactgcgcagatcctggccgacaccatcgccgaggcgcagatgatctacatcgacaagccgcttcacccgtcgctggtgaaggacatgatcgagacgatcaacgccaagttccgcgagttgaagaacggcggctacgtgatcgacgccaacgcctggtacgacgaagcggccaatctgcccacgcagctctccagcggccagctggccatcgactacgactacaccccggtgccgccgctggaaagcctgaaccttcgccagcgcatcaccgaccgctacttcgccgacttcgccacccgcatcaacacctga

SEQ ID NO: 499979 - DNA, 342 bp, Stenotrophomonas maltophilia
atggatgccatcaacggtggcagcgccgagggcaccgcacacctggtgcagtccatccgcgatgtgctgaccaccccactcggttcgcgcatccaacgccgtgagtacggttcgctgctgccggaactgatcgaccagccgttcaacgatcacacccgtctgcagctgttcggtgccaccgccaccgccctgatgcggtgggagccacggatacggctcacccgcgttgcgctcgcccaaggcgatgcccccggcgtctttgtgctcgacctggactaccagcacgcgggtagccgccaaccacagcgcgccaccgtcccgcttcgcttccaaaccccataa

SEQ ID NO: 499980 - DNA, 549 bp, Stenotrophomonas maltophilia
atggatagcggcctgctccaaaaagtaagcaacctgatgcgcgacggcgtggtgactgaggtcgatcacgccgccgcgctctgtcgtgtgcgcagcggtgaactggaaaccgcgttcatcccttggctgacgcccgccgcaggcaaggtccgggtgtggctaccgccgagccgcggcgagcaggtccagctgctctgcatcgacggtgacctggccaacgcggtcgccgtgcccggaatgttcagcaacgcgttcccggcgccatccagcaacccggatctggtgctgatccagtttgccgacgccgccaccgtggcctatgacagcgccgcccacgccctcgcagccaacctgcccgccggcggcaccgtcagcatcgtggccgacggcggcctgcatatcaccgggccggtcaccattgaggggaacgtctccatcaccggcaaggccgaagccagcgaggatgtgatcgccggcggcgtcagcctcaagcagcacaagcaccgcgacgtgcagcccggcggcggtacttcgggaccgccggcgtga

SEQ ID NO: 499981 - DNA, 1167 bp, Stenotrophomonas maltophilia
atgcgattgaagttcaccacacgcggccgcgccgccctggtcaacgcggcccacaccggcaccaaggcagtgacggtcacgcagatcggtgtcaccgatcaggcattcgttccagaccccaatgggagcgacgttctcctacccggcgagcgcaagcggctgaacaccttcggcggcaaagccgtggctgacgacgtggtgcatctgaccgtccgagatgaaacgaccgactcctacgtgctgcgcggcattggcctgtacctggccgacggcacgctgttggccgtgtacgggagcgacaagatcattcttgagaagtcggcccaagcgatgatgatgctcgccatcgactggatgatggcggatatggacgccaggcagatccagttcgggaacgccgatttcctcaaccctccggcaaccaccgaaacgcagggcgtggtcgagctgaccacagacgaagaggcgatcaccggtcaggaccgccagcgtgccgttcactctgcggccttgcatgccacgttgaacgctcgcttcggcgcagacgcacccacgccccttaccaagaccattctcgcgcgcgacaacgcaagcgacgtgcgcaaggatctcggattgaagggggcctcgctcaaggatgagggcgccggaaacggccttgatgccgacaccgtggacggcaagcatgcggccgacttcgcacccaagcagcacaagcacactatcgccgatatcagcgacctccaatctgatcaccttctaccggcgggcatggttgcccacttcgcgatggcgtcacccccagggggttggctgcgctgcgacggatcagacgtgagtcgaacaacctacgcggccctattcgctgcgatcggcacaaccttcggcagcgccaacgggctcacgttccgactaccagatctgcgcggcgagttcattcgaagctgggacaccggtcggggagtcgactgggccagagagctgggtagcaaccaggcagatgaccttagagcgcactcccacgctgtccgtgcatacaggcctggtgggattcgcaatgtggccattggctccgatgatgcagtaggtagtgtgtacaccgaaccggcgggtggcggtgagacccgtccacgcaacgtcgcgcttctcgcttgcatcaagtactga

SEQ ID NO: 499982 - DNA, 552 bp, Stenotrophomonas maltophilia
atgagtagcgccagcctgctgccgcccaacgcaacgccgttggagcgcgcattggaagcggcagacgccacggtgctgaccatgcccatgcggcacggccagatcaaagacccgtggacgtgcccagcggagttcctgccctggttggcatgggaaatgtcgctcgatacctgggacagcgcgtggcctgagcacatcaagcggcagcgcatcgccagcgccatcaacatccagcgacacaagggcaccgccggcagcgtgcgggaagtgatcgaatcgttcggcggatcggtggcgatccgcgaatggtggcagcaggagccacgtgggcagccacacaccttcgagctggtgctgacaatttccgggcgccccggcgttgatccctcggccaagtacgtcgaggacgtaattgccgagatcagccgtaccaagcctgtgcgttcccacttcacgttcacccaaggcgccgagttcgccgagcagctggggctcgtcgcggcgatcaaggccgtcgcctaccgccgcttacaaatgaccaccgaggactga

SEQ ID NO: 499983 - DNA, 891 bp, Stenotrophomonas maltophilia
gtgtctacctttaccgccgttgacctgtcccgactgccgctgcctgcggtgtttgagccgctgcagttcgagcagctgctcgcccggcgcgtggccgagttcaagcggtacatgcccgactacgacgccctggtcgaatccgatccggtctacaaggtgctgcaggccagcgcctaccgcgaactgatgctgcgcgagcagttcaaccagcgcgcacgcggtctgttcctggcctatgcgatgggcgccgatctggacaacctcgccgccccctttggtgtcacccgcaaacagctggcccctgccgatcccgaagccgggacgccagccgcgttcgagacagataccgagtttcgacgccgcatccagctggcccccgaagggctgtcggtggccgggccagagggcgcctacatcttccacacgctttctgccgacaccgccgtgcttgatgccagcgccaccagcccggcgccaggcgaggtcgtggtaaccgtactcggacgggacggcgacgggacgccttcggccgcgctgctggccaaggtcaacgacctactgcagagcggagaagtccgcccgcttaccgatcttgtgaccgtcgcgccggcgcagatcgtcagctacaccgtcgatgcagacctgaccacctttgacggcccggatgcggccgtggtgatcgccgaggccagacgacggctggctgctttcatgagcgaggcgcaccgtctcggccgcgatatcgccgtatcggccatctatgcccagctgcacacagagggcgtgcaacgcgttcgcctgcgcagccccacggccgatctgagcatcagtcgcacgcaggccgcgtactgcgcctcggtcacagtgaaccatgtgggcaccgatgagtag

SEQ ID NO: 499984 - DNA, 462 bp, Stenotrophomonas maltophilia
atgagcgaggatctgcagcggctggaagcctgggcggcaccgctcctgcggcgtctgcagccggccgaacgcggcaagctggcacgcaaggtaggtacggccctgcgccgcgcgcagcagcggcgcatcgccacccagaagaaccccgacggtacgccctacacggcccggcgcaatccaccgctgcgccgcgcgaaggccggtcgaatcaaacgaggggtcatgttcgccaagattcgacaggcccggcacctgcgcgtgcgtgtcacccccaacgaggttgccgtgggatttgccggtcgcgtctcgcgcatcgcactgattcatcaggaaggccgtgccgacgccgtgagcaagggtggtccccgcgtgacctatgcccgccgaaagctgctgggcttctccccagccgacgaacagctggtgcgtgatctgatcctcgaccatctgcgcgagccgtag

SEQ ID NO: 499985 - DNA, 486 bp, Stenotrophomonas maltophilia
gtgaagaagccgcagctgctgcggcagcacctggtcgcggccatccccgcgctggccagcgacccggacaagctgctgatcttcgtggacagcggtgggctggccggcacctaccggccgggcctggcattcgagtaccgctacaccctcgacctggtgctgaccgacttcggcagcgcacccgaggcggtcatggtgccgctgctgcagtggctgacccgtcaccagcccgagctgctggccaaccctgccaaccgcgagaagctgaccttcgaggtggacgtgctgggcgacaacctggtggatctggccatcaagatgccgctcaccgaacgcgtgctggtcacccgcagcgccgatggcaccgtgcagctgcagcacctgcccgaaccgcccaccgaggacgcccatgccgatactctggcaggcggcatcttggtggccgacggcgtgcagatcgccaccctgccggcaatcaccgaatga

SEQ ID NO: 499986 - DNA, 525 bp, Stenotrophomonas maltophilia
atgctctaccgcgcccttgcattggccgcattggtactggccaccgccggtcttttcagctgccagcaggggcgcgtcagtcgcgccaccgccgcgctggacaaggccaatcgcgccctggccactgccaacgccgagaagtccgatctggccggcaagctggagctggcccaaggcactacccgcgtcgtgaccgagtacgtggaccgcgtacagctggtgcgcgagcgcgggcacaccatcaccaaagaggttcccgtctatgtcactgcgtctgctgattctgcctgcgctgttactgctggcttcgtgcagctccacgacgccgccgcgagcggcgaccccgccgccggccctgccggagatcctgatgcgcccgccaccggcactccgctctctgccgtcgccgaaaccgtcgccggcaactacgccatctgccacgccaccgtcgagcaggtagtggccctgcaggagctggcacgcaatctgcacgccgagcttgagcgacaggcgggtggacagtga

SEQ ID NO: 499987 - DNA, 636 bp, Stenotrophomonas maltophilia
atgctcacccccaccctgctcgcccagatcatgcagtgccctcagcagcgcgcccagcgctgggccgaaccgctcaatgccgccatgaagcgtttcggcatcaacacgccggtacgtgcagcctacttcctcgcacagctgggccacgaaagcctgagcctggcccgcactgaggaatcactcagctacagccgcgaacggctactggaagtgttcggcaagtacatcaccggccccgaggcggcggcgttcgttcaccaaccggccaagctcggcaaccgcgtgtatgccaaccgcaacggcaacggcaacgaggccagtggtgatggctacctgttccgcggccgtggcccgatgcagcacaccggccgtgggaactaccgcagcatgggtcagctgatcggccagccgttggaagagcagccgggcctgctgatcgagccggaaatcggcgccatggcggcggcggcgttctggcaggtgaacggcatcaacgcctacgccgaccagcgcgacgtactggccgtcagccgcatcatcaacctaggcaacgcccgcagccgcgccacgcccaatggcatggccgaccgcaccgcccgcaccaaccgcgccctggcggcgctgggggcgcgctga

SEQ ID NO: 499988 - DNA, 276 bp, Stenotrophomonas maltophilia
atgactgaattcctgaccgccgccacgctcctgtgcagcgtggcgatctgcattcgcctgctgacctaccggcccatgcccggcgccaatcatcgccacggcatcgcctggtgcacgtggctgctgaccacggccaccggcggccaagccctgcagatcctgctgcagggaccgcgcgccaccgtcagcgtctggcagctggtggtgctgatcgtgctgctggtggccacctaccgctcgcgcggcaacgtcgcccatctgttcgggagccgatga

SEQ ID NO: 499989 - DNA, 360 bp, Stenotrophomonas maltophilia
atgaccgaaccaacctctaccggcagcatggtggccctggccaccggcgttggccttgcctcgctgctgccgggcatcgaaaccgacgcattcatcggcgcattcgccggcgggacgctgttcgtcgtctcggccaaggatctgtcgctgtggaagcgcctgatctatctggccatcagtgtggtggctggctacatgggcggtaccgaggtcatgcgccggttcgacgtggcttccagcggcctggctgcgttcctgtgcgcggcaaccatcatcaccctgaccctgaccctgatcgagcgcagccgcaccacggtgccgactacgacccggtactcacgggagaacgtcgatgactga

SEQ ID NO: 499990 - DNA, 216 bp, Stenotrophomonas maltophilia
atgcgcgtcattgccctgcagggcgacacgctcgatgcgctctgccatcgccacttgggcgcaacggccggcatggtcgagaagaccctggcattgaactacggcatcagcctgctcgggccggtgcttcccatgggcaccgaggtggaactgcccgacgtgcccgcatcgcccaccggcgcagccacgcgcccacttgtccagctatgggattga

SEQ ID NO: 499991 - DNA, 468 bp, Stenotrophomonas maltophilia
atgagcgccttcaccgccaacgcatcgcccgcacccaagctcgcccccgtcaccgccggtgcattctggccggagatcgacgtggacgcactgcgggaagccatccgggttccgggtgacgtgctgccggcacggctccgcaacaccgtggtgctggccgtggcttcggtcacgcgggagctggcgttgtggcaggcccgcaaggaagcggacggcattgctgcgctggcagacataccggcgcagcagctcgacggagagtcggtgctgctgcagctgtaccggcgcgcagtgcagtgctgcaccgccgtggagctgcacgaacgctaccgttcctatgacgctaccgcccagggcaatcaacgcgccgacgatctgactccgaccattgatgaactgcggcgcgattaccgcaacgccatcagtgatctgcaggggttgcgccgggtcacggtggagctgatctga

SEQ ID NO: 499992 - DNA, 708 bp, Stenotrophomonas maltophilia
atggccgacacccccgccagccgccatgtgaagcgtgcgctcgcctctaaggaggcggcgcgcaccgccggtagcaacctgatggaagggaccacgatctaccagcagatgcaggtgcgcttggcttccgaccgcgcccggctgaagcagatccagtccacgcagggcaaggctcagctcaagactgcgctgctgccgtcgtatgccccgtatcttgagggcgtgctgtcggcggacgccggcggcaaggacgatatcgtctccacgctgatgctgtggcacttcgatgccgggctgttcgatgccggcctcgacattgcgcggtacgtcctggcccacggtctggatatgccggacacccacaagcgcacagcggcctgcgtggtggctgaggaaatcggcttggccgcgctgaacgcgctcaagaccagcgccccgttcgacctgaatgtgatcgaccgggcggccacgctcaccgagggccaggacatgcccgacgaagtgcgcgcccgtctgctgctggcgcgtggacgcagcctgctggccaccgataccgaggctgcgccactgagcgccgacgccgtcgcccaggccatcgaagacctccgcaccgccatccagctgcatgacagctgcggcggcaaggaagacctcaagcgcgccgagcgtctgcagaagaagttcgaggccagccagtccaacgactga

SEQ ID NO: 499993 - DNA, 1017 bp, Stenotrophomonas maltophilia
atgcgtaccgaaacccgccgcctgttcgagggctacacccagcaggttgccacgctgaacaacgtcagcggcgtggccaacaccttctctgtcgagccgaccgttcagcagagcctcgaagcccgcatgcaggagagcagcacgttcctgcaggcgatcaacatggtcggcgtgaacgaactgaagggccagaaggttggcgttggcatcaccggcaccattgccggccgcaccgacaccagcggcgatggcgagcgcaatccgtccgatccgacctcgctggtgtccaacacctacgagtgccagaagaccgactttgataccgccctgccctatgcccgtctggacgcctgggcgcaccgccccgagttccagaccctgatccgcgacgcgatcatccagcgccaggcactggaccggatcatgatcggctggcacggcaccagcattgccatcaacaccaaccgcgtcgccaatccgatgctgcaggatgtgaacaagggctggctgcagaagtaccgcgagcatgcgtccgagcgcgtcatgaccgaaggcgtcgatggcagcggcaagatcaaggtgggcggtaccggcgctgactacggcaacatcgatgccctggtgatggacctggtcgccaacatgatcgacccgtggcatcaggaagatcccagcctggtggtgatctgtggccgccagctggtgcacgacaagtatttcccgatcatcaaccgtgacaacgcccccaccgagaaggtcgcggccgaactgatcttgggcgccaagcgcatcggtggcctgcagccggtcatcgtgccgttcttcccggccaagtcgctgatggtgaccagcctcagcaacctgtcgctgtactggcagattgcctcgcgccgccgtcacatcatcgaacagccgaacaagaaccgcgtcgccaacttcgagtcgtccaatgatgactacgtggtggaggactacggtctgggcgcggtggccgagaacatcgagttcgggatctga

SEQ ID NO: 499994 - DNA, 861 bp, Stenotrophomonas maltophilia
atggccagcaaaaccaagaagcgttccgagttctttcgtgttgccgtcgaaggcgccaccaccgatggtcgagtgatcgagcgccagcagatcgcggatatcgccgaaacctacgacccggaggtgtacggcgcacgcatctggctggaacacttccgcagcacgctgccggacagccccttccgcgcctatggcgatgtgctggcggtgaaggccgaggaagtggaaatcgccggcaagaagaagctggcgctcttcgcccaggtcgagccgaccgatgacctggtcgacatggtcaacgtgcgcaagcagaaggtctttaccagcatcgagatttccccggagttcgccgacagcggcaaggcgtacctgttcggtctggccgtgaccgactctcccgccagcctgggcaccagcatgctcgccttctcggcgcagcacccggagaacagcccgctgaaggaccgcaagcaggccccggagaacctgttcaccgaggccaccgagacggtcatcaagttcaccgccgaggatgagccggagggtcgccccggcccggtcgccgcgttcctttcgagcctgggcctgggcaagaaggccgcgccagcaccggccaaggaggatcccgagttcaacgtggccgagttcgccgctcagctgctgggcgcggtgggtgaacaggatgcggccatggcccaactcggccaggacaatcgcgcactgcgcgagcaggtgcaggcgctgtccactcaggtcgctggcctgcgcaagaggctggacgaaaccccgcaggcattcacccagcgtccggttgttccgggtggcaaggatgtggacgccgccaacatcaccgattgctga

SEQ ID NO: 499995 - DNA, 1695 bp, Stenotrophomonas maltophilia
atgggttggcgcgtgtgcgatatcgcctcgctgatcggcgagaaggaaaagacggtccacagctggaaggcgcgagacgaatgggaccgcgccgacaccgtcgagcgcatcggcggcgcattggaagcacgcctggccatcctgatccacaaggaaggcaagaccggcggcgacttcaaagaaattgatctgctgcaccgtcagctggaacggcaggcgcgcatccagcgataccagggcggcggcaacgaggccgacctgaatccggcggtggccaaccgcaacgcggccccgaagaagaaggcgcgcaagaacgagttcagcgatgaagagatcgagcgcctgcagacggcgttcgtagatggctgtttcgactaccagcgtgattggtgccgggcgggcaacgaacgcacgcgcatcatcctgaagtcgcgtcagatcggtgccacctactacttcgcccgcgaggcgctgatcgatgcgctcaccaccggccgcaaccagattttcctgagcgcatccaagagccaggcgcacatcttcctcggctacatgcgcggcttcgtgcgagaagtgctggaccgtgacctgaccggcgacccgatcaccctggccaatggcgccgagctgttctttctgggcacgaacgcccgcaccgcacagggctaccacggcaatttctactttgacgagttcttctggacctacggtttcaaccagctgaacaaggtcgccagcggcatggcgatgcacaagaagtggcgtaagacctacttcagcacgccgtccaccatggcgcatgaagccttcgatttctggaccggcgagcgattcaacaaggggcgctcggtgtcccagcagatccagctggatgtgagccactcgcgcctgatgggcggccggcgttgtgaggacgcgatctggcgccagatcgtgaccgttctcgatgcggcaggccgtggctgtgacctgttcgatatcgaggaactgcgccgcgactacagcgccgaggagttcgccaacctactgatgtgcgagttcgtggacgacagcgccagtgtgttcccgctcacgatgctgcagccctgccaggtcgatagctgggtcgagtgggcggacgactacaagccgtttgccgtccgtccctacggcgaccgcgccgtgtggatcggctacgacccggccgagaccggcgacagcgccggcatcgtggtggtagcgccaccgctggtgcccgggggcaaattccgcgtgctggaacgccaccagttcaaaggcatggagttcaaagaccaggccgcgttcattgagcagatcaccaagcgctattgggtgacctacatcggcgtggacgcgaccggcatgggcaccggcgttgcacagctggtgcgccagttcttccccggcgtgactgtcttcaactattcgcccgaggtgaaaacgcggctggtgctgaaagcctacgacgtaatcaatgacgaacggctggagtacgacgccggctggaccgacctcacgcagtcgctgctggcgatccagaaaaccatcaccccgagcgggcgccaggtgacgtacaccgccgggcgctcgcgtactaccggccatgccgacttggcctgggcactcatgcacgcgctgcagaatgaaccgctggaaggcggacaggctgcgcgcggcaccatggagattttctga

SEQ ID NO: 499996 - DNA, 1014 bp, Stenotrophomonas maltophilia
atgaccgacaccgaccagggcgccatcgccgcgccgccggtgagtatcgaagcgttcacctttggcgaggccagccccgtgctggaatcgcgtggcttcctcgactacctcgaatgctggcgtaatggccgctacttcgagccgccggtggatctgcaagggctctcgcgcaccacgcgctccaacccctacctgcacagcggcctgacgttcaaacgcaacatgctggtgcgcacgttccggccgcaccggctgctgagccgcgaggcgttctcgcagctggcgctggattacaccacctttggtatgggttacgtcgaacgccgccgcgctatgtccggtaccgcgcacagcctggccgtgccgctggcgcagtacgtgcgccgtggcgtgcggcccggtgagttcttccaggtgcgcgccggacgggtagagcatgagtttccggccggtgaggtgttccagctgcgggaggcagatgccgatcaggaaatctacggtctgccggaatggatgccggccgtgcaggccgcgctgctcaacgaatcggccacgctgttccgccggaagtattacaacaacggctcccacgccggctacatcctctacctgaccgacgcgcaggcggaaggcacggatgtggacgcgctgcgcgacgcactgcggcagtcgcgcgggccgggcaatttcaagaacctgttcgtgcactcgcccaacgggaagaaggacggcctgcaggtgatcccggtcagcgaggtggcggcaagggacgaattcaccggcatcaagagcgtgacccgcgatgacatgctggcagcgctgcgcgtgcctccgcagttgctcggcatcgttccgcagaacagcggcggctttggttcgatccgggacgcagcagcggtgtgggcggcgatggagcttgccccgctgcagacgcgcatgactgcgatcaacgaatggctggggcaggaggtgatccgcttcgacgccttcgagctgggagcagcagcggcatga

SEQ ID NO: 499997 - DNA, 711 bp, Stenotrophomonas maltophilia
atgaaaaacgaactgatccacggcgatgcgctgaccgtcctgccgaccctgccggccaacagcttcgacgccctcatcactgatcccccgtatgccagcggtggcgtccacgcctccgctcgccagcgcagccccaacgagaagtacatgcagagcagtgggccgtacctgcatgcggacttccccagcgacgaacgcgaccagcgttcgcacctggcgtggatgcagctgtggttggcgcaatgcaaccgagtcctgcgcgatggcgcgccggtgttgctgttcaccgactggcggcagctgccactgaccactgacgcgctgcaatgcgccggcttcacctggcgcggggtggcggtttgggacaagacgggcggcgtccgaccgcagcgtggccgcttcgccaaccaggccgagtacgttgtgtggggcagcaagggcgggatgccgctgggtcgggcggcacccacgctgccgggtgtgttccgcgaggcggtacgcaaagccgacaagcatcacctgaccggcaagccgaccgatctcatgcgccagcttgtccgcatctgcgagcagggtggccgcatcctcgacccgttcgccggctccggtaccacgctggtggccgcggatgccgagggctacaactggaccggaatcgagatgaccgcccactacttcgacgtggccagggcgcgcctgcacactccgtaa

SEQ ID NO: 499998 - DNA, 702 bp, Stenotrophomonas maltophilia
atggccattccaacagcggtgtacgtagacgggtacaacttctactacggacgaatccgcagcacggagttcaaatggatcgacgtcgtgcatctgtttgagatccttcttcgggatcaagatccagcgaacgaccttcggcatgtgagctacttcaccgcaatggcgttaggacgctttgccacgcacggaggcgcgtccgttgccgctcaagagagctacctgcgtgcattggaacatctgcatccaacgcgtttctcaaagacgctgggcaagcacagcatggataagaagggaacgctgatacccgctttcgtccctgacaagccctacgatcgcacgcaccgcgtacgcgtgtggaagatcgaagaaaagcaaaccgatgtgaaccttgcgctagccatgtaccgggatgctgcgtccgggcgttacgagcaattggtggtctgctcgaacgacagtgatgtcgagccagtactgaaagccatacggtgcgatttccccaatgtgagattgggagtcgtgaccccacgccacccgcctgataagcacaagccgacaggacgcgccgtaagttcttccctcgatcaacatgcagattggacaaggcagtatcttcttgatgaagaactgcagagagcgctgcttcccgcccggatacacacaggcaagaagccaataaacaagccgccgcactggtag

SEQ ID NO: 499999 - DNA, 357 bp, Stenotrophomonas maltophilia
atgctgccggccatgccgctgcccgccgacttctactggacgccacgctctgccagtcgcccaggtgaacccttgaccgtgatcgcctgtgcgggcgtgtgggttgtcgcgttgacgcagcgcgtcgacgacggagggtgggtggccacgctggaccgccatcgccacggaccaggtggaccagggcgccgctgcagcagctacgagcagggacgcgccggcgccgaactgtgggtggccaggcacgaggggcgtctacgcgaggacgtggccaagatcacggcgtaccgggaggcagtacgcgcgaacaggttggccaagctgcacaccccgccgccgtttggctggatggggtag

SEQ ID NO: 500000 - DNA, 504 bp, Stenotrophomonas maltophilia
atgagttcctcccacggcttccgcactgccccgatcccctctggctgggtccagaccggggagcgctgggcgctctggtacaacggccgggaaacggcgaacgtcacgctcgatggcggccctggcgtccggctgtggatggagggccagaagatgtggcacaccaaggaagcgcgcgccgccaacgtccgacaggcgaagcgctacgccgagcgctggtgcgctgccaggctgtatcccgagctgcctctgcgtgaggcagttgcacggctgaccgacagcacgccgatccagttgcccccgccactgcctggtctgccgccgacgcgcgagcagcagcaacaggctcggcgcctggctgaggccggagcgaaggagatcgagcggatcaaggcggcgctggagccgcgcaagccgccgttagagacgaagccccgagccagggacgtccgcagcaaggcgcggttgagggcagggctggagcagttgcggcgcggggtgtag

SEQ ID NO: 500001 - DNA, 666 bp, Stenotrophomonas maltophilia
atgtgcggccgattcgtccagctccccattgtcgacttcggccagccggggcttgctgaccttgccgccggcttggccgagatccagcccagctacaacctggctcccacgcagcgcgcatcggcgatcctggaccgcggcgaaggccggcaggtcacccgcttggcgtggggcctcctgccgttctgggcaaaggccaagggcctgcagggctcgaccatcaatgcgcgcatcgagaccgtggccaccaagcccgccttccggtcggcgttcaagaagcgccgctgcgtcattcccatggccggctactacgagtggtcggtgagccccgaggacggcaagaaggatccgtggttcatccacgccaccgggccactgctggccgctggcctgtgggaggacaccagcccactgctgcccgacggaaacctgggcaccttcaccatcatcaccggcgacagcagcggcgtctcggccgacatccacgaccgcatgccggtgtggctgcaggtcagccagctcgatgagtggatgacggccagcgcggacgacgccatggccatgctgctggccagcgaaccgccggcgatggaggcctaccgcgtcagccgcgcggtgaacacgccgagaaacaaccgggaggacctgctggtgcaggtggcttag

SEQ ID NO: 500002 - DNA, 882 bp, Stenotrophomonas maltophilia
atggccagtcaccgctttcatcagtgttccaggcatggtcaacgacggaacttggctggccgtggcatcctcgggcccaggcgctgggaaccccgtgactatcgtcaatggcggtttcaacgttctgtgcaacgacgctttcggcggaatccgcaacacaaactattactcggtgtttcgcatatgaatgcaggactgcaggtattcaatgacgatcagattctgcagatcgacagtgactatcgaaacccacggtttgcttttggcggctactgcaacaccaaggctgtggcaagcaatagctacttcgtcgatatagcgatggacgccacgacgagcgtcgcaactgaatgccctatggtgatcatcaggccggagtctgctgaccagtatgttggaggatgctttgtcaactcaccctatccgccgtttggaagcaaccctggccgaccaaacggtggagtccagttgtgggggcagtgcccattcgattgggctgtgctctcaactcgcgttgcgatcgggtcgggcgggtcgccctacggactagacatttttgacgcgggtggcaacttggtttttgcgtctgcttaccgacagctgaggattacgcaaacgttcgatgacctagacagccagggatggcctaggacgttctcgctcacgaaggggcagaccaacccatggatatgggcaaacccaatgattggagcaacgctaggcgagactgacgagcaggttccagggatagttggtcgattgaacgctgcccgcaaccagctcacgatcgcggccgtggacgtactgacgatgcagccacttcttgctgggtcaaatccatttcctggcgtgcgtcgtctgttcggaacagccacctactag

SEQ ID NO: 500003 - DNA, 3468 bp, Stenotrophomonas maltophilia
ttgaatctgccagtcgcaactccaatcgcccgcgggctgcagctggccggcgccggcggcaagagcggcagcaacggccgcaccccggtggagaccccggacagcctgcactcgatggccgtggccagaatcatcgacctcgtcagcgagggcgagatccggggcttggtggccggcaaccagtcgatctacctgaaccaggttcccatccagaacccggacggcgggctgaactttgctggcgtcaccgtcgacacccgatcagggacacaggatcaggattacatccccggcttcccatcggtcgaaaacgagatctctgtgaacgtggagctgcgcagcgaccagccggtcgttcgcaccgtcagcgggcctgatctctcggccgttcgcatccggctggccgtccccgccctgcagaaggtggacgaggaaaacggcgaccggaacggctactcgatcagctacgcggtggacgtgtcggtcgacggtggggcctacaccaccgtgctcaacgatgcgatcaccggcaagaccacgacgcagtacgagcgcagccgccgaattgaactgccggctggctcgcagtggcaggttcgcattcgcaggctgaccccgaaccagaacaactcgctgatctcggacacggtgaacgtgctttcgatgaccgagatcatcgacgtcaagctgcggtatcccaacagcgcgctgtgcgcggtccaggtcgacgcgagccagttccagaacatcccgtcgcggtcctaccgggtatgggggcggatcatccgcgtgcccagcaactacgatcccattggccgaacctacagcggcgtgtgggacggcaccttcaagtcggcttggacgaacaacccggcctgggtgttcttcgacatcgtcacaaatgatcgattcggcctgggcaaccgcatcccgctggactgggtggataagtggcggctgtaccagatcgcccagtactgcgatcaactggtgagcgacggcatgggcggccaggagccgcggttcacctgcagcctgtacctgcagagcagggcggacgcctacaaggtgctgcaggacatggccggcatgttccgcggcatcagcttctacgccgctggccaagtcatggcctcggccgacatgccgaaggacccgggcccgacctacagccaggccaacgtgatcgagggccgtttccactacgaaggcagcggtcggagaacgcggcacaccgtcgcgctagtgtcgtggaccgatccggacgacttcggccggcagaaggtggaggtcgttcagcacctcgacgccatagcgcgctatggcgtcaaccagaccgaggtcacggcgatcggctgccattcgcgtgcgcaggcgcagcgggtgggcaaccacatcctgtacacggagagcctggagaccgagaccgtcagcttcgcggtgggcttggatgccctcaactgcatgccgggcgacgtgatccaggtggctgacccgaaccgggcggggcgccgcaatgccggccgcatccgcgcagcaggcgccagcagtctcaccttggatcttgttcccgagacgatggccgtgggcgacaccttgcgagccacgctgcccaatgggcgcacggaaggccggaccatcaacgggatcgatgccgccacgggagtggtcacggtctcggcgccctggtcggcggtcccggtgccgcagtctgtgtgggccaccgaatccagcgacctggtgctgcagctgttccgggtgatcgccgtcactgaaggcgaggaactaacctacaacatcaccgcgttgaagcacgtcccgggcaaatatgcggcgatcgacgatggcacccgtctggaactgccgccgatcagcgtcatcccgcccagcgtgcagccgccgccgaccaatgtggccctgtcttcgcacgtggtgatcgagcagggcatcgccactccgacgctgaccatccaatgggagccagccgacaacgccatcgcttacgacgtggagtggcgccgcgacgatctcaactgggtgcgccaggggcgggtggccaccaccagcatcgaggtgcccgggatctacgctggccagtaccttgcacgcgtcagggcggtgaacgcgctcaacgcggtgtcgcttccggcgatgagcccactcacgacaatcgcaggcaagaccgagccgccgccggcggtcacctcgctgactgccacgtccatcgtgttcggcatccgactggcgtgggcgttcccgcctggggcgaccgacacccagcgcactgagatctggcgcagcaccggcccgaatcgcgagacggccacgaagcttggcgactatgcctacccgcagaaccgtctcgaactggacggcttagccgccggtgcgcggttctacttctgggcaaggctggttgaccgcagtggcaacatcggcccgtggtatccggcgggcgctggagtgatgggggaggccagcacaaaccagtcggactacgatgcctacttctctggacggataacggagagcgcgcttggtcaggatttgctgaccaagatcgagagcatcgaccagatcgtgccactgatctgggaggccggcgccacctatcagcctggcgataccgtcgtgtacaacggcaagatctggctgtggaacgacagcacggcaggcaatgaggagccaccgggcacgaaatggaaagatgtgggcgacgcggtcgctcaggcgggtgctgtcgttgggcgggtcaatacgctcgagctgcaggtcaacgatccggagaccggcctgcaggcggtcgggcagaagacggatggccttttcgcgcagctggacgtccaggctgccggcgacagtgactggggcgctggcgatgaaactgtgttcgccggcaccatcaccatccagaccgtcatcgcccaaggcgactatgcgctgtcgcagcgccaggacacggtggaggcaaaggttggcgatacgcaggcaatggtgcagcagacctcccaagctgtggtcgatatggatggccggatcagcgcctcatggacactgaagctgcaggtggcggccaatggccagtactacgccgccggcatgggcatcggcatcgagaaccagcccgacgggagctaccagagccagatcctgttccaggccgatcggttcgcggtgatcaacctggttaacgggcaggtcacgtcgccattcgtgattcagggcggccagaccttcatcagccaggcgatgatcgggacaggctggatccagaacgcgatgatcggggacgtcattcagtccaacgcaaccggagtcggcggtcagcccaggtggaagctggacaagaacggaacgctcacgatgaccggtgcgaacagcggtggctacctgacgattaatgatcgcgtgattcaggtctacgacggcaatggaaccttgcgcgtgcgccttggaatctggtcatga

SEQ ID NO: 500004 - DNA, 741 bp, Stenotrophomonas maltophilia
atgcaacagacgaccctgcaggccatccaggcgcacgccgtcgccgagtatccacgtgagtgctgcggcctgatcgtggccgccggcaatggcgaggcctacatcccctgccggaacgtggccaccacgcccagcgaacacttccggctgccggcggaggacttcgccgacgccgaggacgtgggtgaggtactggccgtcgtgcacagccatccgaacgcccccgccacagcttcggacgcagaccgcgtcatgtgcgaggccagcggcctgccgtggcacatcgttagcgttggccaggtcaccggtgccgaccctgagtgcggcgacctgcagaccatcgagccgtgcggctacgaggcgccgctggtgggccggcagttcgctcacggccagttggactgctacagcctggtgcgcgacttctacgagcgcgagcttggcatccagctcagccagtacgagcgggacgacgactggtgggagaagggccaggacctctacagcctggaccgactccgtgccgagggcttcgacctgatcgagggtgagccgcagcgcggtgacatggtgctgatgcagatccgttcgcccgtcccgaaccacgccggtgtctacctcggcgacggccagctgctccaccacatgcacggccgcctgtcggaggtcatcacctacggtggcatgtgggccgagcgtacccgctacatcgttcgccacaaggaagctgcccgtgtctga

SEQ ID NO: 500005 - DNA, 696 bp, Stenotrophomonas maltophilia
atgatcaccgccgatgcccaacagctcgaaccgggtggacgaatcactctgttcgagctggacgccaccagtttcggtgtcgaccagctgttcttccacgcgcatctgcagtcgggtccgatctggtggcaaggccaggagtacaagccttggccaatcgaggcgactggcttttcgcgcaccagcgaccagccacctaatcctcgtctgaaagtgagcaacatcgatggcagcatcaccgcgatctgcctgctgttcgacgacctggtgggcgcgcgcgtcattcgccggcagacgctggccaagtacctcgacgcgacgaacttccccgaaggcaaccccacggccgacccaggcgagcactttcaggatgagatctggttcatcgagcgcaaggtctccgagacgaaagagaccgtcgagtttgagctgaccacggcgatcgacctcaacggtgagcagcttcccggtcgccaggtcatcgccggcgtttgcggctggctgatccgtggcggctaccgcggcccctactgcggctacaacgggccggccgtggccgacgccaacgacgtgccgaccaccgaccccgcgcgtgaccagtgcgggggaagggtgaacagctgcaagctgcgcttcggtgccgacaagccgctgccctacggcggattccccgccgccggtttgctgcgcacgtag

SEQ ID NO: 500006 - DNA, 471 bp, Stenotrophomonas maltophilia
atgtatcagctgatgaaagagccgggcaggatcaagcgcctgtccgacggcgcggagattccggagggtcaccgctggtatgacgactatctggcctggctggctgaaggcaacacgccggagccggtgggtttgccgtacgagctgcacagccccgagcattaccgcgcgatccgtgcggctgcctgggactggatgacggattgggtgaaggaacggcgctacgacagcatcgagacgtgcgtcgggtacttcaacagcggtgtaccgcgctaccgtgatgaggctcgcgcgatggttgcctggcgcgacgctgtgaaccaggagctggaggccctggcgctggccgcacctgctggcgtcgaaacctgggatcaggtgagggccctgctgccgcagccggaggcatttaactggcccggggaggtctccctgccactgggcaccggtgaaacggcggtgctggaatga

SEQ ID NO: 500007 - DNA, 825 bp, Stenotrophomonas maltophilia
atggcccagcagatcatcgacaccacaaccgaccatgggacctacaagggtgacccggcaaaagtagctttcgagaaggtgaacgccaacgacacagagttgtacgaacgcttgcagacgttggcgcagctggccggcaagaacatgctgatgaactgtggaattcctatcaaccagcggaacttcgctggaggtgcgctggcccaaggttctttcggctacgaccgttggaagggcggcaatggcggcggcaacattgtcatcaacaatgccggggtctggactctcaatgggccggtccagcaggtagtggagaacccgcagctcgcgtggggaaggcctatcaccttcagcgcggagtctccctctggtcccatcggcgtctacatgggtggggcggtgggaagcattccggcagggcctggtagacaaagcgtcacgctgttggccagcggatccgggaacatgttggtggatattagtgctgcttcgtccacgacgttctcccaacttcaaatggagcggggcgagaaggccacggcgtttgaggtgcgcagcatcggtcatgagctgatgttgtgccagcgcttcacgcgatacggatatgtagcgatgcgggcgaacggcacgaccaacgcaggcgccggaacgttcattgcgcacgaaatgcgcgccactcccgcagtaactttctccaacacggtgtatgcctacggttgttctggtattgggtcgtcgcagacaaagtatggggttgaggtgttcgtcagtcccagcggcaacttcgcctttgccagcaactacctcttcgacgcggagctttga

SEQ ID NO: 500008 - DNA, 336 bp, Stenotrophomonas maltophilia
atggctgaggtcttcaactggtgcgtgcgcaccgagatcacaggcacaggcgacttcctcacccgtgaggccatgttcggagacggctaccgccagacggctgccgatggactgaacaacgaaacgcagtcctggccgatttccatcgtcggacgcgagtcgaaagtcgggccggcgcttgccttcctgcgcgcgcggaagggcgcggtgtccttcctctggacgccgccgctcggtgtgcagggcctgtacctctgcaagacctacaccatcaccccgcatggcaatggcgtctacacgctcaatgccacgttcgaacagacattccagccgtaa

SEQ ID NO: 500009 - DNA, 2160 bp, Stenotrophomonas maltophilia
atggccactgccggctcaatcgttgtcgacctactgatgcgcacggggtcgttcgagaccgacaccaaccgcgcgtccaagcagatgaagaagctgggaaaggatgcgggggacactgctgctgacatcgggcgtgcctttgggctaatcggcggaaccattgctggtggattggccacggccggcacggccgttctgggttggacccggcagctggtcgatgcatcggcggaactggagaagttctcccgtctgtccggaagcaacgagcaggtgttccagcgcatggccgctggcgctgccaccgttggcatccagcaggacaagctcgccgacatctttaaggacacccaggacaagctgggtgatttcctgcagaccggcggcggcgcgatgaaggacttcttcgagcagatcgcaccgcgcatcgggttgaccgcgaaggagctgcaacacctgagcgggccggaggtgctgcagcggtactacagcgctctggagcaggccggcgctagccaggccgagatggtcttctacatggaggcgatcgccagtgactcgtcgatgctagccccgctgctggcgcggaatggcgagggcttccggaagtggggcgacgaggcgcagcgtttgggcgcggtgctggatgccgacaccctgaaggccatgaaggaggtgaaagaacagtccaatctgatccagctggcgtttcagggcctgaagaatgaggtcgcggccgagcttttgccgcagttcaaggagctgaccgcgttcctgggctcggaccagacgaagagcgcgtttatctcgatcacgaagtgggtgggcgacctggccgcccagatggccaacggcgccgtgctgatcgtcaacttcatcgacaaggccaaccagatccgaaagctggacgcgggcggaatggtcggcgacgcaggcgaagatgccctgaacacccagatggcacggctgaccgaccagatcaactatgccaagaagaacacctcgggcttgttcggccttcccctgaccgacgggcaggaggaagcccgcctgaagcgcatcaatgaccttgaggccaaacggctcgagatccagcgggagctgacaaagcggtacaagtcagaggccgctagcgaaaacttcaagggggtgactggttcggtcgacagcacagcacgcattctggggagtggcgcagcctcggggggcggtgccactggtgcatccgatcgtcgtgcgggtgcattgaccaaggagaagtcgctgctggagcagatccaggaggactacgaggcgctgtacggcgccggcagcagccgtgcagatgaacagatcgcaaagctggaacgcgagattgccctgcatggcgacctcagcgaatcggcgaagctgaactacgacatccaaaccaatgccttcggagcgctgagcgaggcacaggccgagatgctccgcaatttggcggcggtgaaggacgcgcaggatgatttttccgcgctctacggagacggactgcaagacctggctagcaaaacccaggaagcgaatatccagatgagcacctttgccgaccaagctgcgcggaacatgcaggacgccttcgccgacttcctgttcgatccgttctccgaaggcttgggtgggatggttcagagcttcgcgaagacgttgcagaagatggctgcccaggcggcggcttcgcagatcttccagatgatcggcagctgggccagcagctacagcgggaccgggtcgagctggatcaacgcggtcggcagcgcaatcggtgggatggctggcggccgcgccggtggcggccctgttgccgccggcagcatgtaccgggtgggcgagggcggtcggcccgaactgttcgaccagggtgggaagacctacctgatccccggcgacactggttcggttcgtccgatcaccgcaggcatgcccgcatctgccattggcggcggtggcgggatcacgaacaacttcaacaccacgatgaacatttcgtccgacggcaccagcaccacccagcagggtgatggcagcgaggacgctcgccggctcaatcagttcttcacttccaagatgaacgagtgggccacccaacagtcgcgtccaggcggcctcttccatcagatgagggtgagcaatggctga

SEQ ID NO: 500010 - DNA, 207 bp, Stenotrophomonas maltophilia
atgccaggcgctgagctgaatggttggcgcgccttctacgaactgtatcccttcgacgatctgcaccggttccaccggccggctgcagtgatcggaaccgctttcggcggcaagtacgaaagcatcatcggattcctcgctccgagcccggacgacccggtgctgagcgacgccgatcgcgatgtatccaaggccctcggcttctaa

SEQ ID NO: 500011 - DNA, 390 bp, Stenotrophomonas maltophilia
atgaccgagaacaacaacactgcagcgccgctgctggatccctcgcttttcatctccgacgacgtgcatgagcgcgaggtcaagcttgctgacggcagcaagcacacgttctacatccgcgagcaggaggcgggcgtgctgcgcgggttcttcgcggggcaggctagtgaagacccggacaagcaggctgaatctatggctcgcctcattgccaaggcgatctgcaccccagatggcaagccagctctgacgctggcgcaggccaagaaactgaagttcgccgttcagattgccctgaccaaggccatcagcgaggtgcacagttaccagggaaaggagagctcgcccgccgaggaagcggagagtggttccgataccagctcgccctga

SEQ ID NO: 500012 - DNA, 498 bp, Stenotrophomonas maltophilia
atgaccgagggcgtcgtcaagacccagggcacccatctgttcttcgttgacccgaacgcggccggcgggcctgcgatcgtcaagttcgcatgtcctaccggggcgtccggcctgggcggcgccgccgaccagatcgaatccacctgcctcgatgcgaccgtggacaaggagtaccagcgcggcctgggtaatccgggccaggtgtccattccgttcaactatatccccagcgacgcatcccatgatgcgctgttcaagttaaaggacagcggcgagaacgtgagctggtacatcggcctgagcgacggcactgctgcgccgactctcgacaccgaggacgagttggttccgccactggccaccgctcgctcggggttcctgttcaccggctacatcgctgatgtgaacatcgacatcgccaccaacgagatcgtgcgcggcacggtcacagtccagcgcagcggcggcgtcacccgctacggcaagccgctggcctga

SEQ ID NO: 500013 - DNA, 354 bp, Stenotrophomonas maltophilia
atgtttccgaaggtgtatcgaaccattcgcacagcggcggtgttggcgatcgtcgacgaccgcatcgggcggcacggtgaggtagctcagaccgagacccgcccctacatcgtctggcagatcgttaccggttcggcctttgacaacctgagcgcggctccaggcggcgatttcaccactgtgcagatcgactgctaccacgcgaccgacgcaggcgtagagcagctggcaaaggctgttcgcgctgcgctggatggcgtgctgatcgtcaaccgcgtcgtggtcaacaaccgcgacccagataccaagctgtaccgcgtcggcctcgaagccgacttcatcgaccagcgctga

SEQ ID NO: 500014 - DNA, 492 bp, Stenotrophomonas maltophilia
gtgaaggtcgaacttcagatccacgggatcgatggcgttctgtctacgctggaggcgttgccagcggaggtggtgagcaagcggggcggccccgtgaagctggcgctggccaagggtgcacggctgctccgggatcaagccaaagacaatttccggcgctctgtggcacagggcggagcggacagcacagagaccacggtcgagaacatcgtcgccagccgtggcaaggcccctgttgggacaaagggtgagcgtcagctggtgcgggtcaaacggcgcagctacatcaacgccaagggcgccaagacaacgacgctgcgggcggcgcagttgatggagtacgggtccgcaacgcagcctgcccggccttggctgcgccccgccgtacagcgtcgagggagccagattattgatgtggtcagcgaagacctgctgaagaggctcgaccagatcaccaagcgcctggcagcgcagaacggagggcaccgctga

SEQ ID NO: 500015 - DNA, 681 bp, Stenotrophomonas maltophilia
atgctgacgctgctgacggccaccggtggccggccggctgcctgggcgctgtgcgagcgctggatggcccggcaggactacgccggccccgtccgctggatcatcgtggatgacggcccggatccccagccggtgaccttccggcgcgagggttggcagctggtgctggtacgaccatcgccacactgggcgcccgggcagaacacgcaggctcgcaacctgctgaaggggctggccgcagttggcccggacgaccgactggtgatcatcgaggacgacgactggtatgcgcctgactggctgaccacgatcgccgcagagctggagcatgccgagctggtgggcgagcaccgcgctcgctactacaacgtggagcagcggcgcggtcggcagctggccaacaccggtcacgccagcctgtgcagcaccgcgatgcgcggtgcggcgctccgcgatttcgcagacgcgtgccgatcacggccgaagttcatcgacctggagctgtggcgccgcccgcgcgccagccgcctgttcggtggccaccgtgtcgtgggcatcaaaggcctaccaggccggggtggcatcggcatggggcacgacccgtatttcaagggtgaggccgatgccagtggcgacttgctgcggcaatgggttggcggggacgccgaggtatacctgtga

SEQ ID NO: 500016 - DNA, 558 bp, Stenotrophomonas maltophilia
atgaacagactgccgcttaactcggtgcgcgggcgcatccgcgcctacatcgagcgccatgctgctgccctcggcgacgatgttctggagattggcagccgcatccatgacccggcagcttggtggtgcaccaaccgtgacctggccactgggcggtggaccgggatcgacatgcaggcgggcgagggcgtcgaccaggtggccgacatccacaaccttcctacggaatgggcaggtcgcttcagcggcatcgtgtgctccgaggtgctggagcacgtggcccggccttggctggcactgccggagcttcgccgggtgctgcagcccggtggcctgctggtgatcaccacgctgttcgcgttcccggagcacggttacccagacgactactaccgctacagccagagcggcctgcggctgctgctggccgatgccggctttagcgacatcgtgaccgagtacgccggcgaggtgccaatcgaactgaacgaccacggtgagcgcggcgtggcccgccggaggctgccgatgcacaccttcgcggtggcgcgatgctga

SEQ ID NO: 500017 - DNA, 504 bp, Stenotrophomonas maltophilia
atgatcgagatcgaccttcttggaccaggcccgagcgcatcggcaagcttggccgagcgcctgcgcgggcgccgcgtcggcgtggtcagcaatgccttcgagctggcgccgtgggcggagttcctggcggccagcgatcggcagtggtgggacaagtacccgcaggcgcggcagttcgctggagcgcgctacagcagccaccggatcggcggagtgatacagctgcccggggcaccgaccaactggaacagcggcgtgctggcgctggcggttgccgtccacctgggcgcgacgctggttcgcctgcacggctttgatatgcacggcagccacttcttcgggccgtactccaacggcctgaccaacacggcgccacaccgccgcgagatccacaagcaacagttcgccctgtgggcgagccagaacccccacgtccgcgtcgtgaactgcacggccggctcagcgctcaggtgcttcgatttcgatgaacagactgccgcttaa

SEQ ID NO: 500018 - DNA, 342 bp, Stenotrophomonas maltophilia
atgagcaacgttgccagcggaaccctgcggcaccgggtgctgatccagcagcaggtgacgaccagggacagcgatggtatcgagcagaccgcgtgggtcgacgtggccaccgtatgggcgtctgtcgagccgctgtccgcccgagagttcatccagtccgggcagacacaatcggcggtcaccgcacgcatcacgatgcgctaccgcgacggtctgctgccgtcgatgcgcctggtccatcgcggcgagatcttcaacattgccggcctgctgccggacaaggcttcggggctggagtacatcaccattcccgtctcggccggggtcaacgacggccaatga

SEQ ID NO: 500019 - DNA, 396 bp, Stenotrophomonas maltophilia
atgcgtgagttcgtcaccccggcggacgcccgcgagcagatgcgcatcgacagtgacgctgatgaccgctggctggccatctggattccggccgtgtccgagtctgtggcagcgtggctgaagcaggagtggcgcctgtacgtgctgcagcgcgactctgatggggaactggtccgtgacagcgcaggccggcctgtgccggccgaggacagcagtggcgagccgatcctgcacccttcggtgatcgccgcgacgcttctggagctggcctcgcagtaccgcttccgcgaaggcgagggtgacaacgtggtgccggccgatgctggccacggctacgttctgtcgaaggccgccaccgcacagctggcgccgctgcgccgcacgacggtggcctga

SEQ ID NO: 500020 - DNA, 867 bp, Stenotrophomonas maltophilia
atgactgaccccatcgacttcggcaaggagatcggcggcctgatccgggaggcgatcgcgccggtgaagcgtgagctggaagagctgcgcgaacgggctccggagaagggcgaccccggccaggacgctgagccggtggacgtggatgcgctggctgacctggtcgtggtcaagctgctggaatcaccgcgcctgcagacgttggtcgacctggccaccgccgatgccgtctccaagcacttcgaagccaacccggtgcagcatgggcgggacgcagaccccgcaatgatcgaggcaacggtgaaggccgctgtcgacgcgctgcctgtgccgaaggatggccgtgacgcggatccagtcaccgagcagcagctggctgcggcggtggccaagcacctgaccgagaacccgccgcaggccggcgccgacggtgtcggcctgaccggcgccatgatcgatcgtgccggcgagctggtggtcaccaccacgaagggcgaggcgatcaggctgggcaaggtcgttggtgaggatgggaaggacggcctcagcttcgagacagcctccggcgactacgacgccgagcgtggcttcgtcatcacgctgggtgccggcgaccgccgaaaggagttcgtgctgccctacatggtgcaccgcggcttctggcgcgaaggcctgggcgtgaaagcgggcgaatcgatcacccacgacggcgcgctgtggatcgccaagcggagcaacgcgtcgaagccctgcctggagaacgatcaggactgggctctgggcgcacgcaaggggcgcgacggcaaggacggcaagagcgtgcgcgttccggccgagccagtgcagctgggtggcagccatgcgtga

SEQ ID NO: 500021 - DNA, 1440 bp, Stenotrophomonas maltophilia
atgaccggtttctcgccccgggagttggccatagccgctggcgtgcgccggcatggcgtcgactacctcaaatcgttgtcgccggtagttgccgcgccggggcgggacagctggcagaccctgaccgtgcaagagccattcacgggtgcgtggcagcgcaacatggaagagcgagcgacgacggtcctgacctatccgacgctgtatgcctgtctcaaccgcatcgcctcggacatcggcaagctgccgttcgtgctgaagacggaggacgagaacgggatctggcggatcgagaagagcaacaccgcctattggcctgtcctgcgcaagcccaacagctaccagacagcgcagcagttccgcgcagcgtggatgctgtccaagctgatccagggcaacacgtacatcctgaagggtcgcgacaatcgccaggtagtcaaccggctctgggtgctcgatccctgcagcgtgcagccgatggtgtccgacagcggagaggtcttctaccagctcaactacagcaccggcacgaacctgctgccggagaactatccaggcactcagctgatcgtaccggccagcgagatcatccacgaccggatgaactgcttccaccaccagctgatcggtgtgccgccgctgtgtgcggcgcactggccagcggtgaagaacctgaagatcctgaaggactcgaccaccttcttctccaacggcgccaatccaggcggcatcctgaccgcaccggccggcatgtccgacgaggacgcgcaggctgtgaaggattactggaacaccagcttccaaggttcgaacgcgggcaaggtggccgtggttggcgcggacatgaagttcacgccgttcgcgttcaaggcagccgattcgcagctggtcgagcagatgcggtactccgacgagcaggtgtgccagccgttcggcatcccacccttcaagatcggcatcggctctatccctgcgggcatgaaggtcgacgacatcaatcagctgtactactcggatgcgctgcaggcgcacatcgagggcatcgaagagcttttggacgaaggtctgggcaccacccgcccgatgggtatcgagctggatctagggccactcctccgcatggacgtcggtaagcaggccgaggtggagacgaagctggtcagcgggaacgtcaagacgccgaacgaagcgcggctggccttcaacctggcgccgctggagggtggtgacaccgtctacatgcagcagcaggacttcccgctcgaccaggtccggcagaacaagatcacggctgagctcgaggccgcaccggtggcgccgtccgccgaggccgacgacacaccgcctgacgacagcgacgagctgcgcgggctgcagcaggagaatttcatgatgaaggcccttcacgccgcgcgagccgaggtattccgcaatgactga

SEQ ID NO: 500022 - DNA, 228 bp, Stenotrophomonas maltophilia
atgagcaaggtcgatatcgtcggacgcggcggccgaatgatcagcgtgcatcatcgtgttgctgcggcgctggagcagcgcggtggctacctgcggcgtgacatggttgcgcaatcgcccgtcgcgccgaactcgagcgccaaggcgcctgcgcctggaaaggcgaagaagaaggccaagaaggcggcagccaaggctggccagccgaacaaggacgcatccgtatga

SEQ ID NO: 500023 - DNA, 1416 bp, Stenotrophomonas maltophilia
atgaacatcgcagaacagctggaaaagctccgcgctacccgtgctgagctggaaaagcagctctccgccgtcatgaagaagccggctgacgagcagcgctcactgaacaccggcgaacaggaggagttcgactcgctgaaaagccagatcacctcgctggatggcgacatcgagcgctacgagcacctgcaggcgatccaggccaagtcggccaccaccgttgcgaccatcgtcaaggcgcagggctcggctaccgtcggcgccgaaggccgtgccctggaaccggcacagctgaagacggtcgacaagaccgacgcaggcatcggcttcgcccgtatggcccgctgcctggccgtgtcgcatgtccaccaccagaatccgctggacgtggcgcgcgccatctacccgaacgatgagcgcctgcacggcatcatccaggagaaggccgcggtgcaggctgccagtaccggcaacgcgacctgggccggaaacctgatcaccgatggcggcgtggccttcgccgacttcgtcgagtggctgcgtccgcgttcgctgctgggccaggtctcccaacgcctgcgcaacctgccgttcgataccccggtgctggtgcaggggtcggctggcacggccaagtgggtcaaggacggcgctgcaaagccgctgaccaagtggtcgtacacccgtgcgaagctgaccccgctgaaggtggccgcgatcgctgccgcgaccaaggaaaccatgatgcgcgccacgccggcggccgatgcgctgctgcgcgacgagctgggccgggcggtcaatcagaccatcgacacgcagttcatcgatccggatgcagcggccgtcgccgacgaggcaccggcttcgatcctgaatggtgtaccggcgaccacggtgccgggcggcagtgatccggactcgatccgcgctggcgctgcggcgctcatgaatgccatcgctggctcgaacctgtcgctggcgggctcgttctgggcgatgtcggagcgcaccgcgatcgcgctgtcgctgatggtcaacccgctgggtgcttcggagttcccgggcatcaacttcaccggcggcaccttcctgggcctgcctgcgttcgtctcggcgtatgtgccggacgatgaagatggtgcggtcatcgcgctgatcaagggcgacgagatcttcctgggcgacgaaggtggcctgcaggtttcgatgtcggaccaggcatcgctggtgatggatgacgccccgaccatgaacagcaccacgccgaccgcgcagcaggttgtctcgctgtggcagaccaacagcgtggccttcctggtcgagcgcttcatcaactggcagcgtcgccgctcgcaggctgtcgcctgggcccgcgtgaactggggcagcggctcggttccgtccagctcgtaa

SEQ ID NO: 500024 - DNA, 573 bp, Stenotrophomonas maltophilia
atgaacaccgagaatcgcgcgtacagcgtgttggaggtcaagtcctatgacgacgaccagcagatcatcaccggctgggcgaccacgccggaacccgaccgctatggcgacgtcgttgaaccgcttggcgccaagttcgcggccgagctgccgctgctgtggcagcaccgccacgacagcccggtgggcatcgtgaagttcggcaagccgacggccaagggcatcccgttcacggcgagcgtcgcaaagatcaccactgctggcgccttgaaggacctctgtgatctggcctggcagtcggtgaaggagaagctggtgcgcggcgtgtcgatcggcttccgggcgctggagtacagctacatggaaggcggcggtatccggttcaccgagaccgagatctacgagctttccctggtcaccatcccagccaacgccgcggcgaccatccagacgatcaaggccatggacacggccggcggccgccgctctgcgaactacggcgttcccctcatccagcgccaggcggcgaaggtcgaacgaccggccgacggcgcggtgaagttgctgcactga

SEQ ID NO: 500025 - DNA, 1755 bp, Stenotrophomonas maltophilia
atggcgacacggaaaagccgggcaacgcgttcgccgcgctcggaaagccccgcgccgctggaaaatgactacgtcgatgtcgcgatcaggtatgcgaaggcggctgcggcagataggggaggcaggtttggccggctgatcaagctggcggcgaaacggttcctggacgatctgaagcgcgcaaagaagaagggggcgccgttctccttctcgcgcgatcacgccaatcacgcctgcagctggatcgaattgctcccgcacgtggaaggcaagtgggagacgccggagatccggcttcacccatcgcacgtttggttcgtggttcagctgttcgggttccgcaagcccgatggaacccgccgcttcacgtccgcactgttcgcggttgcgcgcaagaacgcgaagtcgacgctgtcggccgccatcttgctttactgcgaatgctgtgaagaggaagagggtgcgcaggtcatttccgcggctaccactggcagccaggcgcgcatcatcttcaacgtggccaagcggatggccgaaaagaaggccgatctccgggaggcctacgggctggagtgctgggccaacgcgatcagccgggtcgagaccggcgcgacgttcaagccgatcaacgcgaaggcatcgacgcaggacggccttaacccgtctcacgtcggtctcgacgagatccatgcgcacaagaccccggatctgctgaacgtgttgcagtcggcggccggtgcgcgccggaatcctctgtggttgttcacgaccacagagggctacgcgaatcctggtccatggtcagagattcggcagttcgccacgcagctgctggagggcgtgtttggcgatgccgccgaccacttcttggcgatcttcttcgcagtggacaaggacgacggggacttcgacgagaaggcctggcacaaggccaacccgttgatggacgtaaacccccacctgctggcggcaatcaggaaggaatcgatcgaggcgaaggcgatgccttcgaagctcgctgagttccagatcaagcggctgaaccgacctgccgcagcggcaaatggtttcatcctgctgccgaagtggaatgcctgtcacggcgtggtcgatctggacacgctgaaggacgttccctgctggggtgggctggacctggccagcactcgcgaccttgcatcgctgcggctggtctggcgcttggacgacaaaatcatcacctggggacgccgctgggtgccggaatcggcagtggcgcagcgcaccgagcgcggcactgtcccgtatgcgggctgggtagcggccgggctgctggagcagaccgagggcgaagtcaccgactacgcggtgattgagcaggcggttctggacgtgcacgagcgcttcaacctgcagtcgcttgcgttcgaccgctggaacgcgaccgagatggtcagccggctggtagccgcagaggttccgctggtcgagttcatccagggcacgaagtcctaccaccctgcaatggtggagctggaacgtgcctacatcggcaagcgattggtgcacgacggcgaccctgtgctggcctggtgcgcggccaacctggtcgcgcgcaaagacgtgaacctgaacatggcaccggacaagcgccggtccgccgacaagatcgacgatatcaccgcgctgctgatggccattggcatcagcattccggtggccgaagagaagagcaacaagaaactcgtcctcatgaccctgggtggaactgaatga

SEQ ID NO: 500026 - DNA, 300 bp, Stenotrophomonas maltophilia
atgaatgatccgctgattcttcagttccgatcggatgcaacggagccaacccctgcgcaattggcactgcttcggtctcggctcgacgaggcgtttccgcgccgcgcggtcgtcgtccttcctgtcggtatggaggttgcgcctggcagccaagagtcactgctggagatcaacggcaagctcgatgctctgttgacggcgctggcagctgagggtgcggaagagcaggacgagccggcccgcagcctcgacggtgagcagatgcccagcgagcgcgaccagtcgcagagcctcggctga

SEQ ID NO: 500027 - DNA, 303 bp, Stenotrophomonas maltophilia
atgcgacgccattccgttgctgtgatcctggctgcggccctgccgctgtgcggtttcggcagctgcagcaaggccaagaagccggacatcccgcagaccgtttacgtcaccgtcgagcggactgttgctgtgccggctgcgttgatcgcccgctgcccggtgaagcgcgcaacccagcggaccatcgagagcgtggtctcggcctacaacgccaacgtgctgagcctggagcagtgcaacacccagctgggcgaaatcgagaagctggctccggccaacgcaccgaagcaggtgaagccatga

SEQ ID NO: 500028 - DNA, 435 bp, Stenotrophomonas maltophilia
atgctgatccctgacccgctgcggccttacgttggcctgatccgcgtagggctatggattgcggcagtcggcgcggtcctgctgatgggcgcccggctggggtcggactatcgagcgaagaaggatcaggccctgatcgctgccgccgagaagcagcgcgaccaggccaacgccagctccgacgagaacctgcgtgccgccaacgcctgcggccagctgctgcaggaggtgaaccggcagacgcagctggccatcgatgaagcagcccgccagcagcaggcagccaaggatgccgcacggctggccgaggcagccgcagcccagagccagcgccgtgcggcgcaggccgagcaggccctgcaggtggccaagaaccagccgggatgccggcagcagttggagcagaacctatgcgacgccattccgttgctgtga

SEQ ID NO: 500029 - DNA, 276 bp, Stenotrophomonas maltophilia
gtgaagaacgtgaaactcaccagcgaccggcgccacttctggcggttctggtcggtgcgcctgtcgctgctggccggcatcatcagcgccaccgcactgggcatcatcggcgcatacatggtgctgccggcggactggttgccggtggtgcatgacgggttcaagcagactgtggcctacagcgcactggcatctgctggcgtcacctccttcttggctgcggtgtcccgcatcttcgtgcagcccaagctgagcagcggcgatgctgatccctga

SEQ ID NO: 500030 - DNA, 318 bp, Stenotrophomonas maltophilia
atgacgatggaagcccagccgagccaggacggccgcacccgtatttcacttggcccggtcgagaaatggatcgttggcgccttcgccagtttcatggtcgctggcggctactggctgatcagctccatgcaggcggtgctgacccagcagcaggtcacgaaccagcagatggccaccgtgcagcagcagctgcagaccttcaacacgcagctggccgacgtgccggcgctgaagctcgaactggccaagcaggccgtgcaggtcgagcagaacaagcaggacatcaaggagctgaagcagctcagggggctgaagtga

SEQ ID NO: 500031 - DNA, 666 bp, Stenotrophomonas maltophilia
atgatcctgaccgcctcgacaattcagcaggcggtcggctgcagtgccgctgtcgccgcccagtgggctcagcccctggccgacgcctgcacggcgttcggcataagcacacccaagcgcgtggcggcgttcctggcgcaggtaggtcacgagtcggcgagcctgacccggaccgtcgagagcctgaactacggtgcgcagggcctggccgacacctggccaagccgctacgccgttgaccccaaggccaagccgaggaagccgaacgacctggcgcgcgcgctggaacggaagccggttgcgatcggcaacaacgcgtatgccaaccggctgggcaatggctcggaggcgagtggtgatggctaccgctatcgcggccggggtcctatccagaacaccggccgggccaactacgcggcgatccgcgacgctctgcgggcgaagggcatcaagggcgttcctgactttgaggccaagcccgatcagctggagcagcccaagtggggcgctttggcagcagcgacgttctgggattctcggaacctcaacaagctggcggacgcgggccgattcgacgagatcacagcccgggtgaacggtggccagaatggggcggctgaccggcgttcgcggtactcccgcgcgctgaaggtgcttggggcatga

SEQ ID NO: 500032 - DNA, 702 bp, Stenotrophomonas maltophilia
atgaatccacgagagacgatggcacggctggggccgagcacggtgaagttcgacatcggccggggaggcgggaagcccgacctgacgaaccaggacattgccgcggcgctgggcatggtgccggctgggctgggacgggagctgctggaggcgtgctggtggccggatggcgccgcattgcgccggcacaagttgcgggacgcggtgatcgcgttggttacgccggagctgcagcggcagcagcgccggttggctgaggcccgcacggacctcggcctggccgaagtgtgcatcggctggggcggagcggcgacggcggagcagcgggcgaaccgtgacgctgcccagcagcggctgggccgggtgaaggctcaatgctggccgatcagcactctggagtcgctgccgaccctggcggcggcggtgatcagcgagatcgccaagcggccgcactgtgcggcctgcgagggcaggggccaggcgatggttggggagctgctggtgccgtgcaaggtgtgcggcgggtcagggctcggcccggtcagtgaccgacgccgcgcagctgctatcgggcgcgatgagtcgagctatagagagcgatggcgaggagtgtacgaatggctgctggataggttctccgaggcagagactcgggcagcgcgtgagcttgcgtgttacatggacgcacgtgatgatggttaa

SEQ ID NO: 500033 - DNA, 414 bp, Stenotrophomonas maltophilia
atgcaggctgatcgcgcgctggagctggttctgccctggccgagcaaggacctgtcgccgaacgcccgagtccacttccgggtgaaggcgcgggcgacgaagcacgcccggcagactgcggtggtgctggcgcacgaggcgggttggcgcgcgctgcagctgccggcggggaagctgcacctatgggtgagcttccaccaggcgccggggaaggcgctgccggacgacgacaacatgctggggcggttcaaggcataccgggacggcatcgcccaggtgctgggcatcgacgacaagcggttcatcagccacccggtcgtgagcagcgagcggcggccgggcggccaggtggtggtgcggattacgggcgggccggaatcggccggtcactcaacgacaggggaacgtgcatga

SEQ ID NO: 500034 - DNA, 234 bp, Stenotrophomonas maltophilia
atgagccagcaacccgccgatcaccaccacagccgcgagccgggctggccggagtggggccgccagaacatcacgctgacagccgctctgcggatggtccgcatgtacggcgaccgcctcccctcggtcgcccagttgcgtgcggacttcggcgtcagccgggccacggcattccggtggcgggcagcgttcagagacgcggtcgagcagcaagaggccgcccatgcaggctga

SEQ ID NO: 500035 - DNA, 573 bp, Stenotrophomonas maltophilia
atggacgggcaggccctcacccatgccgacctggtgaagattgccggccgctggctgcggaacaccgccggttgctcggttgtgctggaggagctgtgcgccgcaacgggcaacggcgagaacccggacgctatcggctggtacacgggccggacgatgctggtcgagtgcaaggtcagccgctccgacttcctggccgaccggaagaagcccttccgggcgaaccccgagcgcggcttgggcctttaccgctacttcatggcgcccaagggcctgatcaaggtggacgagctgcccgcgcgctggggcctgctggagatcaacggcggccgggtttccgtggcagcgggcaagcgcccgaagtcgtggggcggccttgacgatccatgggcgttcaccgagcggtatgcccaaggcgagacgcagatgctgctgtcggccattcagcggatcaaggtcagggtcggcgccagcgattttcattcgatgctgcacgagcggctgatgcgctccgtgatcgacccgcgatcaaacgcaccatccatggccacttgggccgaggtgaaaccatga

SEQ ID NO: 500036 - DNA, 543 bp, Stenotrophomonas maltophilia
atggatgccatcgagaagcgggcgcgggagctgctggcctccgcgctgatggaaaagggtgagcatctggacgctgcgcatgcgctctcaggcgatatggatggaacgccagcacatcgagccatcatcgccgccctcacgccgcacgagggccatgtagtcgtgacccgaaacgaggcaggccaagccgtagccgtcacccgccaggacgacgaaggccggattctttcggtgatcgcggagttggggccgactgctggctgggctgccgcagcagatcgcgagttggtcgctgctgaacttggcgtggcgaagattgacgactctacggatgtggcagccgaaaaactgcgcgaactcatcgactggcacgtcagcgttgcgactgatcccgctgttaatggcggctacgtcctggtgccggtggaactgcccgacatggggggcgccccgggcttcgctgagggtaattacagccgcagcaactggcatgccgcaatcgctgatttgcagtggctcgccgctcgcccggaggtgccgtaa

SEQ ID NO: 500037 - DNA, 210 bp, Stenotrophomonas maltophilia
atgaacaccgcattccacgtgggccagctggtcatagtgaaggaagatccggacgtgtttccgttttgtggcgagatcgcgcgcgtttctgttctggatgttccgtgcatggacgggatcggaatggaggtggtcagcgatcacctgggccggttcaagggcacctacgagcagtttgagccgattcctgaaatcaaagggaggcactga

SEQ ID NO: 500038 - DNA, 219 bp, Stenotrophomonas maltophilia
atgattgctttcaatcgctggcgtccctttgtccgcctgcactttgcggaaacgcctggggatctgcactggtgggtccataccgccgacggacacacgattcaccagtggctggcactgcacgtggtcgagaatgacgagggcgccaagattttccagatgatcattgggccaatgatgctctgcctcgcagcgcgcttgaagaaggtggtggcctga

SEQ ID NO: 500039 - DNA, 351 bp, Stenotrophomonas maltophilia
atgagcgcgacggtgctgaaaccatgcccgatgtgtggcggcacggatcttcgcatcatgggagatgtgccgcttcaggccatccttggtggctaccacgtgttctgcgataccccgagctgccagtgcgaaggccgccactcgggggaccgtgagaaggcgattcgagcctggaaccgtagggcgcccgccgttcctgactggaagcccatcgagttggcgccgcaggacggcacgcggctgatgctgtgggactcggtgagcaagcggccggtgttcggcagctggcggggcaacaaccccaagatcacgcactttgcggccgagccggccgggccggaggtgggctga

SEQ ID NO: 500040 - DNA, 363 bp, Stenotrophomonas maltophilia
atgtggtcgaaggcaccaccgccgaccagggaagaagccgcccgaatcgagctggccaagacgggcccgtgcatggcctgcctggcgctgcagatgcaggagctgctggacccggagctagtggtctacggctgcgactacaaccacgccaagagcgggaacctgcggcgcggccacatgttcggctacgccctctgcaagtggcaccacatgcggcatccgctggaggggaacaccttcgcgacgatgcgccagatctacggcccgagcctgatggatggctcgcggacgttccacgagacgtacggctccgacgacgagctgattgccaatcagacctacgtgaacgaattgagggcatga

SEQ ID NO: 500041 - DNA, 225 bp, Stenotrophomonas maltophilia
atggacttcaccaactacagcacgcgcagcaagttcgccaaggagatcaacgccggttactcggcgcggctcaacggcctgcgcctgagcgacaacccacacctggtctggcatgaccagccggagggcggtctggccaagcagatcggccacttcaccgaaatggccgaggcatggcagcacggctggcgcctggccgaccaaggtgagaaaggcgcgcgctga

SEQ ID NO: 500042 - DNA, 201 bp, Stenotrophomonas maltophilia
atggtgactgaggcggagctggcccaggcggagcaggcgggccgctgggcacgcgatgcctgccgcagtcgggaatcggcaccgcggtacgagatggggcaggacggtgtgacgcggcggcgccgctggcaggccgggtgggacaagcgggaccaggaactgagcgcggcacgccgcagcacgacgaggaacagacgctga

SEQ ID NO: 500043 - DNA, 630 bp, Stenotrophomonas maltophilia
gtggcggcgctgggttcggaccaggcgatgtcgtcgacgccgagtttgccgtcgtcggctgagccgctgagcgaggggcagtcggcctacctgtgggaattctggaagcagatgacggccatgttcccgggcaagtgggagcgtgagaacggcgcggcgccgttcaagaaggacggcagcctgaccatcgcggccggtacgtggttccaggtgctgaagggccgcagccgggcacagcacgcgcgcggcatggcctgctgcctgaccgagggccgggagtggccgccgaacccgccgaggttcctgacgatgtgcctggacattccggtcctggcggcggtggagcgggaaatggcgccgggccggccgcagagcggcttcacggtactggtgcgctctctgctggacctgcatgtctacgcctcggccgaccacggatcgcagcagcggcggatgttggaggaagcctacacgcgcgctgtccagcacgtggtcgacggcaagccggtgccgcagccggtgctggcgatcgagcaggaaaagcacggcgtgcgacctgtccgtgaccgggagtcggcgcgcgctgcgatggagcgggcagcggccgagctgaacttcgatggtgactga

SEQ ID NO: 500044 - DNA, 876 bp, Stenotrophomonas maltophilia
atggtcttcgaccgctacccgaacggcggcggcgagatgctgctggccctggcgctggccgaccacgcgcacgacgacggtacgcacatcttcccgtcgatcgcccgccttgccgagaagacccggcagtcggagcgttcggtgcagtaccagctgcgccgcatggagcaatccggttggctggtgctggtcaacgccggcatcggtggccgtcgcagcgggttcggtgagggcggtcgtacccgccagtaccggatcaaccctgaatggatgaagggtgcagaaattgcaccctttgcaaagggtgcaaaacaggcctccgaagggtgcaaaacgacgcaggaaagggtgcaaaacggcgtcgaaaagggtgcaacagctattgcacccgaaccaagagcaaccaaaagcaaccaagagcaaccctcacaccgcgagtgtgagcgcgaggccgatccgctgtcgctgaccactgagcaggtcgaccgcgagctggccggtttcggcagcacgccgaccggcgtcgaccgcgaggagctggccaggttcgtccgtcaccgcgccgcgatccgccggccgctgtccgtccagggctggctgcaggtccgccagcagctgatggacctgactgccgccggccacaaccccaacgaatccctgaagcagacgatggccgccggcctggcgctgcccgtgatccctgtcgcccagcaatccgcaggagcaacccatgcaagccctcagcacggttctgccgaccgcaccgagcagctcgaacagcagttctacgcccaacgccgaggcggtggccacggtggcggcgctgggttcggaccaggcgatgtcgtcgacgccgagtttgccgtcgtcggctga

SEQ ID NO: 500045 - DNA, 321 bp, Stenotrophomonas maltophilia
atgagcacgatcaaccatcctgcgcgcgcgagcgatctgagcaccagccacgacgcggcgcactacgtggtcgccagcggcctgcaggcgcaccagcacgaccagagcgccaaggcggtcacggacaaccctggcatgaccagcaacgagctggcgcaggccaccggcctggaccgctacatgctggcccgccgtctgcctgagctgatcaaggctgggcgcgtgtggcgcggccccaacaagccgtgcgcggtcagcggccgcaccgcgtgcacctggtggccggtcgcaccgggccagaacctggccctggggatctga

SEQ ID NO: 500046 - DNA, 444 bp, Stenotrophomonas maltophilia
atgaatgtcaccgatgccgcttacgacacggtccaccagtaccccggtggcagtgaggctttggcgcccaggctgggcatgtcggccgcggttcttcgcggcaaggtcaatccgaacaccgaccgcaacctgctgagcctgcaggaagcggacgcgctgatggcgcgcaccggtgacttccgcattttgcacgcgctgtgcgcgcagcacggtttcgtggcgcagcgcagcgatgccccggaatcgggttcgctcatcagcgcactgctgcaggcggcggctgccaagggcgatctggccgagctggtttcgtcggcactggacgacggcaggatctctccgaacgaggctgacgccatcgcacgtgggtgcgcggcggtgatggccaggctggtgcaggtcagccagcacgccgaggcggcagcagagcggggtggggcatga

SEQ ID NO: 500047 - DNA, 306 bp, Stenotrophomonas maltophilia
atggacgacaaggctcggatcgaacgactcgaaagggaggcagttgcgcaccggcaggagctggacatcctcatcggccggacaaatgcgctgcaccaggttctgttccagttcgcgctggacagggacaacccgacagaagtgctcatgagaaagctcgccgaagcatcggagagatccgtcgcagaccttctgcaagccaacttcccagaccgggcactggacgaacatcgacgggtgacgcagcagttcgtggaactcctgaacaacagtcggctcgggttccagaggcccgatcaggcgtag

SEQ ID NO: 500048 - DNA, 483 bp, Stenotrophomonas maltophilia
atggagaccttgcgcagctacctcaagaccctttcgccgcttgaacaagcggactttgcccgccgtgctggaaccaccattggttacctgcgcaaggcgctgagtaaaggtcagcgcttcggcggcgccttggtccgacaactccacgtgcatagcggtggacgcgtctgcctcacggatctccgccctgacatctggccggcggacgagcagcagccaagtggctcgaagcagatggccgcactcatcgatagccgcatgagcaagcgcgcgctgcgcgcccggcttggcctgtcgacggacaagcagctggcgaaggtgctgcagctgccgaccgagcaggtcgagggttgggcggaagagggcgccttgccggcgctgccggagatccagcgcctgctgggcgtgcaggaacagccgcaggcgctgcccgcgccgcatgaccccgatgagaaccgttacgcccccctggaggtggcctga

SEQ ID NO: 500049 - DNA, 744 bp, Stenotrophomonas maltophilia
atggtaaagccaagtcaataccgtttggtaaattacccttcggtaaccgaaactccgaggatgaagaccgacacgcccaccgtggccacccgccggcgtcgcctgcgcgaatggatcgatgcccgccatgacgggagtcaggccgcgttcgttgctgcgacggggatcaatcagggtgagctgtcgcttctactgaaggacaagtcgttcggagagaagaaggccgctgccattgagctggcggctggaatgccaagcggctacctcagcgactctgaggtgccggtgcaggcggtctcatcgcctgcgatacagagcgattacgttcgcgtcgaacagatcgatgcggaggcgcagatggggacggtgggcaggatcaacgaggacttccccgaggtcatccgtgcgatggacttcgcgccgacttacatccgctccgttgtcggtttcctgccgccccctgggcggctgaagctggttaccggcgtcggcgactcgatgtcgccaaagatcaagccaggtgagatggtgctggtggataccgggtgtaccgagttcgtcggtgacggtctgtatttgatcaataccgggcagggtcagcagatcaaggcccttcagtcgcagccggacggcatctgggcgcgcagctacgacccggtgctctatcccccattccggctcaccgacgattccatcatcggtggccgggtgcatctaatccagcatctcgagcgcgtcgcataa

SEQ ID NO: 500050 - DNA, 336 bp, Stenotrophomonas maltophilia
atggttccggcagagcgcgtgtatcaggcgagttacctgaccggctctgctgaccgatcggcgcagatttacctaaccagggataaaggcttcagcgggtcgggttgttctcacgacatttcgcttaacaacgagaagatcctgtccattcgccaatccgaagcggcgacgctgcacgtagcgcccggctcgtatttcttgaagctcgagacgggcggcggactctgcccgaacatttccacgtcgcagaatctgacggtggcggcgggagaccggcaggtctacagaatcctgctcccctcggatggcagcctccgtctcacccgggagaagtag

SEQ ID NO: 500051 - DNA, 237 bp, Stenotrophomonas maltophilia
atggccgcgatcaccaccaccagccgcggtgtacccagcgccgaaacccggcctcatgccggaaccatcgtcgtccaggttggaggctccgccctactcagcctgacctcggccgaggcccgagaactggccgaacacctggccgtctgcgccgacgcgatcgacgaaggcgcgaccgaaaccgccaccatcgcccgctccaagccgctggctctccagcaggcggtggccgcgtga

SEQ ID NO: 500052 - DNA, 240 bp, Stenotrophomonas maltophilia
gtgagcgccgtcatcctctacttccccacccgccgcgtccgcgccaaggccgtagccgacgctgtgcgccatgccgcgctgcgcctcggataccacccgcacaacgccgacgcggcagccgccatcgcccgcaaggacttcatcagcggccgatacagcgccgcgcgcgccgtcagcgaaatggtcgaccagctcggcgccgccatgcgccagatgcgcgtcaaaggcggtgctgcatga

SEQ ID NO: 500053 - DNA, 378 bp, Stenotrophomonas maltophilia
atgaacgccctggccaccaccacggtgaggaagaaccttctggaacgagagggctacacgccctactgcggcgaagcgctgatgtgcacggcaggccttccacgaaccacttgggacggcgcgcagttccgctgccgctgtggctggcggtcggagttcccagccgacttcatcgctgcatacaaggccaagtggggcatccccagtaaagcctcgactcaaccggacttcttcgccgccatggccgtcggcatcccgcccatcaccccgccccaggcacccgcagcacaccgctgcgagtgcgacgccaccaaccaccacgtgtgcgaagactgtgaagcggtcgcgcacgccctgaagcagcacggagaccgctga

SEQ ID NO: 500054 - DNA, 237 bp, Stenotrophomonas maltophilia
atgcgccacttggccctgcccttcttctgcgtcgtgttcctcggcgtcgccctcggcgaagcattcgccaacggcgtcagctcgcggttaggcgccgccttcctggtcgcagcaatcctgtgggccgtcatcgcctacatcgagatccgcgcggcatggccaccattcgccgcggcaatgcagcgccgccgcgccgagcggcagcgaccgccgctgaccgctgacgacacccactga

SEQ ID NO: 500055 - DNA, 195 bp, Stenotrophomonas maltophilia
atgcgcaaccagctcgacattttcgaccacgacccggcgcgcctcgcaaaggccaaccgcgacgcagccgagcatgccctgactgacgtgcagttctcccacaaggtccgccaggaacgagccgcccactacaccgccgaggcggagcggctggaagccctggcagctctctgcagtccaacccgcgccgcctga

SEQ ID NO: 500056 - DNA, 555 bp, Stenotrophomonas maltophilia
ttgaacgccatcaccatccgcaccaagggcgacaccgagatccagttcgccctctctcaggcttcgatcaccaacctgatcgagcttgccgcagatcccgtcgtctccgacagcctggtcgtcacgggccacacgaagctgttcgccgatggcaccagcgccgctggcagcgacccgcgcaccgaccacgtggctgtgatcgatcactccaccgggctgatgtgggcggtcaagtccatcggggattccgacggagacccgatgagccacgccaactgcgagaaggcctgcagctggctgcgcctgctcggccacgacgactggcgcctgccgacccgcgccgagctgtccgccctagtcgatgaatgccgccacgagcccgccatcgataccgcgctgttccccggcgtcctgccgcgctggcactggaccagcactgcggccgcctggtcctcggcgtccgcgtggtacgtccatttcggcagcggcctcgtctacggcctcctccgcgccaacggcgggttcgcgttggccgtgcgtcgtgccggtcagtag

SEQ ID NO: 500057 - DNA, 426 bp, Stenotrophomonas maltophilia
atgaaccccatcaccctcaagaagatcggcgccggccggaaccagttgccggacgattccaccgaccacgtcgccgtgttcctgcccgactacggcctgaccttcaccgccaccaacatcgtggacagcgacgttccacacgccgattgcgaggctgccgccaaagcccttgacctgcttggccataccgactgggatctgcccaccatcgaggagtaccagctcctgatcgaccgcagccgccactcgccggccatcaacaccgacttcttccgggatatccagaacgactggtactggtcgaagaccccggccgcctggtcctcggcgtccgcgtggtccgtcgatttcctcagcggcctcgtcgactacggccaccgcgacggcctcgggttcgcgttggccgtgcgtcgtgccggtcagtga

SEQ ID NO: 500058 - DNA, 444 bp, Stenotrophomonas maltophilia
atgacttcccgcttccagcccccacccatcatcaaggccgccgaacgtatggcggtcgagatcgaaaacgccgtgcgccggttcgcccgctaccaccgctaccagatcggtagcgacctgcgcacgcgttcccagcaggtgttcatcaacgccaacaacgcctggcgcgaacgcgccgagcaggcacgatgggtggcggtgctggtgcgggatatcgatgccctcaagcagctcctgcagattggcaagggggttggcgcgttcgccagcttccgccagttcgaaatgcttatccgcctggccgaacagctgggctcccaggctggcggctggcgccgccacctggctagttcctcccatgcccagaatgcgcaagccgatggtgccgcgcagcgtggcaagaaactgagtacccgtaccgccctcgcgggggccaactcatga

SEQ ID NO: 500059 - DNA, 1368 bp, Stenotrophomonas maltophilia
atgacgaatccgcgctatccgcatccgggctgcgcggcctggtcgaaagtgtatggggaggcggccgcctggtcctcggcgtccgcgtggaacgtcaatttcaacaacggcaacgtcaacaacaaccaccgcaacaacaacgggttcgcgttggccgtgcgtcgtgccggtgagtttcagggagaggtaggcctgcaggagctgtatcaggcatggcggcgcgcacgccgccagaaagttccaagcttcaaccagctgcgcttcgatcaccgctgggcagacggcctgctgcagctgcagcgcgagctgcttgccggccggtgggagccgcggccgtcgacgtgcttagtggccacccggcccaaggcccgcgagatccacgccccggacttcgccgaccgcgtagtgcaccactggctggtgccgcagctggaagcgctgtgggagccgacgttcatccacgacagctatgccaaccgcaaggggcgcggcagccatgcggccgtgcgccgggcccagcagttcgttcgccaggtgcacagcggccagggcggcggctggtatctgcagctggacgtggcgaacttcttcaacagcatccaccggccgacgctgtggcggatgctgcgtacgcggctacgccgccgcggcgcaccattggttgtccagcaggccactcatgcactgctgcgccgttcaccgctgcatgccggcgtccagtaccgggccacggccgccgagcaggcgctggtgccgccgcacaagcgcttggccaacgccccggccggccgcggcctgccgatcggcaacctgtccagccagttcttcgccaacgtgtacctggacgctctggatcagttcgccaaacacgtgctgaaggcaaagcgctacctgcgctacgtcgatgacttcgtgctgttccaccactgccgcgagcagctggccacctggcgcgagcagatcgaggccttcctgagcgacaccctgggcctgcgcctcaaggctgagcagaagctctgccgcctcacggacggcctggacttcctcgggtacgtgatctacccgacccacactctcgctcgccgccgggtggttgggcatctgcataccgcgctggccgagtgggaagggaaccacgtccagggcagccagctgcgaggcacaccggcggacttccgtgaactagcaaaccgcgtcgccagcttcaccggacacctgcgtcacgcgagcagccagcggctgatgcggcgtgtccatatccgattcccttggctgcgctctgcagcacggccgcgccggttcagccacagggcagaacgcagcattcattcattccgctgggtcagagaggaggccgcccatggctga

SEQ ID NO: 500060 - DNA, 504 bp, Stenotrophomonas maltophilia
atggctgaccagatgctcaccgctgcaatcgataaccgcgaggtcggccatcagctggccagcatgtccggggtcgagctcgacttgatcggtccccaggatgttcgactgtgggaggctcgcggccaggcgcttcaggcgctcgctacgggcgacatggacgccgcgcttcgcactatgggcatggtgtcctcgcgggtcatggaccgcgacgaagcatgggagatcgcatcgaatgcggtagccgtccgccttgctgccggctggacgcgcgacatgctcgacagcagcaccgagggcggcctcgcgccgtgtggtcgcggctactacctcttctggtctggagcgatcgccgtctgctacttcccgatggtctgcatcaccgacatgaacggccgcggctaccacttccatatcgcccaggacctgctcaacgaccgagatccgaacccctacgcgatccatcacccaatcgccccacagcaactggacctgttcgcatga

SEQ ID NO: 500061 - DNA, 309 bp, Stenotrophomonas maltophilia
atgacccaggaacatatcggccacccggaagggttgccgaactgcgccgccggccaccgcgcgcgccacatccacgacaagcggtgcgcctccgctggcggtggccacctagtcgagtgcgcctgcaggtcgaccagtaagcatgccgatcccgacgcagccattgcggcatggcgccggctcaataggccggcacgcagcgcgcgcccagcagcagtgtctgaggcgggcgacaacgttctgcagttccagctcggcctggccgagcgcaaacccaagacccagcgcgcgtcgctggcgtcgatctga

SEQ ID NO: 500062 - DNA, 963 bp, Stenotrophomonas maltophilia
atggcatctatccaacgacgcggcacctcctggcgtgccgagatctacaaggacggtcgacgcgagtcgaacaccctccccacgaaggcgcaggccgtccagtgggcgctgatgcgcgaggcggaactgaccggcgcccgcctgcctgagaataccgtcaaggaagccctgcggcgctatgccaacgaggtggcgccgaagcacaagggcgcgcgctgggagctggcccggctgggcttgctggagcgggatccgctggcgctcgtgcgactgccggcgttgagacccatccacctggccgaatggcgcgagcgtcgcctatcccaggtggcgccggcgtcagtccgacgcgagatgaacctgctgcagtccgtcttcaagtcctgcaggaaggactggggctggctgaacagcgacccgatcaaggacgtggaccggccgcaggcaccggccagccggaagcgccgcgttgcgcaggaagagatcgacagactcacgctggcgcttggatatgacggcggagtgccggagacggctcagcaccgggtcgcgttgtgcttcatgttcgctttggagacggcgatgcgcgcgggcgagatcttgggcatgaaatggtccgatgtatcggccaaatccgtaaccctgccgaagaccaagaacggcgacgtgcgccgagtgcctatgtcagcccgtgcgagggagatcatcggcctgcttccgcaggatgccgaaaacgtgttcgacctggatcccggcacccgcgacaccctcttccgtagggcgcgggatgccgctcagatcgagaacctgcacttccacgacagccgtgcagaggcaatctggcggctgtcgaagaagctggacgtgatggagctggcacgggtcattggccaccgggacctgaagagcctcttgatttactaccagaccgacgccgacgagctggctgaccggctcggttag

SEQ ID NO: 500063 - DNA, 1239 bp, Stenotrophomonas maltophilia
atggcccttcgcctcaaagggaccgcgcccaagccgggtgcgcccgataagcgctactacatgctcgacgtgcaggagggataccggcgcgtgcgcttgtccaccggcacccgcgaccgcgtggcagccgagcgcaaggagcaggcggtcctcgacgccctgcgcgacgaccccgacgtttccgaggacgtgctgcgcgaactcatccggggcaagtcccggtcggcgcagatggccgtggcgaaagccaaggcccggcagcgcaccctcaaggacgcgatggatgacgccctggacgaccgcaacttttggggcaagctcaagtccatcgagaccgtccgcaccaactgcaagatcgtccagggcttcctgggcgaggacacgcccatcaacgacatcacccaggccgcagtggacgcgatggtgaccaagatggaggccgagggagctgctccggcgaccatcaaccgcaagatgcacgccctgatggccgtcctgcgccgcgaggcgaaggccgggcgcatgctggccgccatcccggagtaccggccgagcgacgagcgcgacaacgcgcgccagttcaccctgaccattgaggacgaggagctgatcctatcccgcgtgctcgcgtgggacatcctgcccgaccccgagtacggcggtcggccgcggacgcgcgacggtaaggactaccacgacctgttcgtgttcctggccgacgtgggctgccgcctgagccaggcattcaacctgcgctggagcgacctggtgggaaccccgccgaccgccgttcgcttctggcgtcacggggaactgaaaggcggccggcagcgcaccatcccgttgacctcccgcgcctcggaagtggtccagcggcggcgcagggcggcaggcaaggagcagaccggccccttctccacgctcaacaagacccgcgccaacaagctctggaatcgtgcgcgaaaggggacgcatctcgccaaggagaaggagtgcgtgatccactcgctgcggcacacctgcgccacccggctgctgctggcgaccggcaacatcaagctcgtgcaggagtggctggggcatcgggacatccgcaccacgtcggagacctacgcgaaggtgctggccgaacaggcgctcatcggcaagtctgcgctggagcaattgcgggctgcgccgcaggtgacgcccacaggtgacgttccgagacagggattgattgccaacgagggattgtag

SEQ ID NO: 500064 - DNA, 387 bp, Stenotrophomonas maltophilia
atggcttcgcgggtaaacggtaagggttgcttggggtcgctactggtcttagaagatgaccccgacctgtcagagatgttgcaggaaatcctggtgaatttcggctatgaggtcgaggttgttgcttcctccgcgcaagctttagaccaactggcggcaaaagtgttccacgcggcaatcttagatattcatatcgaggatggtggctccatgtcggtcgctgactgtctcttgtcgaatcgaataccctacatgtttgccacggggcttcccaatcctcaactgcccaccattcaccaatgggctacctttcttcaaaagccgtatcgcataaacgatctcatgggggccttggaacggacgcgtcagatggggattccagtttag

SEQ ID NO: 500065 - DNA, 318 bp, Stenotrophomonas maltophilia
atggacgggatcgagtacgccgaatacgaacaagtaacgcacacgcaacagaactacgcagacaggatttacggcttcgtagccgctgaggcgagttacgagcattcccctcccgctaaggctcagcaagaccacgacaatctcgtcaatagggtgcagtcgctggtaaatctcaaggtggtcggcggggagaccgctgacggcaaaccgacagtcacagtgtttttgcatgacaaggttgtgcgtccggttgcagcggatcacgtccgggacgaattaattgctgattgggagaacgctagggccaagcggggctaa

SEQ ID NO: 500066 - DNA, 207 bp, Stenotrophomonas maltophilia
gtggaaaccctgatcctgttcatcaccatcgtcgccgtgctggccgtgctgttcgccttcgtcgcctacggcgctgcctggctgtggtggcgcagcctcaacaccctcgaacgtgccatgtaccgcgacgccgccagtatcaagctgtggcccgctgctgtcggcgctgtcggcgttgcttggctggtcgcacgctcgctcgcgtga

SEQ ID NO: 500067 - DNA, 291 bp, Stenotrophomonas maltophilia
atgaagcgcgcacttctgatcctggcgctgtgcgctggcctcgctgcgtgcgacatgaagccttggccgccacgcgccgattacggctcgtgcctgaaaggacacaccgagagtggcctgatgctgatcccaaacagcaatggcggattctcgtacatccccaccagcgattacgtctgcgacgagtacgagtacccgctcggcgacggcccggagtaccaggccggaatgaagcgctacgccgccgagctacaggcgtggtatgagcgtcacccggagaagcggccatga

SEQ ID NO: 500068 - DNA, 435 bp, Stenotrophomonas maltophilia
atgcgcctcgccactgacgcacccgcctggtgcaggcgcctgtgttccgcacagtcattcgaggtgggcgaaatcatccgtgagaagatcgactccgctccatgtaccttggagcacttcggcggctcctgcggcctcgtcgcgcgatacccccttgagaaggacaacgtctggacggttgaaatgcgcccgggcaacgccaaggcattttccatgaacctccgcctctaccgccccgccgatgccagcgcctgcctgtcgattttcgacagcaacgtgcccacctacttcgcgcccgaagagcgcagcgactttgggcgcttcctgcaagaacaggccatggactgtgcattccaggtcatcgaacgagatggcagcatcgtggcgtgcggcggcctgtcgcgacgcggcgacggcagtgccggtttctgctag

SEQ ID NO: 500069 - DNA, 3729 bp, Stenotrophomonas maltophilia
atgagcctctataccctcaccgtcgacctgctgatgaagacgggttcgtttgaaacgggcatgaccaaggccgagcggctggccagccagaaagccacgcagatccacgcctccatgactcgcgtcgctaccgtggcgggcgcggcgcttggcaccgctgccgctgctgctggcacggctgtgttcacctggaccaagcaggttgggcagttggcagtggagtacgaccggctgggcaagctctccggcaccacgtcgcaggagttccagcgcatggccgcaggtgcccgcacggtaggtatcagccaggagaagctggccgatattttcaaggacgtgcaggagaaaatcggcgactacgcccaaacgggcggcggggagatgaaagacttcttcgacaacatcgccaagggcagcggcctcaccgtcgagagcttccgcaagctgtctggccccgacgccctgggcctgtacttcaagagcctggagaaggcgaacctctcacagtcggagctgaccagctacatggaggccatcgccagtgattcggcgatgctgatcccgctgctgcgcaacaacagcgccgagttcaaccgcatgggcaacgcggcggaggccgcaggcagcatcatcgacgtgcggctgacccaggcaatgctgggcatgcgtgatgtgacgaaccgggcagagctgtctctgcaaggcatgaaggtgcaggtggtgtcgggcatcctgcctgccctgcaggacttcaccgaccagctcgacgcggtggcagtcaacggcaacttcgccaaggaagcggccgacgctctctccggtgccatccggggcgtcaccgacgcggtgcgggacggcggcgccgtcgtggacttcttcgaccgtatccggggcggcctggtgggcgtggagaagcaaggccatgcagcgttcaagctggcgaccggtcaatacgcgttcggcggtggcggctgggagggcttcaagaacgagtacgcacaaggcactgcctatgccgacaacggctggaaggcgatgcagcccaagaccgccaagcggcccagcgtcaccgtgctggaaggatcggagcgcatgcccgaatgggcgctgctgccggccacgccggacgcctacgaaccgcccaaggcgcggggcaagggcagcgcagcgaagaccgggaacgcggaatacgaccgccaggccgagctgctgcgccgctacacggctgaggcggacatggccgccgctacgatggccggcccgctggccgaggccgagcagaagcacaagcagcgcctggccgagctgaacaaggaactggccgctggcaatatcacgcgcgctgccttcaacacgctggagaaggaatcagcggctcagcttgcggcgaccaccgccgagctggacaagcgcaagcgtgcgccgctggcgctgctggacaccatgagcggcgagctggacatgatgcgcctcatcgggccagcgcgggagcgcgcacaccgtgagatgcagaaccagcgcgacatgcaggaggccatcaacgaggcgaacgcggccggcgcgggcatcaccgccgacctcagcgcctcactcatggcacaggcgcgcgctgcggcacaggccagcatcgatgcggataaatacgccgccagcctccagcagtgggccgacgtgggcacttacctggtcagcgacaccgccgacgctatggccaacttcgtcgcgggcggtctgcgcgattggtcgggtatgtgggacgacatgaaagacgtggccaggcaggggctgcgcgacatcgcgcgccagctgctggagcaaaagctggtgctcccgattcagacccgcatcatggacggcatcaatgggctcggcagcggcaacgggttgagcctcaacagcatcctggggatcttcgccggcaacggcactgccgcaggcggccagaacgccggcaacatcgccagcctgctatcgaagggccagagcgctatcgggttcacccccggcgctgcagccgcggcgggtggcttcggcccgaacaccatgatgggcttcggcaacaacgtggccgcactgacgggaggtggcacggccgttgccagcggggccggtgccgcaggagcggctaccggtgcgctcggcgccgtcgcggcgtttgctccctatgcggcgctgatcgcaatgggtatgcagatggccggcagcgcctacaaggaaggcttcgggctggagaaccaggacaagtttgacctgctgaaacgtggccacttcgcctccggtggcctgttgacgccggtcatgctcgacagcatgtcgctggacgtgatcgggcgcgcgctgggcatgaaccgaaagacggcggcgatcttctccggcagctcgctgctgggcaaggcgttcgggcgaagtgcgcccaagatcaccggtcagggcatcacgggcgattacggcttcggtggactggacggccagagctacgccgatgtgaagcagaaaggcggctggttccgctccgacaagaagtggacccaatacggggcactcgaccccggtatcgatcgcacgttcgacatggcggctcggcagattcgcggcgctgccacggacctggccaagcaattgggcatggacatgtcccagcagctggccggggtcaaggtgagcctgggcaaactgtcgttgtcggcggattcggcggaggcacagcagcagctggaggcttatctggccggcatgcaggaccgcctctataccgaggcggtcaaggcggcgggcttcggtgggcagctggatggctacttcgactcggcggacgtgttcgcggcgctgggagcatccatcgaactggcggtgggaaatgccgacgagctgggccgggcactcaacggcctggaaatcgacaaggtgaacaaggccgtggactacttccaggacctggccggcgtcgccggtacggacctggccacgcagatcagcaaggtgtcgggcctgctgggcaactactccaccttgatggccgacgtgtcgacgcagctgctcacgggcgacttgaccgcctaccagcagcaggcactgagcatcgagcgcacctaccggcaacaggtgaagtcagcgaacgactacgccaaggcgctgggactgtccggtgcgcgcgctgaggacctggccaagatcgaggcactgcgcgccaccaacatgggcaagctgcaagcgcagatcgacaaggacaagaaagccattagctacgggctatccgtcagcgacctgtcgccgctgaccgaccaggagaagctacagcagaccatgcaggagctggagcgggcagtgtcgggcggcgacagcagcgcggcgcaggcggccgcacaggcggcgctgggattcggtcggaacctctatgccagcggtcaggactacaacagcctctacggccaggtgacgggcctgatcgacggcatgaaggtgggcgacctggacaagggtggcgtcggcatgggcgagctggccgacaccatcgaggcgctgccggacaacttcgcgcgcgctgtgttcgacctggtggtggacaacaaggcgcaggccgcgactacggcggcggtgcagcagagcaatgctctgctcgcccaagtagtggaccggctagacagaatagaggcagccagcagcaagactgctgctacaactagcagcagcgcgttgaggacgtcactcaacgcgcggtcagctaaatag

SEQ ID NO: 500070 - DNA, 1431 bp, Stenotrophomonas maltophilia
atgcctcaccacaacgatttccagcagatgcgcgaccgccacgccaaccgcaaagccgcattctcggcacgcgcggagctcggcaaactcggcgtcaccatcgaagaaccgaccaccgacaagccgctggaccagttgccgcgcgctgaagcactggcctatcgcaacagcttgcgccgtgcgtccaatgcgctgacgacccacgccagggagaaggacgaaaacctcaccgacggcgtgatggatgcgttggagtacatcaacaacgcgatcagcttgatcagcgcgggcatggatcatcaggaacagatggacctgaccacagccaacgcgctgggcaccatgagcgagggcgagcgcctgcgcgacaccgaaggccgccagatcggcacgctgctcaccgcatcggacctgcagaaccaggcaaccatcgcccggcgcctgaatgcgatgcgcccggacggcggcggcttcaacaatggcgatgaccaggtgagcctgtcggacttcatccggggcgttgccaacatgcgcaccagcgacggcgtgcgcgctgcgctcagcgagggcacgaacaccgcaggcggctacaccgtgccgaccgtgctgatgccgggcatcctcaacgccctggtgcccgcctcgtccgttctcagcgcaggcgccaacgtggccgtgctggatacctcggccagctccttcagcatcgcggcagtggacaccatccccaccccagcctggcgccaggaacacggccaggtggctgagagcgagccggcgttccgcgcggtcaaggtcaccccgcgcagtctggctttccgcttcaagatttcccgcgagctgctggccgattcgctgggcggcctggacgctgcactgcgcacggccattgcccaagcgttcgccaaggagatcgaccgcgcatccctgatgggcagcggcaccgagccggagattcgcggcctgcgcaacatcccgggtatcaacaagctgccgatgggcaccaacggggggccgatcaccgactggcgccagttcatccgcgcccgtcgcctcatcaccgaggccaacgccccggtgccggacgtggcgatcctgtcgccgcgcgaggacgaaaccatgagcctgcttgtggacaccaccggccagccgctgcgacggccggaggccctgagcaactggaagttcctcaccaccagccagatcccgaccaacgaagaggtgggcaccgcgaccaacgcggccgccatctacgtgggcggcttccagatgttcaccatctacatgcgcgagtccgtgtcgatccagctgctgaaggagctgtatgccgagactggcgaggttggtttcatctgccacacccgtctggacgtggcatcggcctaccccaaggcgttcaccgtcatcgaaggcgtgacggacaccgagtaa

SEQ ID NO: 500071 - DNA, 204 bp, Stenotrophomonas maltophilia
atgtcgatcaccgtatggctggtggtgaacctggtgcatggggtgcagcgggcgcaggtggtgcacgacgtgcacgtggtgcatcccgtgcagtacctgcaccgcgtgcagcagtggcggggtgtgcgcaaaaccacacaccccctggtagtagttatctgtgcactcaccctgagtacggttttgccccgaaatctggcttga

SEQ ID NO: 500072 - DNA, 510 bp, Stenotrophomonas maltophilia
atgacagagcgcgaagcccgcaagcaggcacggcggcgggcacgggccacgggacgtagcagcagtgtctacgtccccatctctccgcacgtccggctctatgcctgggagcttgactgtcccgcctatcggaccttgaacccggatgcacgcgcgctcctggtcgagctacgcgcgctgtatcgaccatccaccggcaacgaggtcttcctcagtgtccgggaggcgcgccggcgcttgggcaacgtaggccaggcgaaggtgcaagcggcgtttgctgcacttgaggagcgcggctggatcgaggaggccaaggccgggagcttcgatcagaagacaggcaccgggcgcgcgcgctcgttcctgttaacgaatgttggcaccgacggcagcgacgccgatgccaagaagacctacatgcgctggaggccatacgccaacgaatgccaaaaaaacacggtactcaaggtgagtacaccccgtactcaaggcgagtacggtcatgcctaa

SEQ ID NO: 500073 - DNA, 267 bp, Stenotrophomonas maltophilia
atgagccgccgtcccgcagttgaacccatcgcatgcgactgctgcggcaagccgctgctgccggtgttcggcacgttccatcgtgtggagcgggagttcggctgggcctccctcccctacgtgctgtgcggtgactgcgccctgcagcacaggggcaacccgtctgaggcccgcgtgcgcgagtggatcatgacgcgcgcggcgcgcgctggggccgagtggagccgctctgtcggccagctgctggcaggggcacacctgagatga

SEQ ID NO: 500074 - DNA, 405 bp, Stenotrophomonas maltophilia
atgagcgctactgtaccgcattccgcgcacgacgccatcgggcaatcccccgatgcgtattcagaaattcccgacactcgcgagcccgccgataccaggtacgactggcttagggaggaatgggaccgatcgacgttgccaaagtcggtggcccaccgcatggagaaggtggatcgcaccattcaagccgtaatggggctgcaacgcgtgctcatgcgcgagcatcgcggccgatctcttcaagccgccgatccgcagagcatccggcatgacggccttgacgagtacgagattgaggcgatgcacgacgcggtgcacctgctggtctataccgccgccgacgaaatggaatacatgcgcacgaaccgtaatcagttctggagcggcatgagggattgggtatga

SEQ ID NO: 500075 - DNA, 225 bp, Stenotrophomonas maltophilia
atgtcacaggatgcaacgaaacccaaactcgcctacccaatcgaagaagctttcgagcagataggggtgtcgcggaccaggggatatcagctcatcaacagcgggcacctccgcacatacaaggacggcaagcggcgtctgtgcagccactcggcgctggtggagtgccagcaggccatggagaaggcatctcaagggggaaagccggatgctccgcgcgcctga

SEQ ID NO: 500076 - DNA, 603 bp, Stenotrophomonas maltophilia
atgtcaacgaccaagaacaagggtggccggccaccgcgtgcgcccggcgaaaagctgcagcggatcaacatgacgctgaggccgagcctgttattcggcctagaagtcgtggcccgtgatcggcgcacgtccctgagccaggccgccgagtacctgattgagcagcagctgcgcagctatcaggtcgaaggggctcccgcgacaaagctgctggatggcgtggtcgacgtaatgcgagatcacctctccaacgggaatccgctggtggagaaggaacccgatgacgcagaggaagtggctgcgctgctcctggccagcccatcaggccgggcctttttcatgccggatacgctgcagactccgagcgagcgctatttcctaaggttctatgcgagcctcctacggatcgcgaacgaggctgcggcggatggcgacgagctcgcatccgcgatgctcatgactgtgatgagctctcttgcgcgaccggatctgcttgagcgactccatgcggctgcgaacgacggagagcaaaagggcagcccggtagatgaggctgcgcgttccacctatgcccaattgatggccgttgtggcggggccgtag

SEQ ID NO: 500077 - DNA, 1173 bp, Stenotrophomonas maltophilia
atgggaaccaagctgacgatccgcgccgtggagctggcccagcccagcgagaagccctacgagatcagcgacagcgacatgaagggcctgctgctgcgcgtgcagccctcgggcgtcaagtcctacatcgtgacgtgggggcgcgggaagcgccgaacgctcggcaagcacccggtgatgacgctggccggcgcgcgcgctgcggctctggccgcgctgtcggaggcgtcccagcatggcgccccgctcgccgtggtggcgcccaagagcgaactcaccgtggccgatgcctgccgcgactacgtgaccgccctggagaaggatgggcgcaaaaccgcgtcggatgacgcaaagcgccggtttgagcgctgcctctatggcgacaagctgggcaaggtgcgcctcaaggatctccatcaggatcacatcgaagcctggcgcgaccgcgtggagaaaggcgaccttccgccgctgccagtgaagcgcggccggccaccggtggcgaagcccctggcacgctccagcatcaaccgcatccgtacgacgctggtggccgcactgaaccacgccgtggcccgccgcaaggtatcccctgatctcgcgttcgagtggaacgcggtgaagccgctcaaagacgccgggcagcgccgggggctgtacctggagcgtgagcagcggcgcgcgctgttggaagccgctgaggggccagtccgcgacctgatcgaatgtgtggcactcacgggctgcaggccgggcgatccgtcgctatgcctgcgctcggactatgacggccgcacggccagcgtgaggttccgcagcaaggaccacgaccgcaagataccgctctcgcccgctgccactgcgctgttcgaccgcctggccaaggggaagctacccaaggcgcacctgttcacccaggacgggaagaaggtatggacgccaagcgactggagcgagcttgttcgggatgcctcagcgcgcgctggactgcctgccggcgtgacgctctacacgctgcgccattgctggatcaccgacgccatcgtaggcggcatggacctgctgaccgtagcgaagctcgccggcacgtcgctggcgatgatcgagaagcactacggccacctggtgcagggtgcagcgcgcgacaaactggcgcaggtgcagttcctgtag

SEQ ID NO: 500078 - DNA, 729 bp, Stenotrophomonas maltophilia
gtggtgatcgatccggtgcggaatgttgcaatctgggagtggagcaacaagagcgaggtgttcggcaaccagatgccgagtgccgacccggatggggatggtgtggcgttcgagctggcgctgcgattcccaggccagcaggccacggatgcgagtgggctgttctacaactaccagcgggagtatgaccctgcggtggggcggtattcgcagagtgatcgcattggactcaggggcgggatcagcacatacggatacgcaggtggcgtcccgtcgtctttgatagatccacttggtttgtgtccctgcgagtgcgtcgactacttaggcatgacgttcggtgtggcagacctcacctttggaggcttggaagctgtgaatggcgcaggagccaccattgccggtgttttgtctctgcagcccgaagttgcaatccccggattcctggtaatggtgaatggtggagcaacggcgtacgatggagtgtcagcgatacaaaccgctcaagatggaaaggaaagagaatccatctacgccgaggtgggcggggagttgctggggccagttggcgcgaagacgggagagctgttgtcgtttggcttgacgttcagcggtcaccttaaggccacacggaaactgttgcaacgcgtagccactgacaaggatgcactggatgccatgaaggcggtgagggatgtttcgggtgggtccgggtgcaattgcaaataa

SEQ ID NO: 500079 - DNA, 216 bp, Stenotrophomonas maltophilia
gtggcaatcgctcggtcgcccgatgtcccggcttgggcgcggagcagaaagagcgaagtgtttggcaaccagattccgagtgccgacccggacggggatggtgtggcagtcgagctggcgctgcgcttcccggggcagcaggccacggatgcgagtgggttgttctacaactatcagcgcgagtacgacccggcggcgggggtactcgcagagtga

SEQ ID NO: 500080 - DNA, 774 bp, Stenotrophomonas maltophilia
atgagttatttcctcgatcgcttgcagttcttcaagcgtgacccccagacctttgccgatggccatggatttgccaagagcgagggccgcgactgggaaaacagctaccgcgcccgctggcagtacgacaagatcgtgcggtccacccatggcgtgaactgcaccggctcctgcagctggaagatctacgtcaagaacggcttggtcacctgggaaacccagcagaccgactacccgcgcacgcgcccggacctgcccaaccatgaaccgcgtggctgcccgcgtggcgccagctattcctggtacctgtacagcgccaaccggctgaagtacccgctgatccgcggcacgctgctgcgcctgtggcgcgaagcacgcaagagcaaggccccggtcgatgcctgggccagcatcgtggaggacaaggagaaggcgcgttcgtacaagacccgccgcggcatgggcggcttcgtgcgcctgcagtgggaagaggccaacgagatcatcgccgcctccaacctatatacagtgaagcagtacggcccggaccgcgtggtcgggttctcgccgattccggcgatgtcgatggtgtcctacgccgccggtgcgcgctacctgtcgctgctgggtggcgcctgcctgtccttctacgactggtactgcgatctgccgccggcctcgccgcagatttggggcgagcagaccgacgtgcccgaatcggccgactggtacaacagccgctacatcatcgcctggggctcgaacgtgccgtag

SEQ ID NO: 500081 - DNA, 3330 bp, Stenotrophomonas maltophilia; identical to SEQ ID NO: 497160

SEQ ID NO: 500082 - DNA, 465 bp, Stenotrophomonas maltophilia
atgcgaaagacagggatgctcgtgatcaccgggctgctgctggcccccaccgtgcaggctgctcccgcctgccgggagcctgcggctgtggcccgcgccttctacgaggcgacgactggcaacggtgatctgctggatccgccggccgcgctggtcagcgcggccttcggcaaggcgctgcgtgatgagcgtgcctgccagcagcgcgaggagggcatctgcacgatcgattccgatccgtggctggatgcgcaggatggcgacatcgacagccccgtgcgttacagctggaaagaggcctcggcgaccaccggccaggtagaaatgcgctatttggtctggaagaaggcctacgtgacccggttgccgatggtgcgccagggccagggctgctggcaggtcgatgacatcctcaccaacagcggccgttcggtgcggaagatcctggcgcagccggtgccctga

SEQ ID NO: 500083 - DNA, 1743 bp, Stenotrophomonas maltophilia
gtgcggtcagggaagaagcaggcacgacaggcgtgccgtggtggtgggtgggtggtgttgcttggcatgaccttcggtgttgccgcccagcagaccggtgatccagccgcgcaggaactgctgaggcaacaggaacgcgaacgcgtgctgcgcgagcagcaggaacaacgccccgacgtccgcctggagcggaacgcgcagaaggagggcgaccgcctgccggcgcaggagcacccctgcgtgcgcatcgatcgcatcgtgctggaaggcgaggacagccagcgcttcggctgggcactggcggctgccgacccggtcgacgatccggccacaggccgttgcctggggaccgaaggcatcaacgtggtgatgaagcgcgtgcagaacgcgatcatcgcccgcggctatgtcaccacgcgggtgctgtcggcaccgcaggacctcaaccagggcacgctgacgttgtcggtggtgccaggccggttccgcgaggccgtgttctccgacccgcagggacggcatccggcccttgccaatgcactgccgatccgcagcggcggcctgctcaacctgcgcgacatcgagcaggggctggagaacctgcagcgcgtgcccaccgtgagcgccgacatcaagatcgcaccggccgacggcgagggcgcggcgccaggccagagcgacctgcagatcgactggacgcagcgctcaccggtgcgcgccagcgtcaccctggacgatgccggcagccgcggcaccggcaagctgcaggccaatgccacgctgtcattggacaatccgctgggcctgaacgagctgttctacatcagcgccggccgtggcgtgttcaacggccgaggcaaggacaccaacagctggaccgcgcactacgacgtgccctacgggtattggctgttcggtgccaccgccagcgcttacgactacagccagaacgtggttggtgcctttgaaagctatgactacagcggccgcagccaaaacgccgaagcgcgggtagaccggctgttgctgcgcaatgccaaggtcaagttcagcgcctacgcgcgcggctggcagcgagagtcgaagaactacatcgacgataccgagatcgaagtacagcgccgccgcaccgcgggctgggaactgggcctgacccacaagcagttcatcggcaacgccacgctcgatgccagcgtggcctaccggcgtggcacgggggccttccacgccttgcgctcgccagaagagatggcgcagcagtgggatccgacgctgccgctggaagggacctcgcggatgaagctgatcaccgccgacgcgcagttcagcgtgccgttccagctgggcaggcagcgccttcgctacaccgccgcatggcgggcgcagtggaaccgcacgccgctctcgccacaggaccgcttcgccatcggcggccgctataccgtgcgcggtttcgatggtgaaagctcgctcagcggtgagcgcggctggtcgctgcgcaacgatctttcgctgggcattggcggtggccaggagttctacgtcgccgccgactacggccgcatcggcggcccatccgcgcagtggcagtccggccgtgacctggcgggcatggcgctgggcctgcgcggcggctggcagcagctttcctgggatggcttcgtcggttcggaactgcacaagcccgcccatttccccaccgactacaccacattcggcttcagcctggcctggcgctactga

SEQ ID NO: 500084 - DNA, 651 bp, Stenotrophomonas maltophilia
atgctgaatccgaagccggtgttggatgctggaagatatccacgcaggccgtcggcaccgtcggagtacggcctggatcgagtccagagcgcgcagcacgaaacccagatcggcaccggcttcgactcaagcaagcttcatcaaagctcggtgtcgttacaagccctgacccattcgtcaggatcatcgggcgccaccgacatgaatcggactactacgtccactgttcacggccatctgcgccgatccaaaccagacccgccggagcatcggtcaagaaccagaggccgaatccatcgatatcatcttcaccaggattttcgggccaagcgtttgagattagcgtcagctgctccctccagtcgccttgcaagaacaccccgtccgttgcaagcctcactttcccttccctcaacaaacgacccatcaactcgaagaacgcgtcttttctttcggagatcccaacacctcccatttccatcgtcatgtgctgccagacggcacccattgataacccaaacgaagaagtcaccactgcacaatgaatcccgtctttcatttgaacttcacctctactcgctttccattatttatggatttatcctgcacatcaattgtccaactagcaccagtcttctgcgcgctcgttga

SEQ ID NO: 500085 - DNA, 717 bp, Stenotrophomonas maltophilia
atgctcgaggcccattccgcccgtgcatcaaacatgacagacaaagaccagtaccctaagatccccagcacccgcatcttgctgcttcgtatcaaacgtccgaagcaggttatacccctcagcaaggcggaaaactacgtagttggcagcatggtcgcgttgttccttctgagccttggatgcatggcacttctgaaggcagatcagatcactcagcaggctgccaaagtgatcgtgctcccgctgacggggattatcatgttcctggggctagtattctttgtcattcaggtcgtccagttctttctgctgttcaggcatggcttcaacaacatggcggatcgcgtggatgtctctgctgacgcagattccgcccttgccgaggatctttcgcactgcaatacccagcatttggaccagcgctcaaagcttctggagcaggaatccaagctcctcacaaggcgtgctggattggcatctgcagcaaccgccatcagcgcactgatcatcaatctcttgagcaccgggaacggcgacaaggccgcgcagtgggtgtcagacgccaagcttctgatcacctgttgcagcttgggtttgctggcgggagcagtgatcgtgattatctttgcagggaagctagagaagatctccacattgctgaaacttgcttcagagaggggctcgcaacgcaagctagagcgagagatggccgattga

SEQ ID NO: 500086 - DNA, 1170 bp, Stenotrophomonas maltophilia
atgcacctgtcccatcgggccgtcctcgcactgtccgccgttgtcggcctggcactgtccggcaacgccttcgcccacggcaccctgtccaagccgctcagccgcgtgaagcagtgccacgagggcaatccggagaatccgaccaacccggcctgcgccgccgccaaggccatcggcggcccccagccgttctacgactgggccggtgtcaaccaggccaacgccaatggcaaccatcaagcggtggttccagatggcgagttgtgcagcggcggcaacagcaagtaccgcggcctcgatctgaaccgcagtgactggccgacctcgccgatccgcgccgattcgcgcgggcgctacactttcgagttcaaggcaccggccccgcatgctacccgcgagtggaagttctacgtcacccgcgacggctggcagccgggcagcccgctgcgctgggccgacctgcaggaattctgcacgctgggcaacgtgccggtctccggcgacgtctacaagctggattgcccgctgcccaagcgcagcggccagcacatcatctacaacacctggcagcgctcggattccggtgaagcgttctatacctgcgcggacgtgcgcttcgaaggcggtggtggcgttgaaccgccgccgcagtggcaggacgccggcccggtcaccgcccgcggtgcgttggaagaaggcaccaccctgacgctgcgcgtgttcaacgcccagggcaatgatctggagcgtccggagatcaccctggccgcaggtcagaccgctgcgaaccagtggccgctggcgctggcccgcaaggtcaacgccagtgcacagcaggcgcgtgtgggcgtgatgaggaacggcgtgatcacgccggtcgcctcggccaccgagaaccgcgtctacctgaagccgggcaacctgttccagatcgatacccgcctgccgggcccggtcgatccggtcgatccgccgccgggtgacgactacgacttcgtgtatccggccggtatcggcagctacacgccgggcgaaaccgtggtcaagggcaccgacggcaagctctacgcctgccggccgttcccggagggtgcgtggtgcaacatcaacgccgatgcctatcgcccgggcaccggtttcgcctggcgcgatgcctgggtcgcgtactga

SEQ ID NO: 500087 - DNA, 639 bp, Stenotrophomonas maltophilia
atggccttgatcggccttctcgtaagtgtccgtgaaaacgggggtgaaccccacgaagttggctgcatagaagcgcgggtcgaaatcctcagcaaagggatcgaaaagcccttcggcccgtttctcctccaagcgctcaaccagcatgggcagtttggagtcggcacaaagctggttcggacggggcaactgtcgcgtcccgctagcgtcagcatccagcatcagctcaatgacataccgctcatagggcacccccatcgcatccgcgcgctggcgcgcccgccaaatgctagtgaagtcacctgcttccaagccgtgaatgccattggggaatgcctgaggatcacgccccttacgtcgccggaagcgaaccaggtagtgcttgcgatacgcctcgtagaagcgctgcgtccgctggtaagggttcatgtatcggtacgacagatgtgcagaacgcgcaaagtccggctcttcatcaaagtcgctcggcgccagccattcccgtgcctgcaccatttgctccgtcgccactgcatcggccccaaacttcttggccgcggccagtttctgggcgcgacgatatccatccatactcattattggcctctcgtatccgctaccccccttcgcgaggagtga

SEQ ID NO: 500088 - DNA, 465 bp, Stenotrophomonas maltophilia
atgactgacctgattcgtgcaatttcgatgtttggcgcgcatggttcgctcgatcatgtggaacacgagactgcgcttgagattgtgggggaggccgcaatggcaagggagaatgcatgtacgcagcgccgcgccttcgagtgcaaggacctgaccccgttccgggcgacgtccaatttcgcggaactgttcgctgcccgcatcggtgatcgctcgctgaggcacaacatgcgcgtatgcgatgcctccatgttccgcatgctttgggtggcacgtcaggctgctgacatgctcggtgtcccttatggggtctacattgacgttgcggtgagctatctccaggaaacgaaggggaagaagcggatcactccgaagatgctcatcgcacgggacgtgcagttgcatgtgatggatcgctgggacgcagagatgtccgttaactgcgtcggcgagcggcagaactga

SEQ ID NO: 500089 - DNA, 276 bp, Stenotrophomonas maltophilia
atgtcaccgacctcgatgacaggcatctataggcgtttggacgccgccggtctgatcgaagagcggcaagacgaacctatcttttttgactccacccgacagaagtacgcaaggctctctgacaatggcaagaagcttctaggccgcgccaatgatgcctgggagaagatcaatgtcagctacctgggagatctgaaggacaggcagctgaaagacttctcatcgtccatggcagtcattcgctcggcactggaatctaacgacgggttggcgtag

SEQ ID NO: 500090 - DNA, 534 bp, Stenotrophomonas maltophilia
atgaagaaccggattacgcatgttgccgtcatgtcgttggtgctgacggctgttgttcccggggaggtagtggctcaacaacagcggtcttacgaccgtttcaaggatcgaacctcctacgaggccaaagtggagctatcggagctgtccaagaccagcaggggcatttctctgagcctgcacagcgtagtagacggagaccgcgctgtaacgaagtcggactctttcactgtctcggccatcctcaccttcaatatgtcctatgaggttcgctgtgccggtacgagctttgacatgctcgtggatggaaaggctgtttcgcttcccagcgacatgcccgctttcaatcgatacgagtacgccatcctttcgttcggcaagaagatgaccttggcagaagtggcggctttcgccggtgccaagaggatcgaggtccgggtctgcgataccgaatacagcctggatgatgagcagcgcgctgcgctgcgtgatctggtcaaggacgctcagatgggcagttcaaccggtggctga

SEQ ID NO: 500091 - DNA, 246 bp, Stenotrophomonas maltophilia
gtggataaggaccaggacaagaaccggggtgccgtgctgatcaacaggtacgagcgcgaacgaaaccaagctgacatgaccaaggctgcggagttagccaaggcattggatgtcccggtcgcctacctgttcgctgaggacgatgacctagctgcggcgatcttggcgttcgccaagcttccctctgcggagcgccaaaggatgcgggaagagctcgagcgtttggctgggaagcagaggggctag

SEQ ID NO: 500092 - DNA, 474 bp, Stenotrophomonas maltophilia
atggacgggtacgtcgatcacctgaccccagtggtccttacagccatcaataccggcatgcggcggggtgaactgctgtcgatgacatgggcggacatcaactgggaagccaagatgctgaccattcgagccgagaacgccaagtccggtaggcagcgtcacatcccgctaaacgtcgaagccatggaagtcctgcagcgttgggctagacaagcgggcgaacgccgtgcgggcaaggtcttcgacgtgaccgacatcaagaaggggtggggaaaactcatagccgatgcccgcattgaagagttccgcttccatgatctgcgccatcatttcgcatcacgcttggtgcgggcaggcgtggacctgaacactgtgcgagagctcttgggtcatgctgacatcaccatgactcttcgttacgcccacttggccccggacacactggcggcggctgtcgccaagctggcggcgtga

SEQ ID NO: 500093 - DNA, 1761 bp, Stenotrophomonas maltophilia
atgggtacgtgcgcactggcgatgggattactcgacccatcaatgggaatgggtacttggtcattggagcaagtagccatatcctctggcgcccgcaggaaattcacgcagaagacccttcatagagcacaagagtcacaacaaatggcaaaaggatatcgccgactcaacctttttatggcaaagccactggcgaaaggcacaaaactggccaatcttctcactgcagcgcctgtagatgaatatccgatagcgggcgccctaggcttggacggcactctcttcgtgaagaagagcgatgagaagagaccgacttggggcccatttcttgatgatattggtggcatagatgttccaggactcgcaaatagatccagctcagctgttttgcttctacgagtggatgacgatgtattcgcattcactttcggatacgggcgatacctcattgagcagtcgttgttcgtccaggacttcgggctacgcaccgcgctcaatacgctagacgagaagtcactgcggagtgtcgatcttcacacccttgaagatcagcccgtccaaaagaagtcccaggctgctcgagactcagaggtcagcgtttttggaatcgatatcttaagagacgttctccgcgcagtgacaggtgtgcccagaaggggcatagaccttgtgcagatcgctggaggagacgccggcttctcctttggcatcgagatggaaccctctgagctgccagcactgagccgccgcatcaagaattactatgacagcgacacctataagacgtcgttttcctgggtcgataacgtacgcaggctcaaagacgaaacagaaattaagagacttgacgaactattgatcgcggccatgcacgcgcgcagcgacaggctgatgatcaccctgccagagataggagcatgggactcaatcctgggatttagcttcactcgaaacaagaagggcctacaacccgtcattgatcccgccgactatctcaacaatgttgatgaccttccgaaactaagcatagaggcagtcaagcgggaccgcctctttgtccacgacgtcgacggcaacgtcactgaacactcagtgtatcgatgcgtctactttgaaatcacggaaggtgacaagacaaagatcatcttcgacggtaagtggtatgaaatcgatgcgacattcatcggtcgaatcaccgagattttgactcacatccccctttgtcagcttccattcccggcagtagagacttgggaagacaatggcaagcctaagattgaagcagagggcgattacaacatccgatcagctgcggcaaatggctactatttgctggacaaaaaactcgttaagacggaccgcacgacaactgccattgagctgtgcgacctcctatctccgaccaagcaccttatccacgttaaacatcggaagggcggctctgcgggacttagccacctctttgcacagggaggcgtagctgcagagatcatgcttggcgacaagggatttcgcaagaaggctcggacagtgctgcgaaacgtgaatccggcggcaagagatctgattcccttgaattccctcaaatccgcagactatgagatcgtcttcttggttcttggcgaagcgagcgcaacactcaagcagaacctaccgtttttcagcaaggtgaaccttacaaagacatttgagagcctcaaccaacgtggcttccgagtttcaattgcgggcgttccaacgatcccgcgagcagtgccatga

SEQ ID NO: 500094 - DNA, 2871 bp, Stenotrophomonas maltophilia
atgaagcattcgaagttgagcctggccctggccgggctgatcgccgttggcgccatcgcggcggctgatgacgtcatggcaatgagttatcacgtgcagggggatcgcatcttcctgagcggcggggtgacctacgccgatgtggtgtcgttgcccgcgttgctggccaaggcacaggccgagggccggccgatccgcgaagtggtgctgcgcacctccaatggtggcgcgctgatcgccggcgagtggctgcagggcgtgatccacacgtccggcctgaacaccatcgtgtccggccactgcatttcgtcctgctcgatcatgcagtccggtggcgtcgaacgctatctggccggtgatctgccgatcgtcgattcggtacagatccacgcggccagcaacagcggcaaagtgatctacacgccgtcgccgcggatgacccagatctataccggcaactacggcggtggcatcgatgccgggctgctgcacaaggccatgtatgaagtcgtgcagcccaacggcctgctggtgttccgcgatccggcgcgcaccacgggtgcctcggtcactttcgatcctgatggcagcggcagcaagctggagtcgttcccggggcaggacatctacagcaacagggtcatcaccgccaagggctaccgcgacccgggcgatacgttgaatgtcacggccaacgtgagcggcgacatcaacccgggctacctgcgcaccggtcgccagctgcagaccttcgtcgatgatgacttcgcgcgctggaacaccaactggcagtccagctacatcaacctggcgcagagcatctacaacgcctccagcaatggtccgcagggcatcggcgcgaactcggtacaggactaccagaacgatcccacatacaaggccctgctgctgtcgaagctgcgcctgggcgacctggatgtgtccacgctggacaactccatgggcgtgatccgcgtgaccaacggcgcgacatggcggacctccgcgaccaccggtgccgacttcatgctggtcgacaacggtaccatcgcactggaaggcggtgccctgcgcgcttcggaggtgcgggtaatgggcgcaggcatgctggtcggcaatggtgacgtggccggcaccgctatggatctcagtgcgctggccagcggtacccgcccgtcctggcgcgaggacggcttcaaccgcctgcgcgtgtacgggaccctgatgccgcgcggcggcgatctggtcacccacggctacgtcaacatcatgccgggcgggaaggtgctgttcgatgtgaccgagaacggcggggcgggcagtggccgcctgcgtgtaggcagtttcttcgacagcaagcagaccgacggcgcgctggtgatctccaaaggggccttcctcgaactgaacgtggcgcagggttactacggccaggacttccgccgtgacctggtgcagggcccgatctaccagggcggcttcgaagaggtcgtgcgcctgggtgacaccggctacagcgccagcatcaccggcggcgaagtgttccgcccgcgccacaactcgttgctgagtttcaacgtgaagcaggccgctgacggcctgtggctgaccgccaacccgggtttcgaccagctgggcctgttcaccaacggcacttccggcgatggcttgggccgcgcgctggcgaccgcttccgatcgcagggatggtggcctgaagtcgctgctcggcgccctgcagttcgccgaccgtgatgtgatcgcacagcaggccggtgccctgcgcggtgacgcgcacgcgaccctgcgcctggccgacaacgcattggtgggcagcatcggcaacgtggtgcagcagcaccaggccgcgatgcgcagtggcggtgatgccgacggcctggcctcgcaggccgcgcaatcggtgtcggcgcagccgggcatgcgccacggcagcctgttcaaccagctggccatgcatctggtcgagccggcggcgggcggcggtgaaggcagtggccctggtcgcaaccatggcctgtgggcgcgcggtttcgccagccacggccgcatcgatgccgacggtggcgtggcaggcttgagccataacatcggcggcatcgtcgtcggcgccgatacccgcgttgccgatgaccgcgtcactctgggcgtcagcgtggccgcggcagatatgtcgaccaagggccgcgacggctccgacttcagcggtgacgtacgcgcgctggacgtgggcggctacctggacgcgacctattcgcgcggctatctgtcggcggcggtgcgctacacagacctgcgtcacgacactcgccgcagcgtcagcggtatcgatggcctgcagcagccgctgcgcgccaagtacagcaacgatgcgatctccgcgcgggtggaacacgcgttctcattcaccacgggcaagggcctggtgatccagccgctgttgccggtggtggactacgcgcgtacctcggccacgcgcttcaatgaagggcagggtgcgggtgcactggtcggtcgcagcggcagcctggagagcatccgcgtgggcgccggcctgcagctgttcaggaccttcgaaggcaacaacggcgagcgcattaccccgcgtgcccgcgtggtctggcagaaggaactgggcgactcgcaggcgcgctacagcaccggcttcgccgcagcaccggatctggtgttcggggcaagcagccaggccgtgggcgagcaggtgctggcctggaacctgggcgtgaccagccgcgccagcgaacgcctgtcgatcatggccgactacgtgggcgagcgtcgtgacgggcagatccagaacggcgtgatgctggggctgggttacaagttctga

SEQ ID NO: 500095 - DNA, 435 bp, Stenotrophomonas maltophilia
atggaacttcctgacgaaatctatgagcgggtcactgacctctcagagcagggaaacgtcctcatggatgccgatgaccatgctggcgcgactcggtgttggctgcaggctttagaagcgttgccagctcctgccaaggattgggaggcctacacgtggctctgtgcttcacttggagacgcgagctttctttctggtgacgtagtgaccgccctgaagtacttcatggatgcattgaatggtccggacgggcataccaatcccttcatcctgtatcgcgttggccaatgcaacgaacttctggggcagcgggatcgggcccttgagtacctgctcagggcgtatgcattggatggcgaggacatattcgacgctgacgatgaaggtggaaggtaccttgccttgctgcgacaggagggcctcgctgcgacctga

SEQ ID NO: 500096 - DNA, 294 bp, Stenotrophomonas maltophilia
atgcgggccgccgcaggggcgctgagcgtgctcctgctggcgggctgccagagcgatccggcgctgcacagtgcgcggatcggtccggcacagtaccggttgcaggtcgatcgctgccacgtgatcgaccgcgcgcagctggaggatgacctacgagccttggccgctcggacgtgcgcggcgagcgcaggcgtgttggagaacatccagccactgccgagccggcagggcagcctgttcggcgaatgcctgcggcgcggggcgctgcaggccgaggtgcgctgcctgccttga

SEQ ID NO: 500097 - DNA, 345 bp, Stenotrophomonas maltophilia
atgaagatcgcggcgacaggaaccagcagaaggcagagactggcaggaggaaccactctcatccagaacacatgggagaggccacgggcacgtccccctgtctccaccgaggcgatctatccgtggtacatgctgcaccagagcctgatcatcgtgctgttgttctggctcagaccgctgcagctgggcccatggctggaaccggccctgctgctgggcggcaccgtcggcggctgcctgctgatccatgagttgctgatccgtcgcgtgcgttggctgcggcccctgttcggcctgcgtgccgaaccgccagcggcgtcaaaggcgcgcaccgtggcgttgtag

SEQ ID NO: 500098 - DNA, 1191 bp, Stenotrophomonas maltophilia
atgctggctgatgccgtactcgccgggctgctcgcccgggccgagaagctcgccttatccagcggccggaccgccaaggaaaagatcagcgagctcgacgcctactgggccctgtcacttaaagatcgtgatgcgttccacgagcgcatgcgcaaggcggaacgcgagggcggcatccacgtggcctggtccaagcagggaggagaggatcggacagcggatctcatctccgtcaagaacgtcccggcgctggcttccttcctgggcacgacgacccgcacggacgtgctcagcacggccagcacgctgctcgcgccttgggcagcgcatccacgtgttcggcaaatcctcgagagatggcacagcggcaagaaaatccgcaaattgggcgccgcatcggcgagcgtcttcgtcgatgccctcaccgtcctggacaccttggcccgcttgcccggtgaggatcaggtcgtacgtcgcctgagcgtcaagctgttcggtgactccaaacgcatcgaacggctgcatcgaccgctggacgtcctcaccaacgaaagtctcgcggcccctgcgaggacccctcaagagttgttcaaccagttggggttagtgaaggagccacagcccttcctggtcgccggcgcaggcaccctgcggcttggcccagaccagctcgcccctgtgcttcgcccgtttctcggcgtggccagcaaggccattgaaggctactcaggcaccccggcatgggtactgagcatcgagaacctgaccaccttccacttgtgcagccaattgccgcaagcgccccaggggttgatcgtgtacaccggaggcatgccctcgcccgcctgggccaccgcgtacgccaagctcttggccggggtctcgccggccacccccgtcctgcactggggtgacatcgacgcaggcgggttccgcatcgccgccaggatccgagaggtggtgcccacatccctcccttttcttccctggttgatggacccgcttgggcttcctgccggcgtggaaacgcaccgagcggatcctgccaccctgggtgccatgacgcgccacgctgaccgcgctggctggtcggagctggcaaaaacactgcgccccatctgtgtggaacaagaggccctcgatcccgtcttgccgggaatcgatatccaggagcggatcctgaaatcgtag

SEQ ID NO: 500099 - DNA, 3417 bp, Stenotrophomonas maltophilia
atgaagaagctcgtcatgatcagcatggtccagtacttcctctacgagaggacggacctggagatcggccataacacggccttccttggccccaacggaaccggcaagaccgcgctgctggacgccttccagatcgtgattctggctgccgatggcaaccgcacccactacaacgcctcgggcgaaggcaagcggagggcgcgcacgctacgcgactactgcctgggcgtctatggccagaccgacgacaagcgctatcggaatgcggcgaacacctacatcaacctggtgttccgtgatcagaagaccaactatccggtcacgatcggagcatcgttctccgccgacgagaccagtcccgaggccaccctcaacggcctctatgtgctcccgggcgtcgccctcaccagcaagatgcacgttgaggtacaggatggaaaggaagtcaccatcccgtggcgccggttccagcacatcatcgccgacgagtgccgggccgtcgggacgacggcggagatcaccaagaatcgccagaccttcctgcggcacgtgtttgtgggcaacctggcatcgcccggcgagcgccccaacacgaaatccatccagacctcgtttgcccggtcgctgaagctcaaccaggacgtcgccgacctcaacgaggtgctacgcgacaacctggtcgaggagcacatcaccgacgtcgccctgttcaaggcccgccttcttcagttccgcgatctgcgcgagctggtacgcgtcgtccaggagcggatcgagcgcgtcagcgggatcgccgccaagtacagtttggtgcttcgcgagcgtacggccgccacgaacgttcaggccctcgaggctgtctatgagaccgaacgggtggctgagaacctctcggctacccaggacaaggtcgacgagctcacgggcgagctctccgccaagcaggatgcgttgaaagaggccgaattggccgttgagcttcacgaggctgcccgagaccgcgcgctgcaggcaagagatcgggatccggactatgccaagcaggccagtacagcggcgcacctgtcggatctggagcgcagccacggcgagaaggcctcggagctgagcgccatggtggccgctgcgacgtccgcggtggcccaagccggacgcctgccggatctcggcgatgcccaagaggtttttgaagccgcgctggcgcaactcctcgcgctgccggtcaacgatgagcacgccccgcttccggccgagcagttgagatcggtggcgacggcgctggagaagacgagccactgtgcccgccgggccgccacgacggccgaacaggcagcgaaatcggcgctggatgcacgccgggaggccaaatccacgctggagcgcgcccaacaagggctcagaaagctgagggagcctgtctccgacctccgtcgcctgcttcacgagcatggcatcaccgcgaccccggtggccgacctggtcagcatcaaagacccgacttggcagccggcgctggaggccttcttgaccagccacgccgacgccctgttggtcgccggcggccgcgaacaggaactgcgcgcgatcgacgtatataggaagcacgggccccggctcggtctctggcgcgtcaaactcgccatgccctctcgaggtcgtccctggcagtcccgaagcgccggacggttcgccgccgacctcatcgaaggcgatgtcgaggccgtacgctatctgcagggtgttcttggacagctcactttggcttccagcaacgaggaactgctggattcggcgcgggcgatctccaaggagggcatggtcagcaccggaggcagcatcgaactgcgagagcgccccaaacagttgatcatcggccgcgtcgactccgcccagcttcaagaggaggcctcccgtgaattggcagaggccgagcgcgtgtacggcctggcccaggccaacgccaccgccttgggtgcagcagccaatcggctgggcctctacgccagcgcagatgagacctttgggcatctgaaccgcctcttctcctccgtccgaggcagcctcagcgtggtcgagcagatgcgtgaaaggctcgcggcggtgcgctccggggaactggacaagctggaaggggcactggcggtggcctccgagcgccgtgacctggccagacgccaggtgattgccttgagcagcgaggtcggcgggctgacccagaaactcaaccaggccacccaggccgtctgcggacttgagggcctgctcgagtcggcccaagccaacgagaagctgcttcgcgctgcccccctctacgacgccaacgaagtggagcgtcaccgcgcacggtatgacgcgcgattgggcgaggacgtggatgccaagcaggccgcttgcaggacccgagtcacccaatccaatggtgccgcctctgaagccgaccatgagggctggagcagtttctgtcagtacgcggcggactttgctctccaaaaccacgatctgaccaagcagcagtggcagcaggttcacgcctttgccgtcgacgagaagcagcgcttggagggtcttgagctggtccagcgaaaggaagaggccgagcaagcgtatcaagccgccgtcgatgtgttccggaccgacgtcgcccagaacctgctggaggggtttgacgccgtctcgagtcagattgacggactgaacgacatcctgcgttcggcgccggagttttccaatggcgagcgctaccagttcgtgcatagcccggttgagcagcatcgagcgctctacagtttcctgctccaggtcaagaaacacggcgaagaaggggtcgatctgttcaaggaaaccgagaaggttcctgaggagttccgcttgctggtcgagggggatgccgactccccgcttctccatgcgaccagtccgttgaacgaccatcgccgcttcttctcctatgacgtcaagatcttccacaacggcacctcgatcgggctgctgagcaagcgatttggtccgggttccggtggcgaacaccgcacgccgctgtacgtgatcttcggagcagccttggctgccgcctatggcaagtccaaaaccgcgcagacgccaggcggcttgatcatgctcgatgaggcctttgagaagatggacgcccagaacgttcgcgccaccgccgagtacctcaacgccctgggcctgcagatgattctggcgggcccggaggctgatcagcccaagatgtcttctttcctcgacatctactacgacatggcgcggcacggctctgaccagatccagctcaccaagaacatcgtcctggatgaagcaaaggagcttctgcgcagcgacaactacttgctctatcccgagcttctcgagacggagatggcgcgattggtcagcggggcttccgatgctggctga

SEQ ID NO: 500100 - DNA, 597 bp, Stenotrophomonas maltophilia
atggtcaattgggagagattggctgagcagaacccgctgtacgtcgccgatgatcttcggcgtgcgggctaccgcctggtcatggaacaagtgatctacggatcagacttgcgcagccggacgacctacgaaatcttggtcaagttcctggcaagctaccgcgagctgctcggtagcttgggaatgacggtgatccacaatccccacatgtcctatgtggtggccgtccccaacccatacgtggcggaaaagatgcgattgtccgagacccgcttggcgttggttctgcgcagcctctacaacgacaagatgtatgccaccgagatcatcgccggcgaggcgcacgtgacgatccatgatctggagacggcctacaaggatctgatggggaaagagcttccggacaccgcgcagctgcgagagaccttggcggccttgaagcgctacggcctgcttcgcttggaagacgctcatgacgagcagccgttcacggtcatcgtcaggcccggcatcgttgacgtcctcggcgagaccgccctgcttcagctggccgcacatgctccgacgagcactgacgaggaggaagagaacgcatga

SEQ ID NO: 500101 - DNA, 1449 bp, Stenotrophomonas maltophilia
atgctatgcccaaccagcaaggatgcgcgcgtggagagttctgaggccgtacccctgttcgaccgcctgaaccccggcctgttccggctgctgggcatgcccaacgggcagcgctattgggcggtcatctgccgcctcatggctgaactgtggggcgacggcggcctctctcccggcgaagacgtccagaaaacggccgtggttcgagccattgaatcctacctggccgctgatgacccttgggacggggacctggaaaccaacattacgattcgggcaaacgagatcgccaacaagctggtggaaacgtcttggctgtccgagcgtcgccgtggtgcggtgaagatgctgaccgtccgacccgtgatcgcccagttcttcagcgtcttgtgcgacttcgcgacgcaggagcctgagttcctcggtagcaagttccggtcgattcttctgaatctgaaagccgtctacagcggggaagccggtggtgagcaattcgtggaggccgcgcggcaggccaaacagtgcatggcgcacatcgtccacacggcctgcaaagtccaggacctcatggaagaactgcttcgccgatcaacggccagggagttcgtcaagggcttcttcgaggaatacgtgcagggcctctttatcgccgattacagtgagctgaggaccaaggatcacccccttcagtaccgtacgctgatcgtcagcctcacccaccagatgcgtcacgaggaacaacgccggtcttcgctgcttgcgtggtacaccgagaagcgtgcggggggagacagcgcccgagctgaaacgctcttcgagcgcgacagccttcaactgctgcggctgagcgaggtacacgagcaactgcgccgcgtcgatgaagagatccggatcgccaatcagcagggactcgtgctgatggcctacagcatgcgagccccgcgcaacttcgacaaactcatcgcgcgctcgctttcggccgtggagcacatgcgcgaaggcgacattgggcttccagccgccagcggcgcgcgccacgcctccgagtggggcctggccaagccccgcctgttcgtcaaatcccaggtcgccacgggtgtccgtcgcaggacccctaccctggaggagctggcgttggaatcgctccgtcgcaagatggccgaggtccgaatggtgaagcccatgcagctcatccactatatcgcccggcacctgaagggccgcagcgaaatcagctgccaagaactgaccatcgagtccatcaacgatctgtgctgctatcagcgcctgctgttgattgcctctcgaagcgaatgtccccccgagatgcggagggacgacccgttgctgaaacttccaggcgtgcgcgtagggttcgacccggactccagcacccgcaatgcctacatggaacatcgaaccttcaggattcagagggagcgtgcgtga

SEQ ID NO: 500102 - DNA, 837 bp, Stenotrophomonas maltophilia
atggcccagagaaccatccagtcggaagagcgcttgcgagcgatcgaacttttactcctctgggaagggcgggtcagtcgcgctcgcctcttgcagttgttcgacgtccacgaaacccttgcaagccgggacattgccgcattcaggttgcggtacccgcacgcctgcgtgcccgtccctaatgccaaggcctatgaccgtgcccggcgaatgaggcccgacctcacggtgggcctcttcagtgagtacgagcggctgattggcgcaacagcggacgcccacctcttggcgggggttcccagttcgttggtgggcgtcgacgggacgcgtatcagctactcagatcatgcgcgaatacacgcagccatccgtagcggcggtgtggtcggcatcacctaccgttcgatgagtcagcccgccgctcaccggcgaaccattcggccgcacacgctcatcaaagccgggccgcgttggcatgtgcgtgcttggtgcaccaaggcgagtcaattccgtgatttcaatctgggccgaatcaccgaggtcgaaaccgtggacgttcaggacctacctgggaaggatgaggacgtccagtgggccaccaaggtggccgttcggctcatcgcgcatccgcagctcagttccgctcagcgggagatggttcgcgaggaatacatgcagggcaccgcagggctccggtttgaagtggaggtcccgttggtcccctacgtgattcaggcctatcgggcaggactggatccccagcggcatcctgcgcccgattatctcctgatggtggatgacccagagtccctccccaagggtgctagttggcactga

SEQ ID NO: 500103 - DNA, 264 bp, Stenotrophomonas maltophilia
atgttgcacccggcacagccggttgcccagcataccaaaaccgccctgccccggccgggagaggggtcagatccctttgcgcagcaaagggatctgaccccgtttggcgatgcccccggtagccgacaacctgggttggcgtcctgcgtgccgaccaaggtcgacacctaccgggcggatcggccgaccctgcttcgccgttacctgttcccggggaacgcctgccgcagctcgtccaccagcacccgctggttctccgaatag

SEQ ID NO: 500104 - DNA, 2142 bp, Stenotrophomonas maltophilia; identical to SEQ ID NO: 497749

SEQ ID NO: 500105 - DNA, 1869 bp, Stenotrophomonas maltophilia
atgtcgcatgatgattttcgtggtccacacggtggaccgctgctgccttcgcggcggcgatttgtccagggcttggccttgggaggcgcagtcgcaggattaggtttctggcccaaagccagctgggcgctcaagggcccgggacaacccaacgtactatcgggcaccgagtttgacctgaccattggcgagacgccgatgaacttcaccggcaagacccgcaccgcgatcacggtcaacgggtccgttccggcgccgttgctgcgttggcgggaaggcaccaccgtcaacctgcgtgtctccaatgcattgcccgctaactccatccatggcgcggacacctccatccattggcacggcatcattttgccggccaacatggacggcgtgccgggcctgagctttgacggtatcggacgtggtgagacctaccactaccggttcaccctgcatcagggcggcacctactggtaccacagccactcagggttccaggaacaagccgggctctatggcccgatcgtcatcgacccattggagccggagcccttcagcttcgatcgcgactacgtcgtgatgctgagcgattggacagacctggacccgacggccctgttcgatcgtttgaagaagatgccgggccatgacaattactacaagcgcacggtcggcgattttgcgcgcgatgtgaagcgcaacggcctgtcggccacgttggaagatcgcaagatgtggggcgtgatgcggatgacgcccacggatctgtccgacgtcaacgccaacacctacacctacctgatgaacggcacgacctcgctgggcaactggaccggtttgttccgcagtggcgagaaggtgcgcctgcgtttcatcaatggctctgccatgacgtacttcgatgtgcgtattccggggctaaagatgaccgtggtggcagcagatggcttgtatgtccatccggtttccgtcgacgagttccgcatcgcggtagcagaaaccttcgatgtgatcgtggagccctccgggcaggacgcattcaccatctttgcccaagactccggtcgcaccggctacgtcagcggcacgctcgccgtgcgcgaaggattacgcgcgcccgttccgtctgtggatccccggccgctgctgacgatggcagacatgggcatggatcatggatcgatggatatgtctggcggcagcaagggcatggaaggcggctgtggtgcggccatgggcatgcctggcatgaccccacctgccagcggtaacgcgacctcggcccatgcaggccatgcgatgcccgccgccggcgatggggccatggcaggcatgcagcacgggggcatgcaatcacaccctgccagcgagaccaacaatcccctgttggacaaccaggccatgagcgtgagttcgcgcttggatgatcctggtaatggcctgcgcgataacggccgtcatgtactgacgtattccatgctcaagagcacctttgaagaccctgacggacgcgaccccggtcgcgagatcgagctgcatctgaccggacatatggagaaattctcctggggcttcaacggtcagaagttctccgatgtcgagccgctgcggctgaactacggcgagcgtatgcgcatcgtattggttaacgacacgatgatgacccatcccatccatttgcacggcatgtggagtgacgtggaggacgacaacggcaacttcatggtgcgcaagcacacggtggatatgccgccgggtagccgacgcacgtatcgcgtgcgtgccgatgcgttgggcagctgggcgttccattgccacctgctttatcacatggaagccggaatgatgcgcacggtgagggtcgacgaatga

SEQ ID NO: 500106 - DNA, 543 bp, Stenotrophomonas maltophilia
atgaatacttctcgcagctgtctctttctgctgaccacggccttgtcgctgaccgcatgcgcgcgccccgaatcggctgtcagtgcagaggcggcatcggccgctcaatctccgacatcggcggctgcgcagcaggtcgctcagccgcagcgtccgttgccgttggtcaaagtacataagagtgcgacctgcggttgctgccaactgtgggtggagcatctggagaaagcaggttttacggttgaggtgcacaacagcgaagaccttaatccgatcaaggcgcgcttgggcgttccttatggacgcggctcgtgccataccgccgagatcgatggctacatcgtcgaaggtcatgtgccggtgcaggacatcctgcgcctgcttcgtgagcgcccggtaggccgtggactagtgctgccggggatgcccgccggttctcctggtatggagatgcccgacggacgtgttcaaccctacacggtggaatttgtactgcccgacggcaccacgcagccttacgtcctgcacggtcaacgcagctga

SEQ ID NO: 500107 - DNA, 315 bp, Stenotrophomonas maltophilia
atgaagcgttatgcctccctctcgatgatggccctgtttctgatggcgggcgcggccttcgccggcggccagaccaccacgcccaccaccgaccacggtcagcacaagccgatggaccacaagaagcaggagcatggtcagcacaagccggccgcggccgatgccgatttcaccaagctcgataccaacaaggatggcgcgctgtccaaggaagaactggccaagcacaagctcgcgccgcacttcggcatgcttgatggcaacaaggacggcaagctgagcccgcaggaattcgctgccggcaagggtatgtaa

SEQ ID NO: 500108 - DNA, 963 bp, Stenotrophomonas maltophilia
gtgaatctggcttggcacggatgcgtggacctgccggcgaccgccgatacgcaacgctggcaccaaagggtggccttgggcccgcagcctgaggcgcccggcattgccctgctgggatttgccagcgatgaagggattcgtcgcaatgccggccgcctgggcgccgcacaagggcccggtgcacgtcgcaacgccttggccaacctgcctgtgctccattgtgctccgctctacgatgcgggcgaaatcacctgcgtggatcaggcattggagctggcgcaggcccgctactcccatcgagcgcagcaactgttggatcaggggcattgggtgattggtctgggcggcggccacgagatcgggtatgccagctacgcggcactgcgcggacacctgggcgcatccaaggctcgcatcggcatcttcaacttcgatgcacactttgatctgcgcgagcaaggcagtgcaagctcgggcacgcccttcctgcaggcactggagcatgcccgaagcattcgctccccgctgcagtatcactgcattggtgtaagtcgatccagcaacacgccgcgtctattcgctacggccgaccgcgaaggcgcccattacctcaccgatgacgtgctgtgcacctggaattggcaggcacaggctgaggttctgcgtgcgtggtgtgatgcggttgacgttatctacctgacgctgtgcctggacgtgctgccacaggcggtggccccgggcgtgagtgccccccacccacgcggggtgagtctggaggtcctggaagccctgctggatctggtcatggcctcgggcaaggtacgtgtggtcgacgtggcggaactgtgtccgcccctggatccggatcaggccaccgcacgtgtggctgcgcgcttgatccaccgcatggtcagcgcgcaggctcagtggggtgacaccggctggcaaaaggcagtgagctag

SEQ ID NO: 500109 - DNA, 1530 bp, Stenotrophomonas maltophilia
atgcttaccctgacaccgggccagctgacgttggcccaactgcggcagatcgcgcaagggactgatcccatcgccctggacgcagattgctgggacaacgtccgggcctcttcgcaggccgtgcaggccatcgtggccgccggcgagccggcctatgggatcaacaccggcttcggcaaactcgccaaagtccacatcccacgcgagcaactggaacagttgcaaaccaacctggtgcgctcgcacgccgtgggcatggggccattgctcgacgatgcctgcgtgcgcctgatcttcgccaccaagattgcttccctggcgcggggctactccggtgtacgcgagcagacgctgaccaccctgatcgcggtctacaacgccgggatctggccctgtatccccgcccagggttcggtcggtgcatccggtgatctggcccccttggcgcatctgaccttggcggccatgggcgaaggccaggtacgcgtcgacgggcagatcctgtcggccagccaggccctgcaggacgctgggatcgctcccattcgactggcagccaaggaagggctggcattgctcaacggcacccaagtgtccacgggcattgcgctgatggcgctgtttgccgccgaacaagtctatgcggccgccgtgctaacgggcgcgatgagcgtggatgcggcatgcggctcagatgctcccttcgatccgcgcatccacgccgtgcgtggccagcccggccagatagcagtggccgcgcactaccagcgactgctggccggcagcgccattcgccaatcgcaccttcacaacgacacccgcgtgcaagacccttacagccttcggtgtcagccgcaggtcatgggcgcggtgcgcgatgtcatgcagcacgccgcccacgtgctgctaaccgaagccaacgcagtctccgacaatccgctggtgttcaccgacaccggcgaggtgatctccggcggcaacttccacgccgaaccggtagcctttgccgcggaccagctgacgatggcggtgtccgagattggcgccctgtcggaacggcgcatcgccctactcatcgatgccacgatctccgggttacccgccttcctggtcgccaatccgggcgtgaactccggcttcatgatcgcgcacgtgaccgcggccgccctggccagcgagaacaagaccctctcccacccggccagcgtggactccctgcccacctcggccaatcaggaggatcatgtcagcatggccaccttcgccgcgcgcaagtcgcgcgaggtggccgacaacgtgcgccggatcgtggccatcgagctgctcgccgcgtgccaaggcatcgagttcaggcggccactggcgtcttcgcaagcattggaggcagtgcatgcgcaggtgcgtagcgaggtgccccgctacgatgaggatcgctatctggcgccggaaatgcaggcgatggaagccttgatcgagcggggcggtttgcgcgcgttcctggactggccgctgcaggatctgcgcgcgtga

SEQ ID NO: 500110 - DNA, 1692 bp, Stenotrophomonas maltophilia
atggataccttggaacgctccgcttcccctgcgcgcaccgttcgcgctccgatcggcacccagctgcactgcaagagctggctgactgaagcggcctaccgcatgatccagaacaatctggaccccgatgttgccgagcgcccggaagacctggtggtctacggcggcatcggtcgtgctgcgcgcgactggaaaagctttgaccgcatcttggaaacgttgcgatcgcttgagaacgatgagtccttgctggtccagtcgggcaagcccgtcggtgttttccgcacgcacccctctgcgccacgcgtgctgatcgccaactccaacctcgtcccccattgggcgacgtgggagcacttcaacgagctcgataagaagggcttgatgatgtacggccagatgacggccggcagttggatctacatcggcagccagggcatcgtccagggcacgtacgagaccttcgtggagttggggcgccagcactatgggggcaactggcagaacaagtggatccttaccgccggcttgggcggtatgggtggcgcgcaggcgttggcggcgaccttggccggggccagcagcatcgtgatcgagtgccaggagtctcggatcgattttcgtattcgcacgcgctatgtcgatcacaaggcctactccatcgatgaagccttgcagatcatcgagcacagcccgacgccggtatcagtgggtctgctgggcaatgcggccgaactgctgccgcagttcgtcgcccttgcacgtagtggcggcgcccgcccccatgcggtgaccgatcagacctcggcgcacgatctgatcaatggctatctgcccgccggatggaccctctcacagcgggagcaggcccgcagcggtgacgatggtcagcgacgcgagctggcgcaggctgccgcggcctcgtgtgccacgcatgtgcgcgcgatgctcgatttccacgccatgggcgtgccgacgatcgattacggcaacaacatccgccaggtggcgctggatcagggcgtggacaatgcctttgccttccccggcttcgtgcccgcctgtatccgtccgctattctgccgcggcatgggcccattccgatgggtggccctgagcggggatccagaagacatctacaagaccgatgccaaggtcaaggaactgtttcctgacaacacgcatcttcaccactggttggaccaggcccgcgagcgcattgccttccaaggtctgcccgcacgaatctgctggttgggcttgggcgagcgccacaaggccgcgctggccttcaacgaaatggtacgcaatggcgagctcaaagcaccgatcgtcatcggacgcgatcacctggactgcggctcggtagccagccccaaccgtgaaaccgaaggcatgcgtgacggctccgatgcggtctcggactggccgctgctcaacgcgctgctggctaccagtggcggtgcgacctgggtgagcctgcatcatggcggcggcgtcgggatgggcttctcgcaacactcgggcgtggtcatcgtgtgcgatggcaccgagcaagccgatcgccggctggcgcgtgtgctgtggaacgacccggcgacgggcgtgatgcgccacgccgacgcgggctacgagcaggcactggcctgtgcccgtgagcatggcctgaccttgccggccattctggagtga

SEQ ID NO: 500111 - DNA, 726 bp, Stenotrophomonas maltophilia
atggacgaacccaagccgcactaccagaagctcaagcacttcatcctgcgtcacatcaccaacggcgattggcccgcgcgcagtcgcgtccccagcgagaacgaactgacggccaagttcggcttgtctcgcatgacagtgaatcgagcgctgcgcgagttgaccgatgccggcgtgctgacccgagtgcaaggcgtgggcacgttcgtcgccgggcccaaggccgaatcggcgatgttcgaggtgcgcaacattcgcgaagagattcagtcccgcggccagacacactcggtccaggtattgatctgcgagacggtcgaggcgcgctccagtgtgacgaccaacttcggcctgacaccgggcacggagctgttccacagccgcctgctccaccacagcgatgacaagcccgtgcagttggaggatcgctttgtgcaacccagcgtggcgccggattacctggacatcgatttccacaccgagattccgcatcagtacttgatgcgcgttgcgccgctggagcgcgccgaacatgtgattgaagccgagacggccagcaagcgtctggctgcgcaactgaagatcaacgaaggcgatccgttgctggtgctgacccgacgtacgtggtcgcgcggacaggtggccagctttgtgcggctgattcacccggcatctcgttaccgctttgtgggcaccttccaggttggcgcccccctgaacccttga

SEQ ID NO: 500112 - DNA, 420 bp, Stenotrophomonas maltophilia
atgccgtcgcttcgcgtgctactgcgtatgttcctgatcctcgtgctctgcgcggatgggatcctgagcgcgcaggccaccacgcggatggccgtgcggcatattcctcccccaggtgcggtgaatggcacccactcggtgcacggcggcgcgcgtgtcaatgaacgcgccaagattagtaacgattgcaacaaaattcgtcccgatggtaagcaagccgggcagggtgatcagaacgatcatcagtgcgactgcagcaccacctcctgcgactgcagctgtgtgctcaccttcttcgccgggcgtgtgccggtcatctttgccgcccagcacgccctgacgagcacctacctacctacgcctgagttgccgccgctgcgacgacaggtatcccggctgttccgacctcccatcggctaa

SEQ ID NO: 500113 - DNA, 2721 bp, Stenotrophomonas maltophilia
atgtacttcaagcgcaatcctttggcggtatccgtcggtgcccttctgtgcgccggtttttccacggtggctctggctcagcaggctgaacagggcgccacgagcgagtcggccaagacgctggacaccgtccaggtcaccggcagccatatcaagcgactgcagctctccggtgttggtccggtcagcgtggtggatgccgaagccatcgagcgctccggcgccacttcggtggagacgctgctgcagcgcctgccggcctcggccggctttgccggcagccagtccaatgcctactgggccgagaacggctacggcactactcaggtcaatctgcgcggccttggcattaaccgcacgctggttctgctcaatggtcgtcgtgtggtcaatggtggcaccggtgccaacagctcggtggacctgaacatcatcccggtagcgctgatcgagcggatcgaggtcctcaaggacggtgcctccgctatctacggtgccgatgccgtggcgggcgtggtgaacatcatcaccaagaagaactacgacggtgccgaggcggcggtgcgatacggacagaccttcgaaagcgatggcgaagaaaagtcgttcgatttcgcttggggtattacgtcagaccgcggttcgttgatggccggcatcaactactcggagaccggcacggtcaacatggcctcacgcgcaccgtgcggcttgggtgaggtcgacgggcaactcgaatgtgtgggcagctcggccaccatcggtgggcgcgcattgctagccgatggctcgcgcgtgaacttcaaccaggatcccaatggtgacggggatttctatgaaccgtattcggcggccaaacataactacaacggcaatccctatctcaatgccgtcaaccccatcaagcgtttgagcttcagcctgttcggcgacagcaccgtgaatgaaaccacgcgcgtgttcaccgagttgatgttcaccaaccgccagtccgaccagctggccacgcccggcagcctgggtgtctatcgcccgatcaacatcgcggccagccacccgaccaacccgaccggtcaggacctgctgctgcagcgccgccgtctggaagaggccggcccgcgcgagttcttccaggaaaccaataccttccgcgtggtcgcgggcattgaaggccagttgggcatgaactgggactggtcggccgcgctgaactgggggcgcaacaccggtgtggatggctcgaccaatgtggccaacctggaccgggtggatgacacgctcaataccgcggtgtgcagcaacacgcccggcgcggcgatcccctgcggtgactatctcggctacggcgacctgacccccgaggtgctcaactacctcctgttcaggacgcgcgataacggcggtaacgaccagaaaagcttcaccgccaacatcagcggccagctattcgagatgccggccggttgggtgggctttgcctccggcatcgaggttcgcagggagcgtggttggcgcgatccggatccgttgacggtgctgggcattgccaacacgaaccaacaggatccgatcgccggtgagtacacggccaaggaagccttcgccgagtttgccgtgccgctgttgcaggacagcgtgatcgccgagagcctgacgctcaatgccgcggtgcgttactccgactacgatctgttcggcgaagacgtgaactacaaggtggggctggattggcagatcgtgccgtccttgaaggtgcgcgccaactatgccacggctttccgcatccccaacatccccgagctgtttggtggcgtggccgagggcaacctgaccacgactgatccctgtagcggctggagcagcttgccggctgattcggtagtgcgtcagaactgccaggcgtacggcgtacgggcgggctacgtgcagccgggcaacacgatcctgaccacctccggcggtaatcctgacctggagccggaagacgccaagtccctgaccgtgggcgcggtctggacgccgagcttcttgcccgggctgacgctgacggtggactacttcaacatcaagatcgacaacgccatccagcgcatcgatggctcaaccaagctgtcgatctgctacaacaccccgggcttggcgcatccgttctgcggcaacgacaacttcacccgcaacccgatcaccggtgaagtggacttcctgtcgtcccagccggtcaatgccgccaacgagcgggtacggggcatcgacctgggcggtctgtaccagttcgcggtcgctgggttcgattcgactttgagtgtggatgtgtcctatctggaccagtacgacgtgcggccgttcccgggcgcggaggtgatcgagtacgccggcaagatcaccggtggccgtggcagctttactcactggcgcgccttgacctcgctgacgatggagcgcgaagcctggtccggctcttacagcttgcagtacatcggcaaggcggatgacatcaacgctagccccggcgacattggcgatcatgcccccagcgtgacctaccacaacgcccagctcaagtacgcaccgaacaagaccttcgatgtgtccttcggcatcgacaacctgtacgacaagaaagccccgttcatccagagctataccgacgccaataccgacacgatgacgtatgacctgctgggtcgtcgttggtatgcacgcgtgggttaccactggtaa

SEQ ID NO: 500114 - DNA, 690 bp, Stenotrophomonas maltophilia
atgaaatcggctttctgggcgcgtaaggcccacaaatggattggcctgatcatcggcgtgcaagcgctgctgtggatgatcagcggcgtgtacatgacggttatttccttggacatcatccatggcgatcacctggcccatgcgcatcagcaaccgctggtcgcacccacgcacttgtcaggtgaggagttgcagcgccgctacccgggcatgacccaggtcaagctcaagcgcctgctagagcgggatgtctatgagatccatgcccacgacaagatctacctgctcgacgctacgaccggccaggtgctctcgccgggcgatcagcaaatggcgatcgcgctggccaagtcggtgtaccagggccaagcgccggtagcccgggttgaatgggtgacgcaagcgccacaggaagtcgccacgcgcccggttcccatgtgggccgtacactacgccgatgccggtgaaacgacgttgtacttctcgccctatagcggcgagttgctggcgcggcggcacagcctgtggcgttggttcgatttcctgtggatgttccacatcatggactacgaggcgcgctcggacgtcaacaacactctgttgcgcgtggcctcggcggtcggactggtgttcgtgctcagtggtgcctggctgttgttctacagctttcgcaggagggccgcagcatga

SEQ ID NO: 500115 - DNA, 1827 bp, Stenotrophomonas maltophilia
atgacgccctggatgagaacgctgcacaaatgggtcggcttgatcatcggcctgcagttgctgctttggatggccagcggcgtgatgatgagttggttggaccacgatcaggtgcagggccatcagttccaggcccatgcgcatgccgcgcacgactggcccgccaacgcccgatcgccggccagctttctgggtggcaacaagaaaatcagccgcgtgagttctggctggctgttggacacgccggtgtaccaattggccgatgcgcaaggtatcaccttggccaacgccgttacgggccagccgatctccttggattcggcctgggccacgcgcctggcccaagcttcctacaccggaccgggcacgctgaaagcgccgcgcttgttggagtggagcggggaggtgcgcgatcacgaggggcgtctgtggcgtgtggacaccgatgacacgcaggacaccacggtgtacctgtctgcccagacgggcgaagtgctctaccaccgcaacaagacctggcgtctattcgatgtgttctggatgttgcacatcatggactacaccggacgcaagaacttcaacaacccgttggtggtcactgccgcgatcggcggtttgtggttggcactgaccgggatctggctgctgtttgccagcttccactggagcgagttcgtgccgcgccgctggcgtccgacccgcgagttgtcggtattcggtccggacggggcacggctgcgcaccgtacgagcgtcggcaggcgacaacgtctacgtctcgctggcacgtgagggcgtgcaactgccgtccaactgtggaggagggcagagctgtggtctgtgcgaggtgcgcttccgcggcgcggcgcccaaagccaccgcggccgatcgcgcccacctgggcgccagcaaggtcaagatgggctatcgcctggcctgcaacctggccgtgaccgaggacaccgatgtcgaggtggccggcggggcaagcctgtggaccgagtatgcggccaccgtggagcaggttacggcagtgaccccgttcctgcgcgagatcgtgctcaagcccgacgaggctgccggaccggagtatcaacccggtgcttacctgcaagtgcacgtgcccgattacgacgtgcctgttcacaagttggtgcgaccggaacaccaccatcaggattgggccggcgtggatctgccggaaaagctggtcaatcgtgagccggtacgccgggcctactccttggccttgcccattgatcaggcgcagggtcgtctgacgttgctggcgcgcttcagtcccggcagatcggacaagaagcggcaaccgccgggcaggggatcgacctacctgtacacgctctcgccgggggatcgggtttctttcagcggccccttcggcgacttcgcgctcaaaccccacgggcgggagaaagtgttcatcggcggcggcgctggcatggcgccgctgcgcgcgatgattcggacgttgttggcggggcagggtggtgagcggatccacttctggtatggcgcacgcagccttaaggaggcaccgtacatcgaggagatggagcaactggccgggcagcacccgaacttcagctggcatctggtgctctcggatgaagcacagaacgacgatgcgctcttgagaggtctggttcacgaagtggcccacgatcgtctgctcaaagcccatcaggccctggctgattgcgagttttacctgtgcggaccgccggccatgctcaaggccacccgagagctactgagcaggctaggggtaccagacagccaggtggcgtacgacgacttcaagatctga

SEQ ID NO: 500116 - DNA, 603 bp, Stenotrophomonas maltophilia
atgtgcttgagcctgcccgatgaatcagcgagtaccctgttgaccaccgcactggatgagtggttcatcgcccatgtcttgccgctggaaggcttgatccacgcctttctgcggcggcatgggcatgaggacagcgagattcctgatcttcggcaggaggcttacacacgcatatacgaagcggcgcgtcggggtctgccgtcgcaggccaaaccttttgtcatgaccaccgtacgcaacctgctcattgatcgcatccgccgctcacgcatcgtgtccattgaagccatggccgatgtcgagcaggcggtgatgcagagcgatgaggtgacgccggagcggcacctgggtgcacgcgatgagttgcggcgtctccagcaaggcttgcagaaactgcctgccaaatgccggcagatcgtcgagcttcgcaagatctacggcttgagccaacgcgaagtggccagccgcctgggcattgccgaagatacggtggagcgccagacgttgttgggcatgcgcgcattggcggacttcatgcttggcggtaccggcaagattcagcgcccggcccggcgcttcaacaaggaacgttcgcacccatga

SEQ ID NO: 500117 - DNA, 942 bp, Stenotrophomonas maltophilia
atgagctcgcacaacgacatcgaacaagttgctgcgcagtggatcaatcgcgcccaatcttcgcagtggaccgcgcaggaccagaggcagcttgatgcttggttggggcaggatacggcccatcgtgtggcctggcttcgtttgaagtcggtctgggatcgagccgatcgactggcggccgtgcgcggcgtgcaatcacctcgcacgcggcgttgggcctcaccggtgcgttggtcagcggccgcggcggtggcaatgctggccgtactgctgaacatgccctggtgggggccgggcacccgctacaccaccgaggttggggggcgggaagtcatggccttgtcagacggttcgcgggtggaactgaatacgcacaccgagctccgcgcgcaggtggatccctcgctgcgccatgtatggctggacaaaggcgaagcctttttcgacgtaaagccagaccctgcgcatccgtttgtgatccatgccggcgaccacaaggtggtggtcttgggaacgaagttctccgtcaggcaagaacgcgagcgcctggaagtggcggtgctggaaggcaaggtgcgcgtcgagccgatggtggccaagcccggccgcccgcccgtgatcgtacagggcggcggtttgctgtacagcaaaccggccggcacgctcgtagcggtgaatgcgcaggacaaggtgcggcgatccctgagctggcgccatggcacattggagttcgatcaatccaccttggccgatgtggcagcccagttcaatcgctacaacgaaaagcagctggtgctgatggatacggaaaccgcccacatgcgcgtgggtggcagcttcgatgccgtcggggtggatgccttcgcgcgactgctggccacgggattcaatctgcgcgtagagacgcacggcgatcagattcgtgtctcgcaaccgcattga

SEQ ID NO: 500118 - DNA, 831 bp, Stenotrophomonas maltophilia
atgagaaacacgcaactatccgccgcactactgctgttcgctgtggccggcagcgccggcgcgcacgacctgtttgtcgcgttttccaagcccggcaccgcagcgggcgaggcgaacacagcgttggtgaacaatggcaccttcgatgaaagtgcaggtgcagtcacccgagcgcgtctacaggacgtttcgctgagtcaggccggcgctaaggctgcaccggacttggccagttggaaagaggtcggcaagcagagccagctcaccgtgcatccggcgggcgagggcacctatctgctgggggtctcgacgatggcctccaccagcacgcgtacggccagcgagttcggcaagtacctggagttggaagacttgcccgataccctggccacctatgatgcgagcaagtttcccaaaggggtcacctatagctataccaagcatgctcgtgccattggacaggtgggcacaaaactgaccgacgatttcgctgcctcgctgggctatccgctggagatccgcttggcccgcaatcctggaagcgtgaaggtcggcgaacagctgtcgttccaggtgctgcagcagggcacgccagtgcccaacctacgcgtgtacgtcggtcatcgtgctgacgcaccggtcaagggtgggcacggtagcgctacgctcctgcgcaccgatgcccaaggccaagccagtttccaggtgaccaccgccaagacctggtacatccacaccaatcacatggtgccctctacacaaaagggtttggattttgtgtcggatcgggcgtcgctgagctttgagatttccccgcacgccgggcactga

SEQ ID NO: 500119 - DNA, 1032 bp, Stenotrophomonas maltophilia
atggacatagcgctcaccccgccgcagccggcgcctgcggacatccatcgcttcagtgtcgccggcatgacctgtgcctcatgtgtaggccgggtagagcgcagcttgcgggccgttgccggcgtgagcgatgcgtcgatcaatctggccacagaagtggccgaggtaaccgctccggcggccgcgctgcccgctttgatcgcggcggtgaagcaggccggttatgaggttgccagccaggagcgggatctgatcatcgaagggatgacctgcgcttcatgtgtggcacgggtagagcgtgcgctgcgtgctgtgccgggcgtgatggaggtgtcggtcaatctggccaccgagcgtgcgcgcatacgggctacgtcactggtggaggtcacatctctggttgccgccgtcagcgcagccggttatcgcgagatcgaaccgcagacactggaaggcaagatcgatacagcgccggcgcgccaggcgctcagtggtgacaccctcaaactactgatcgctgcggccctgtccctgccgttggtcgtcccgatgctgggatgggtcgcaggtcagcactggatgctgccgggctggatgcagttcttgctcgcaacgccggtgcagttctggatcggtgcgcgcttttatcgcgccggatggcacgccctgcgcgccggcacgggcaacatggatctgctggtcgctttggggaccagcgccggttatgggttgagtgtctatcacttgttcaatgatgccggacaccacggcgatgccgcgctgtacttcgagacctcggcggtcatcattaccttgatcctgctgggcaagtggttagaggcccgcgccaagcgacagaccacgcaagcgcagggcgccagtacaggagacttcgcatggcccgcggtatcaccgaatcagacgtccacaccgccgccgacgaactggtggccaagggcgagcgcccaaccgttgagcgaatccggactcacttggggaccggctctccgaacacagtcactcgctggctag

SEQ ID NO: 500120 - DNA, 1299 bp, Stenotrophomonas maltophilia
atgcgcccgctggccgagcgcatgcgcccccgcaccctggatgaaatggtcgggcagaagcgcctgctggcgccggacagtgcgctgcgccgcgcggtcgaatccggtcgcgtgcattcgatgatcctgtgggggccgccgggctgcggcaagaccacgctggcgctgctgctggccgagtacgctgatgcggaattccgcgccatctctgccgtgctgtccggcctgccggaggtgcgccaggtgctggccgaggccgcgcaacgcttcgccgaaggccgccgcaccgtgctgttcgtggatgaggtgcaccgcttcaacaaggcgcagcaggatgcgttcctgccgcatatcgagcgcggcaccatcctgttcgtcggtgccaccaccgagaatccatccttcgagctgaattcggcgctgctgtcgcgttgccgcgtgcatgtgctggaaggcgtttcgccgaccgacatcgtcgaggcgctggaacgtgcgctgggcgaccgcgaacgcggcctgggcgaggagggcatcgaggtcgctcccgaactgctgctggaaatcgccaccgccgccgatggcgacgtgcgccgtgcgttgaccctgctggaaatcgccgccgagctggcgggcggggagggcggtcgcatcacgccgcagaccctgacccaggtgctggccgatcgtacccgccgcttcgacaagggcggcgagcagttctacgaccagatctcggcgctgcacaaatccgtgcgcagctccaacccggacgccgcgctgtactggctgacccgcatgctcgatggcggctgcgatccgtcttacctggcgcgccggctgacccgcatggccatcgaggatatcggcctggccgacccgcgtgcgcagagcatggcgctggaagcgtgggacatctatgagcgactgggcagtccggagggcgaactcgcgttcgcccagctggtgctgtacctggccagcaccgccaagtcgaacgccggctatgcggccttcaaccaggccaaggccgacgtgcgcgagagtggtaccgaagaagtgccgctgcacctgcgcaatgcgccgaccaagctgatgaaggaactgggctacggcgccgagtaccagtatgaccacgatgcggagggtggcatcgcgctcgaccagaccggtttcccggatgcgatgggcgaacgggtgtactacaacccggtgccgcgcgggttggaaatcaagttgaaggaaaagctggatcgtttgcgcgccgagcgcgaggctgcgcgcgccgcgaagggccgctga

SEQ ID NO: 500121 - DNA, 1125 bp, Stenotrophomonas maltophilia
atgccttccccccgcttcctcgactccctgcagtccatccccgccaccgactggaatgccctgcacgacgggcagaaccccttcgtcggccacgccttcctctcaggccttgaacagcacggctgcctgcgcgaggactggggctggcagccctggcacttcacgctctgggaaggcgacagcttggtcggcgctattccgggctacctgaagaccaattcgcacggcgagttcgtgttcgaccatgcgtgggccaacgcgtatgcccgtcatggccgcgactactatccgaagtggctgggcgcggtgccgtactcaccggtcaccggcccgcggttgctggcccgtcacgattcagatcgcgccaccttgctgtcggcattgcgcgaggcgctgccggcactggacgtgtcctcggcccatatcaacttccacaccgcagtggacgaggcgctgttcggcgatgactggctgctgcgcgaagacgtgcagttccagtggcagaacccgggtgactgggcgacattcgaccagttcctcggtgcgatgaaccacaagcatcgcaagaacatccgccaggaacgggccaaggtcacccgccagggcatcaccttccgcgtggtgcacggcgatgaagccagccgtgccgacctgcaggcgatgtatcgcttctacctgcagacgttcctcgagtacggcaacgccccggcgctcaccgaggccttcctgcgccatctggccatttcattgggccgcgggctggtgctgttcctggccgaacaggacggcgagccgattgccggcgcgctgtgccttcgcggtggcgacaccctgtacggccgctactggggcggcgccaccctgcccggcctgcacttcgaggcctgctactaccagggtatcgagtactgcctgcgcgaagggctgacccgattcgaaccgggtgcacagggcgagcacaagctggcgcggggcttcctgccgacgctggtgcgcagccggcactgggtggccgatgcggatttcgcagaagcactgcaggattggtgccggcgggaacggcgcgatgtgcggcgctaccagcaggagctgcaggggcatgggccgttccgcgtagagccgtag

SEQ ID NO: 500122 - DNA, 480 bp, Stenotrophomonas maltophilia
atgaacgggaccttcgaagattccatgcaggaaatactggaatcaatgctgagcgtttgcctggagtacggagagcatcgcgtggatggggtctacctgtacggtgcagcggaagatgggacgtcatctgcagacgtcttctatgacattggcggtcacctctacaggaccaaccagttgaacgacgctcccgcggccggaagtggtcagccgtttgacctttccgattcccgtggcagcgccctgctggattttctcttggacgatcttgatcgcctacttgaacttcataagaatcatgatcgagaaccccctacccagctgaaggcgcacttcgacgccgttacggaaaagctgagcgtcaagttcagccacgatctccatttctccaataccgaagatctcctgccttccgatatgttcgaagcgtggctgcaggaagtgaaggaacgctcctcaaatgcccgaggcaacggttaa

SEQ ID NO: 500123 - DNA, 969 bp, Stenotrophomonas maltophilia
atggacaggcctgggggcggggggcattctcccccgccccgtcccgatggaatcaccgtgcaccgccctcttctctgcctgcttgccctgggcatgcacctgcctttggcaactgcccgcgacagaaccccggaagacgtcgtttcccagcatctgcaggccatgcatgaacgcaacgacttcgcactgcagatgcttgtccagaagcagcaggccgaccggaccggtgcaaccagtgatctcttcaatgctccgcccatggcggagttgctggcgacctggacgaggaacatcgagcgccatgtcgatccgatcgacggcgtggattcgccacatcttgtctgggcgctgcaggttctggccaacagccgatgcaagccctaccgaagcgaggcatggcacagtctgaccgaaggcatgcaggttgccgacgtgcacttcagctgccgcgtgggcgatgtcgagcgtcttcggtacctgtccgaggctacggtcttcgatggcggtgagcagagcgagcagcgcttctggagagcctatatcgagacgttgcgcgacggccccttccacgagatcgttggcaccacgcgcgtggtatcgaccactcgcgaacccgcctggcacagcgagaagtcgaggcatccgaatgaagacttcccctccggccgcgtcgaacatgacatatacgtggttctgaccgaagcactgatcgcacagccgcgccacctggaccgcgcgggcacgcgtgacgccatcgcacagatgacaggcatcgtcgagtgtgacgacctgctgcaacagcatcgccgctgcatggcacgcattgcgccgcaggaactgaagggggtgagtgacctggccactaccctgagcaagcggcgacagcagattcccgaggcggagctgctgcagcaatgcatggccttgcggcccgcaatgcaggcactctggacgcatgagtgccactag

SEQ ID NO: 500124 - DNA, 450 bp, Stenotrophomonas maltophilia
atggatgagcagcagcacaaacgatggatggggatagcaggcctgctggtgggcctgcccaccgcggcggcaggaggcaccggggcagtattggggttgatggtcgtgctggatggcaagtatctgactggcgatgagcactcgctgttgctgctctggtcatcggccggagtgctcggcctgctgtcctggatgtggctgagcggcctcttcctgtggcgtggtcgcgcaggcctgcatcaggcgccggtggtcgcatggattggcctggtgctgggaatactggccgcgctgggtgtcgtcgccgccacgctgtatttcaccttcaaggaaggggagatctcgaccttgggctttctcgggtttggcccactgctgctggtgctggccgcgcacctgttgtggttgcgctggggcgggaatactccggcgtccggcccggccggctga

SEQ ID NO: 500125 - DNA, 417 bp, Stenotrophomonas maltophilia
atggatgagcgccgcctcaagtacctgtatgccgcgttggcggtactgctcggcctgcccggcctggcgatgggcggcgcggtcgcggtgatgttcctggttgttggcgtgcaatccttcggcggcaaccgctcccccgatctggtgccactgctgtggggcctggccggcgtggcgggttgcctggcctggctgtggctcagcgccggctacctgctgcagggccgggccggcctgcaggtgcgcgcgatctggtggtggctgctgctggccggtgggctggcagcgctgccggttctctggatgaccgcatggttcggcttccagcaggggggcgccgcgttggaactactgctgctggggccgtcgatgctggtaccggccgccatgctggtgtggctcaagcgccgcgcctga

SEQ ID NO: 500126 - DNA, 474 bp, Stenotrophomonas maltophilia
atggatgagcgccgcctcaagtatctgtacgtggtgctggccgcgctgttcggcctgcccagccttttcgcgggcggcgtcggtgcctgcatcgccctggtcatgggggtgatcggcctggtctcgctggatgctgacaagctgtggttcgctgccgtcatgtgcgtctggggaacggccgcgcttgccggcctggtggcctgggtcgcgctcagcgtcatctggttgcgtgatggactgcagggcctgcgcacggcctcgccacgctggtggtggttgctgggcatgggcgtgctggcgggcctgccgttgctgggattggcgatatataccttctccgggttgggcccggcggtggtgagcggtctcttcgcagggccgtcgctgctggtgcccaccggcatgctgatgttgctgcgtgcgcgtgccgataccgtggatgtgccgcccgtacgagcgcgggcatcggagtaa

SEQ ID NO: 500127 - DNA, 3630 bp, Stenotrophomonas maltophilia
atgaccattcgctcactcttcgacccaagcaaggacatctaccggaccatcgagaaggtcatcacttatggagcctcgcaagaaggccgcctaaaggctgagatctccgagtacgtggtcaccgagagtatcgaggagcagttccgcaaactcctggatcgcatgcagctggcgatggagtccggcggcgagaatgaagtgggcgtttgggtatcgggcttctatggctccggtaagagctcgttcaccaagtacctcggcctggcgttcgatgatcagcgcaccatcgacggcacgccattcatcaagtatctgcaggaccgcctgcacaagccgcagacaaaggctctcctcagcaccgtggcgcagcgcttcccggccgccgtggtcatgctggacctcgccagtgaaatgctcgccggcgccacgatggaagacgtctccacggtcctctacttcaaggtgctgcagtgggccggctactcgcgcaacctcaaggttgccgccttcgagcgtatggtcgagaaggatggccgcactcccgagctgcacgaccgcatcgcgcaggcgctgccgggtgcgacctgggcgcgggtgcaaaacaacccactggccatcgatggactgattcccaagatcgcccatgagatgtacccggcactcttccccgaggccaagtccttctcttccagcaccgagggcttcttccagttcgaagaccagcgcgtgcaggagatgatcgacatcgtccgcgagaagagtggtaagcagaacatcatcttcatcgtcgacgaagtcggccagtacgttgcctcgcgtgacaacctgatcctcaacctcgatggcctggccaataacctcaagcggctgggcgacggcaaggcatggatcatctctaccgcgcagcagacgctgacggaagacgacccacgcgccgcactgaactccgacaagctctacaagctcaaggaccgcttcccgatccagatcgacctcgaatcgagcgacatcaaagagatctgctatcgccgtctgctcggcaaatcaccagcgggtgaaaccgaactcggcaagctgttcgacgcccacggccaggcactgcgacacaacaccaagctgcaagacgccaagtactacgacgcggacttcagcaaagagagtttcaccaatctctacccgttcctgccagcgcatttcgacatcctgctgcacctgttgggcgcgctcgccaagtccactggcggcatcggcctgcgctccgcgatcaaggtgattcaggatgtcctgaaaggcgaaggcggctctaaggccatggccgatcagccggtgggctggttggccaccacggtaacgctgtacgacgaactggaaaaggacatccgccgtgccttcacgtccatccaccaggcagtcggcaaggtgcagattcgtttcccggattcacagctacatcaggacatcgccaagtccgtcgccgtgttgcagatcctcggcaacttgccagtctcggtgcagaacgtcgccagcctgatgcatccctccgtcacggcaccttcgcagctcgacacggtaaagaaagccgttgaagaaatgctcaacgacgtgcatgtgccgctcggtgagaaggacggcaacctcgtatttctcagcgagaagctgcgtgacatcgaacaagagcgcggtgccattgcactgcgcaccgtggatgtgaagcgcattttcaacgatgcgctgcgcgagtccttcgatccgctgcctcgcgtcagcctccacggcacgatggccgtcgcaacgggcctgaaggtccaggccggcagcgctatcaccagcctggccggtgatcagagcaccattcagaccgttgtcgagttggtgcccgccagcgattacgacaccgccaagaaccggatgctggatgactcccgcagccgggcgggtcgaaacgtcatcggactcttggctcgcgccaattccgaactcgacgatctggcgaacgaaatctatcgctgccagcgcattgccgaactgcaccgcaacgagccagaccaagaggtcaaagactactgcaccggccagctcgaccgtgctgccaagctcgcgacccaactgcagagcaagatcaagcagaccctgcaagcgggctcgtttgttttccgtggccaggcaacggcggtatcggcactggatgccgacctgttggatgccgccaagaagctgctttccgacgtagctgaccaggtgttcgaccggtacgtagaagccccagtacgtgccggaaccgacaccgccgagaaattcctcaaggtagccaaccccgccgccatcagcagtgcgctggacccgctcggcctggtgcaaactgtggccggtcgcgcctcgttcaagactgaccacaaggcgatgatcagcatccgcgactacatcgacaagcgcggtaccgttgatggcaagcggctgctcgacgacttcagcaacgatccgtttggctggtcacctgataccacgcgctacatcgtggccgccatgctcatggcgggtgaaatcaagctcaaggtatccgggcgcgaagttacggcagccggtcagcaggcgatcgacgccctgaagaccaataactccttcaagcaaatcggcgtcgccctgcgcgacgaacgcccgtccatcgaaacgctcggacgtgccgctgagcgactcaccgagctggtcggcgacatggtgatcccgctggagcaagagatcagcaaggcggcggggaagcacttcccgcgcttccagcacgactacggctctttagccgaaaaactcggtggccttgggctggcaggcagtgaccgcatccgcactttgaaccaggacattgccgatgtcctgttcaccgatgcctccgacgccccgcagcgcctgggtgccgaaacctccgccatttacgacaacctcaagtgggcccttgaagtgaagcgggcgctcgacaacgggctcgacgccaccctacgtgatttgcaagctcatcgccgcgacatcgaggcattgccggataccggtgtgccaggggagctgcgccgcgaacttgccgaagatctgggaaccctgtcagagcgcctgggcaaagaagacttctacaaacacaccgccgacttcaattcacagctcacccatctgaagggccgcgtgcgcgatgcggtcatcacgctctccgaccagcaaaaactgcgtttgaaggaaggtgtcgaggatctgcagcgcatccccgagtgggaagagctcacccaggaggagcgcggcaacgccgtgaaccggctggacggactcgccctggccgcgacccaagacctggccgggctcaaaaagctgctggcgcgcgactacgacatcaacagcaccctcgacgacctcaagcgctctatccagcgccagggccaggagcgcctacgtcagcgcatggaagaagagcgggccaagactggcgagcaaggcccggccaagctcaccaagtcaatcgccgtgccggtgaagatgacctcggcagcggacatcgacgcgctgattcaacagctccacgaaatcaaggcgcagctcggcctttacgatcaagtcgagttgtctttcacgctggcaccaaaggaacaatga

SEQ ID NO: 500128 - DNA, 1683 bp, Stenotrophomonas maltophilia
atgaacctcaatgcatcaatcattgatcaacgtttggctggtattcaaggtgaaatccaagatcgcgcaaacgaagaactgggcgtcaaggatgcgggccgcctcaagtcgctggcatttgtttttctatgcgttaaaaccatgctcgacttggatagcgaagaggctttcgactgcctgacggacggcggcggcgactttggcgttgatgcactgcatatcaccgaagaaatggacggtgaatttggcgtcaccctgtttcagggaaaatacaagcaaaacctggaaggcaactcgaatttcgaacaaaacggcatcacggcgatgatcaatgccattcgtcatatatttgacccgtctgccgaccttggggcaatcaatgaccgcctgcgcgtcaaagttgagcaggctcgctcgctgattcgagatggtctgattccacgcgttcgcgccattgcctgcaacaatggcctcaagtggaatgctgatgctgaacagtcaatcgaccgcgctggctttggtgatcaggtcacttgggagcatgtcaaccacgataccttgatcggcattttgcagagcatcaagccggtcgatgaaaccttgcgattgactggcaaagccatggttgaagacatgaacttcagccgtgtatgcgtcgggcgaatgccggtgagcgaggttgctgccctgatgagaaatcacggtgaaaaactgttggagcgcaatattcgccgatatctcggcctgcacggcaatcgcgttaacgaaggcatccgcacaaccttgcattcaacaacgccagagaacttttatttcttcaacaatggcttgacgctcgtttgtgacaagttcacctacaacgccctgcagcagggcgactttcaagtcaaggtcaaaaatctgcagatcgtcaatgttgggcagagttgtatgaccatccttaaaacggcagaagaacttgaaaaagccggtcagtcgctgccagttcaggcaagcgtgctggtcaggctgtacgaactgacgagcgacaatgacgatgttgttttgcaaatcacccatgccaccaacagtcaaaacccggtggacttgaaagacctgcgcgccaacgatgccaagcagcaacagctcgaacaaagcattcaagacttggggtacacctaccggcgcaaacgtatggacacgccggctaggccaactgacatcaccaccggcgcagcagccgaggctgttctggccgtatggcgacaagcgccacaccaggccaagtttttgacccgagagcatttcggcaagctgtacgacaccatctttaccgcatctctcaatggcgcacaggttgtcattgccgtcttgctttatcgcatcgcagaaaatcatcggaaacgcccacatgatgatgacccgctgtttgttcgctatgcctcgtgcttcatcgccatgcaaatggggcggcgactactcaagaatttgagtgtggccttggatggattgaatcatcgtaactttgcccaggccaaacagctgctggatgaacatggcgaagcctatttcaccgcctcgcgtcaggatatcgatgctgcactgaaagcgctttatggcgatcaggaggtgtccgtgcagcaactgtctgcaaccttccgtcgcggtgacctgatcgagaaactcaagcaggtcgaggtttga

SEQ ID NO: 500129 - DNA, 741 bp, Stenotrophomonas maltophilia
atgacgccatctggggtcgccagcatcgaggagttgggccttcgtggcacccttttcctagccgcactgttagccgcgcagctacgacgcctaccggtggcgcccacacgccgctccaccttgctggtgctggacacgctgcgagacttggccttgatccaagttccctggccagcggatcgatggcagatccgccccgatgccgaggtcacgcccatcgaagatctgcaatgggctttcgcctggtatacccacgagcgcaggcacctgctcccggtgctggaagaccaactcggcgatatggcacacgatgtagacttggcggacgcgaaactggagctgtgggatgaacttgcactctgggagaccgagcagtttctggagcagcaattgctcaaacatcacttcgacccaggctgggcacgtgatgtggggttcgcctttcaatccggaccgcggggcttgccgatcgcgcggtggcgttactgctgctgggcggcggtacgccaaggtgcctcggtggcgatgcgtcttggcgtgcacgacagcgcccatgtgcgggaagccatctttcaggaggtccagaagcgcctgcgctacctgatgaccagctcgcccgagcaaggcatgttcaagccctatcatttggcaccggagtcctcagtagccaaactgtttgtagattgggtcgtccctatggaatgggcgtactggacaggtgagcgccaccccagccgctag

SEQ ID NO: 500130 - DNA, 1272 bp, Stenotrophomonas maltophilia
gtgaccgaactggaccgctacctcgatgcggccacgcgccagaacacggtgcgcagctatgcgtcggcgctgcggcacttcgaggttgaatggcaaggccacctcccagcgacacctgacagcgtggcccggtacctggccgcttatgcgcagaccttggcgaccagcaccctccgccaacgtctggcggccatcgcctcttggcaccgcgaccacggctttgtcgacccgacccgatcgccgctggtgcgcaaggtgctcaaaggcatccagaccctgcacccgggccaggtcaagcaagccgcgccgctccagattcggcggctggtcgagctcgatgactggctggccgcggcgatcgctgcggcacatgcccggggcgatgggccggcggcgctgcgccatcaacgagaccgagcgctggtgctgctcgggttctggcggggattccgtggcgatgaactgctgcgtctggacgtggcccatctcacgctggtgccgggacaggggatgacctgcttcttgccacgcagcaagggtgatcgccaggcagccggcgtcacctacaaggtgccggcgctgtcgcggttatgtccggtggaggcgacccaggcgtggctgcaggcggccgacctgcaagaagggccggtgtttcgggcagtcaaccaatggggccaggtgagcgccgaaggcctgcatcccaacagcttggtgcgcctgctgcgcgagttgctgaccagtgccggctttgccgatgcggggctccacagcagccattcgttgcgccgcggctttgccagctgggccaacgaccaaggctgggacatgaaggccttgatggagtacgtgggctggcgcgatgtgcagtcggccatgcgttacctggacgggcgtgacccgtttgcccgggaccgcattgaagcaagcctgcccagtccaaccgtgccggtaccggcgatggcactgccggcgccggagggcaaatcggccctgcagctgcgcctgcgcatggtgctgaccccgtttgcccgcacgggccgcggcgcggccaaggcccgaggccgaattgaagagatctgcttggccccgttccaggctgtgcgcctgaacaccgccagcagcgagtaccagttgactgctcccaccgatcccgaaagggatctggatgaaatcctggccacgttgctcgatgacatgcaccgcatggccgatacgcaccagtgcttcctggaagcgtcgctcagtacagacgacggccggcactgggactga

SEQ ID NO: 500131 - DNA, 492 bp, Stenotrophomonas maltophilia
atggatcttgaatctcactgtgttgagggcttcgcggaaccggttgccaagcctcagtcggagacctgggcaaaggctgatgtggctctcatcatgctggacactgcctgcaagatgttcatttcaggaatgcacactcttccaattctgaatctcgcggcgatagcagaagaaacgtttggaagcattcttgagaatcagggccggagggacgatcgtgcaatttcagagctcgcaaggaaagtgctcccacaggcaccgggtgtgtcccgagaggagctgttcgacttcatctaccggcaaaagaacgcgataaagcactacaaccgtcaaggcgagacccacgttgtactggacagcagagcgctgttctatacgctctcgatggcgctgcgtaattgccgccaagctgggttcaagttaagccctgcaatgaataaggttgtgacattcattcgggcgagattcccgccgggcgagggcgcggaatag

SEQ ID NO: 500132 - DNA, 3408 bp, Stenotrophomonas maltophilia
atgcaaaagcgcggcgactccctattgctcagcgcctccgacctggtggggcatctcagttgcgagcacctaacaggattggacattgctgttgccaacggcacattggccaagcccgcaagatgggatcccctgctggaactgctctgggagcgcggcgcccagcacgagcatggctttgtggagcacttgtccgctcagggtctcgccgtaacggtcattgagggattcggcgtcgaggatgatctcatcgaaggaacgctcgcggccatgcgggcgggcgatgcggttatcgtgcaaggagcgttccgggtgaacggctgggttgggcgcacggacgtcctacgtcgtgtcgaaacgccgagtgatctggggccgtggtcgtatgaggtaatcgacacaaagctggcgagagaaaccaaagccggcaccgtcctgcagctgtgcttgtatgccgcactggttgaagcgacgcagggacgacgaccggaacactgctacgttgtagcgccatggaccggctatgaaccaaaggtctatcgcatggatgaatacgcggcctactaccgccgtgttcgtcacgccttggaatcggccatcgcacccggtggatcagacgacacctatcccgaaccgaaggaacattgtgacatttgccgctggcgcgtccgctgcgacgagcgccgccgtgccgatgaccacctgtccttggtcgcgggcatcacgaaggttcagatcaatgaactagcagcgcacggcattgccacgttggccgatttggccgtcatgcctattcccttggcgtggaagccggcgcgaggctcggcgcaggcgtatgagcgcgttcgtgagcaggcgcggatccagcttgccggacgccaggtcggcaccatccaacatgaattgctggcggttgtcgccggcttcggactctcgaccctcccggagccttcggcaggtgatgtcttcctagacttggaaggggatccgttcgccggcgaggatgggttggaatacctgttcggctatgcctatacggacgcggacggtaatgccgtcaatgtcgtggactgggcgctgactcgcgaggaagaaaagcaggccttcgaacggttcgtagattttgtgattgagcgtttgaaggtttaccccgatctgcacatctaccacttcgcgccatacgagccggccgcgttgaagcgacttatggggcggtacgcaactcgagagaccgaattcgactcactgctgcgatcgcggcgtatggtcgacttgtatgccgtcgttcgccagtgcttgcgtgctagcgtggagagctactcgatcaagaagctcgagccactctacgaattcacacgggccacgccgctggcggaggcgaacaaagccttggcgaaagtccaagcgggcctcgaactgggcgacctcgcactgatagacgtcaacgcgcgcgagacagttgctcgctacaaccgcgacgattgcgagtccacccgtgggctgcgctattggctggaggcccaacgcgccgggcttgtcgcgcagggcgtggcagtccctcggccggcgccaggagaggccgaggctagcgaggccctcaacgactggcagctcaagattgcgagcctggtagtgcgactgacggtggacgtgccggtggacccgacggaacgaacgccggaacagcatgcgcgatggctcctggcgcatacgttggacttccatcggcgagagcagaaagccgtctggtgggaatacttccgcctctcggctctcgccgccgatgatctggtcgatgagcgtgccggtttgtcgggactgacttttgtcggcccgcaaggaggaacggccaaggcaccaatccatcgctatgccttccaaccgcaggaaaccgaaatgcgcggctcagaagacttgcacaatctgggcggcgcgaaacttggtaccgtgcacgcaatctcagtggacgagaggtggattgacatcaagaagcgtatggacagcgcagcgctgcacccggaggcagtgttcagccgcaaggtcattaacgccgatgtcctggcggacgcgctcgtgcggattggcgagtcggtcgcggcgaacggtctggagggctctggcgcctacctcgctgcccgcgacctgctgttacgcatgggtccccgtttgggcggtcaggcccttcagggcgagggcgaagcctctctggatgcggcctgccggattgcgctggccttggaaggcggcctgctaccgattcaagggccgccgggttcgggtaagacgttcaccggcgcccgcatgatttgcgcgctagttcgagcgggaaaaaaggtcggcatctgcgccacgagccacaaggtcattcgtaacttgctggacgaagtcgtcagggcttctgcggagcaagggatcgacttggtctgtatccagaagccatcggagcccgagcccgatcagccccgacttcgtttcgccaagagcaacgcggacttgctcgccgccctagcggcgggggcacaggttgcgggggggacggcttggctgtgggcttcgccggacgcgatgcgggtgatcgatgtcttgttcgtcgatgaagcggcgcagatgtcactggccaatgttcttgcgatctcgcaagcagcggcacaactggttctgctcggcgatccgcagcagcttgaccagcccatgcagggcagtcatcccgagggcaccgacgtatccgcgctgcattatgtgctgggcgaagaacagaccgtgcccgccgagcgcggtctgttcctggccgaaacgtggcgtttgcatccggagatttgtcggttcacgtcggagatgttctacgccaaccggctgcatcctcgcgccggcttagagcggcaggccatcgtgtccacgagtcggatcagcgggtctggccttcgttttctggcggtcccgacccggggcaaccaaagcgcctcgcccgaagaagccgaggccgtgcgcctgctcgtggtcgaaaccttggccagcggcgcgacctggacaaatgatcaaggcgtgccggcagtggtgacgctacaggacattctgatcatcgcgccctacaacgcgcaggtctttgaattggccgagcgcgttccgggggcgagaattggcaccgtcgacaagtttcaaggtcaacaggcgcccatcgtcatctattcaatgacgacatccagctatgccgatgcgccacgcggcatggaattcctctacagcctcaatcggctgaacgtggcgacctctcgtgcaaagtgcgtgtgcgttctggtcgcatcgccttcggtcttcgaagtccgctgccgtacgcctcgtcagatgcaacttgccaacgccttctgccgatacctcgaaatggctactccggtaaacgcctccccatga

SEQ ID NO: 500133 - DNA, 237 bp, Stenotrophomonas maltophilia
atgcaactggccgatcatggctctgatgttgggctgattcagggagacgccctcccaatcatgagcgaaaacattgcgtatctttcgtgcgatctcaagatcttcgtactgctcccttgtgagaaggcccactgcataagcggccttcatgcgactagcaagcgtgccaagaggcgcattgaaaccttcgaccagatcctttgcttgtttgccatcaataaggtaagtcagcagtag

SEQ ID NO: 500134 - DNA, 702 bp, Stenotrophomonas maltophilia
atgtccgtttctggccggaagcactcgtgggcccggcatggcagcacccggcccaaagtagccattggtgcggccaccgatcgctaccaccgggtccgtctgtccgctgccttgttagccggaccgtgccgccctaagatcgagctgtatcaaggggaaggcctggtgcaaggggccttgcggataaatcgtttgaccggacccaagggtccgcctgttaagcagcttgccaccaagggggaaatcatggatgaactggtgattggcgttgtatctggcctagttgcatcattcatcgtgtttgtgctgcacaagctctatctatcggtgatccgaccgtggattgaggaccgtgtgtacaaagacgcgcgaatcgagggccgctggtgcatcagctacccagaaatgtcagaagtcgaagaacaggtcacgctggaacgatctgctcacaaggtcacgggccagatcaactgcacgaaaggaccggatgcaggaaagatctacgacgtcgaggggaccttcaggaacctcctccttactttgacctacgcatccgcggatcgttccgcacttgatcgtggcgcgttcgttctgcaactgaatggcaatggtggctcgttctgtggtcactcgtcttactactacaaccaagatcactccattgttggcgctgcatgtgagtggcgccgcattgcaggttaa

SEQ ID NO: 500135 - DNA, 711 bp, Stenotrophomonas maltophilia
atggagcgtacgaaaaagacactgacgatggccgatgttgctggatggggttcggcgctcgtcacctttggattgattcaaggggccttctatctgaacgcgtattggggacacttcggcctggatccctttcagtttgttgcggtgagcgagcttgcgctggcagggcttacggggatcggcatggtgttattcctcatgctgctggcctcactgtttggcggctgggtggagatgaaggtcacgagcggcagctccaaaagcaagctgttcgcatggctgtttccagcgcttttcttcactgccctagggctgctgctttggtggtcgaacacgtggcctcttctgatagggattcttctaacggtcatctgtgcgttgatcgtgcatctttcgccggtggtgcccaccgcagtgaaagattccccttggctgatctacgccttggtgatgctggtctacgtctcgatagcgtcaagcatgcttggctcccagcgagccgagaagatctcctctggcggcggcaagcacgtgacgactgtgactgttgatggaaaggtgcagggcgacctaagcctgattggtcgtcttggtgacagctatgcactgtgggacccgacgcggaaggctacagtgcttgtgcctgttggcgatgttgggagattggagattctgcgaaagggtgtgattcctgttccggcagcccaatag

SEQ ID NO: 500136 - DNA, 468 bp, Stenotrophomonas maltophilia
gtgtcgaccaaggtcgacacctaccgggtgtacggcgaccggtcggattggcgcttggtagagccggccgctggccggcttccccaaggcgttcccggcgaccacgtggttgccggccagcggccggcattccccatcgttgggttggccaatgtcgacgcctaccgggcgtacggcgaccggccggattggcgcttggtagagccggccgctggccggcttccgctgggcgtttccggtgaccacgtggttgccggccagcggccggcactccccatcgttaggttggccaatgtcgacacctgccgggtgtacggcgaccggccggattggcgctcggtagagccggccgctggccggcttccgcagggcgttcccggtgactacgtggttgccggccagcggccggcactacccaccgttaggttggccaatgtggacacctaccgggtgcacggcgaccggtag

SEQ ID NO: 500137 - DNA, 945 bp, Stenotrophomonas maltophilia
atgaaccaccataaaaatgcccgtttgacgccgtttagtcgagaacttcttgtccgccgcatcactgagcaaggccttcggccagaagaggccgcccaggcttgcggggtgagtgtacgcacggcttacaagtggctggcccggtatcgagccgagggcctgattgggctgcagaaccgcagctctcggcccagccgcagcccccatggcacccctgaggcactggtagagcagatcgttcagcgtcgacgtcaacggcaaacctacctgaccatttccaaggcactgggtgtggctcacagcaccatttcacgactgatgcgccgacgaggactcaatcgcctgtgccttctggacccaccgaagaaggcggtccggtatgagtacgacagcccgggcggcttgctgcacttggatatcaagaaactcggcaacttccaccggcccggacaccgggtcgatccgaatcggcgtggcaatgctggcggcggtggctggggctatgtccatgtggccattgatgaccactcccgagtcgccttcagtagcgttcacaccgatgagaagggctcaacggcctgccaagcgctgctggccgctttggcgtactacaagacgctgggggtgaccttccagcgtgtcctgactgacaacggcgcctgctatcgctccggcgtcttcgctcgactcgtcgcctcgttgggcatgaagcactatcggaccaagccctacaccccgcgaaccaacggtaaggccgagcgcttcatccagaccagcttgcgcgaatgggcctacgcctgcgagtacgcttcgtcagagcaacgtgatgccgtgctgcctgaatggctgcattactacaactggcaccgaccccacatggggatcggcagccaaccgcctatttccagaatcccgctgaacaacgtggtgggtttacacaactaa

SEQ ID NO: 500138 - DNA, 720 bp, Stenotrophomonas maltophilia
atgaatcagccatcacttcccaaccttctggatcacttgcacgagcaggtggaggccgcgctcagaactgcccgccttgcgttgcatcaccccaccgacaagggagatgcaagtgaacaggtctggatcgatctgctaagcagctacttgcccaagcggtacgtggtcagcaaggcccacgttgtggatagcgaggggaacttcagtcagcagatcgacgtggttatacacgatcgccaatactccccattggtgttcacctacttgggggtgcactacgttcctgcggagagtgtgtatgcggtctttgaggccaagcaggtaacgagcgcggagactatcggctatgcgcaattcaaggcagagagtgtgaggcgcctgatcagaaccaccatgccggtgcctacagtcgatggtcccaaaccagcgaaggagccggctcgcattctcgccgggttgctgtcattgagctgcccgtgggtgccaccgctgggacagaccctggccgaccatgttcttggtcaagccgggaatagacagctggatatgggctgtattgcagatgcgggtacgttcttcatgaacgatgaaggcgcgctcgaacggcaggctgggccgcgggcaaccacaaggttcttgcttgaactgatggctaggctgcaggagctcggaacggtaccgatgctcgacattcgtagctacgccaaacacatcccgtag

SEQ ID NO: 500139 - DNA, 762 bp, Stenotrophomonas maltophilia
ttgactggagacctgtacctgaaggcgattcttacgagagaggccgtcgatacgtccttgctctcccctgcgttcttagcgagggcaacgctgaccccggtgatcaatgcctggggcggtcggtacgtgcagtcagtaactccaagcggatccttcgcgaaggggacagccaataagagtggcactgatgtggatctctttatttccttgcgtccttcgactcccgatagtcttaagcagatctacctgacgctcttcaacgctctgacagatgcgggctacgttgtgcgtaagcaggatgtgtctctgggcattcgggtggctcagattgatgtggatcttgtgcctgggaaacaacaaacggcgctcaccacagactatagtctctatcgcagccgggcagatacttggacgaagaccaacgttcaaacccacattgacgtagtacgcgcggccggcatgcagcctgagacaaggatcatcaagctctggcgggatcaaaacaggttggacttcccatcggtctaccttgagttggttgtgatccgggcgttgcagctcaatttctccgttagcttggccgagcgcgttctggtggtgcttcgcttcttggccaatagtttcgtagccgctcgggttacagaccccgctaacgcgaacaacgcgatctctgatgatcttacgtttgcagacaaacttgcgattgagcgcgccgctcaggttgcgcttgcgcaagagacatggggcagcatcgtccaatga

SEQ ID NO: 500140 - DNA, 615 bp, Stenotrophomonas maltophilia
atgagcatcctcaaccttctgctcactcgtgatcaccttgtcgtcgccgtggataccttggcagaggatgctctcacaggggcacattccgccggggcaaagctgctgctgatccctcagcacaacctgatgtttgctacgcgaggttctacgcagttcttccttcgcatttatgagctggcgctgcaggctagctaccgcgcagatttcacaatggaacagttatctgccgagctggggttggtggtggaccagctgtggccgaactacgagaaggcggcagccgaggcaggattaccgatcgagcagctcgggaccgagttggtgtttggtggctggtcgtcgaagagcgaccggatgatggccacggcatatgccaagagcggcagccagcacccttgcgtggtccagccgatccgggggcagctggcctcaccaggcgaaccgctccgggccgtgattcctagcatggcccagaaggatctgctggcccacgcacgcctgcaggccagctacctcaatgagcaacttggccggcgagtggcgggaggccggttgctggctgggttcttgcagaagggacaggccgtgctcaaggatcttggagagatctag

SEQ ID NO: 500141 - DNA, 276 bp, Stenotrophomonas maltophilia
atgacctccgagatcacagaaatccttgagcgcctccacgcttgcgaggccgcacttgagatgcaccgcggctacctcaaagcaatggagtatgggttgcgggtttcgtttctaacacaccaagacccggtgattctgctcgacacgtggaccagactgctcccctcgatcgcccatagccacgagagggagggcagccagcaattcgccgccgcattccagcagtccctgacagttctcactgagcagatcggcaccgagtgcaagagaccctaa

SEQ ID NO: 500142 - DNA, 246 bp, Stenotrophomonas maltophilia
atgaaactgcgttatacgttcgctgtatgcctcgttgccggcctgacatggtcctcaggcgcatctgcccacgatcctgccttgcatgccgatccggtgccggccgccgcgccacaagctaagccaaagacgtgcgagcagctggctgatcgatcgaagtacaaggttgatctgaatgactctcagaccaaggcattgaaggagcgttgcgacgccgaggcggcttcgggcgctaagaagaagtaa

SEQ ID NO: 500143 - DNA, 642 bp, Stenotrophomonas maltophilia
atgtccatttccatcaatcagcaacttcccagcactcgccgactgctcaaatcgaccgcgctcgccgtggcggtcgctggtgtgattctgatcactaccgtactgcccgccgagtacggcattgacccgactggcgtgggtcgtgccctcggtttggatgcgctggccgcgagcggcgattcctccgcatctgaagccgttcctcaaacctcaaatgggcgcccggaagccattgcggccttgtccgagaaggccaaggtcgccttcggagagaacaaggggcaatcccttgatccagcggctgtaggttttggttctggcgcgctgcgtcaggacaccatgaccatcgaaatcgagccaggcaaaggcatggagctgaagtcccacatgaccacgggtgcaggaatgctgttccgctggacatccagcgctccggttgccgtggacatgcatggcgagagacctgacgtgaagggagcctggaccagctacgccgtagagggcgcccaatcgaaagcagaggggactttcatcgctcccttcgatggaacacatggctggtattggcagaaccgaggtacctcgccggtgatcatcacaatcgaactgaatggctatcaggccgacctgtatcagccgtaa

SEQ ID NO: 500144 - DNA, 1233 bp, Stenotrophomonas maltophilia
atgaaccgctacgcattcctgatcatgttccccttggtcctttccgcctgcggcggtgacaaagccgcgaccgaagcctctaccgagacagctgccgcatccgccgactacgaacgagggccgaatcgagggcgcatgctgcgtgacggcgattttgccctcgagatcaccgtttacgaaaccaacacgccgccacacttccgtctttacgcgtatcgcaacgacaaaccgattccgccttccgaagtgcaggcgagcatgcagctcaagcgtctggacggcgaggtcaataccttcagcttcaagccggagaacggctacctcgtcggcagtggggaggtcactgagccgcactcgttcgatgtggtggccgaagccaccgcagcaggcaagtcccatcgctggaactacccctcctatgaaggccgtacgcgaatcgaaccacaagcagctaaggacgcgggcatcgtggtggaagcagcaggcagtgccagcatccgcgacacagtgaccttgatgggcaacgtgacggtcaacacggcgcggcaagccgcagtgaaagcacgctttcccggcgtggtgcgcagcgttgcagtcgagatgggccagcgagtcagtgcgggccagactctggccacggtggaaggcaacgacagcatgcgcagctatgccgtcatcgcgccgtttggcggaattgtgttggcgcgtaataccagcgttggggacgtggcggcagacaacacgttgttcgagatcgccgacctctccgaggtatgggtagacctgcgggcactgggcaccgacgccgagcggcttgctgcaggccaggtggtgacgcttcgctcagccactggcgcccatgaaacccaaggacgggtgcagagcctgctccccttggccagtgccggccaaagcgtagtcgcacgggtcagcatccccaatgaagacggccggtggcgcccgggtatggccgtgtcggccgaggtcgtgttgtccgaaacccaggtcccgttggcagtcaaggaatccgggctgcagcgcttccgtgacttcaccgtggtcttcgcacaggtgggcgacacgtatgaggtgcgcatgcttgagctcggcaagcgcgatgggcagctggtcgaggtactcggtggcctcaagcccggtacccgttatgtcagcgagcaaagctacctgattcgcgcggacatcgaaaagtctggcgcgagccacgatcactga

SEQ ID NO: 500145 - DNA, 1251 bp, Stenotrophomonas maltophilia
gtgaaattccgtagtgtgtgggcgctggccattgccggcgcctgcggtatggccgtgcctggccatgccgccgaagttctgcgcctggaggaagcggtcgcccgcgccctgggcagtcatccgagcgccgcagctgatgccgcccagctggaggcaacccgcagccgtgcagcccgggagggcctgccggcgcccatcattctgggcggggaactggagaacgttgctggcagcggcagcgtttcagggatggatgccgctgaggcaacgttccgcgtatcccgcctgctggaactcggcggcaagcgcgctgcgcgacaggcattgggcggcgcggagatcgacgcggcccaacgggcaggggacgtgactcgcgtaaccatcgccacccgagccgcaggacggttcatcgatgtgctggccgcgcaggagcatgtggaacacgcgcaggagcgcatcgcgatggcgcgcgccctgcagcgagaggtcgggcgttgggtctcggcggcgcgcaatcctgattccgacctgcgagcggcagaaatcgcagttgccgacgccgaactcaagcgcgatcaggcgctggagcgtctggagtcgacacgccatgcgctcgcagcttcatggggtgcgttgacggtcgactttggcgccgtcgctggtgatacctcggtgctgcccccccttgagcagttccaggcgatggccgcgaagctgccttcgacacctcagcaacagcttcttgagtcccaggcaggcgtgctgaccgcgcgccgtaacgtggcgcttgccgccgcccggccagatgtcagcgtgggcctgggcattcgccggctggaagccaccaaagacagcggattggtgatgtcggtttctgtcccattgggcagccgcaagcgatcagcgtattccgtttctgaagtcgaccacgagctgtctgccctcagtgcccggcgccaagcgcaggccgttgaactgcaacaggaacttttcgatatctaccagcaattgcggcaagcgcagctggaggtcgagtcggtacgcgaacgccagctgcccaaggccgaggcagcactgaagcagagccggcgcggcttcgaggagggccgattctcctatctggcgctgggccaggcgcagaagaccctgttcgaccttcgcgagcgcgaagttgaagccgccgcccgctatctccgactgctggtcgaggcagatcgcctcaccgcctccgctctggacatccgcccatga

SEQ ID NO: 500146 - DNA, 366 bp, Stenotrophomonas maltophilia
atgcgtctttccgcccgccaccgtgtgctcgcccgcatcagccttttcgcgctgatgctgctgagtgttgtggcgcggccgatggtgatccagctgagcgaactgcatggtctggagcacgacatcgccgctgcgttcgaccatgggcattcccatccggccggagccagtgacaacctcgacgacgaccacgcctctggtgcgcacagcgtgctgcaccaggcagacgcaagcttcgcagggagcctgttcaatggccaccaccaggtagtcgctctcgcactgagcgccgacgtgcccgcattgcggctgctgcgcgtgcctttgggttatcccgcctcgcccttccggcctccgatcgtctga

SEQ ID NO: 500147 - DNA, 651 bp, Stenotrophomonas maltophilia
atgtacaacagcaagcccctcgaaagtgacctccccagcagccgccagctggcgcgcactaccctcatcgccgccggcatcgccgtcgtgcttctcatcggtgtcgtgctgcctgcggaacacgccgtggatccgttgggtataggccgaatgctgggtctgaccgagatgggacagatcaagcagcaactgtccgaagaagccgcagcggatgcggccatggatgcccgggccgaggagggcctcgccgtgctcacccaggtctccacgcgggatcgccagacagtcgaagtcactcccaagccggccgctgcttcggcctcagcgcccgcagccacggaatggcgtgacgaagccgaagtcgtgctggcgcccggtcagggtaccgaaatcaagctttccatgaaggaaggcgagcgtgcgacctacacttggtcggtccagggcggggtggtgaacttcgacacccatggtgacggcggtggtcgtgcgatcagctatgagaaggggcgaggtgaggcgtccgaccagggcgtacttctggccgcctttacgggcaaccacggctggttctggcgcaatcgcggcgaggaaccggtcaccctgctgctgcgtacgggcgggcagtatgaacagctgaagaaaatgtaa

SEQ ID NO: 500148 - DNA, 1335 bp, Stenotrophomonas maltophilia
atgatcgaggttctccgttttccgaccttcaggaatctgttcgctgcccaggtgattgcgttggtcggtactggcttggcgaccgtggcgctttcgctgctcgcctatgacctggccggcgcgcaggccggccaggtgctcggcacggcactggccatcaagatggtggtctacgtcctgctcgcgcctatgtccggcgcggtcgtgccagccaatctgcgtaagccggtcctgatcgggcttgatctggtgcgcgcggccgcggcactgtgcctgcctttcgtgaatcagatctggcaggtgtacctgctcatcgctcttctgcagtcggcatcagcctgcttcacgccgctgttccaatcgaccattccggaaatcctcaaggaagagcgcgactacacccgtgcattgtccttgtcgcggctggcgtatgacctggaaagcctgctcagccctgcgctggcggcggccctgctgacactgatcagcttccatggccttttcgccggtacgtcggtgggcttcgtctgctcagcgctgctggtcgtggtcacggcattccccttcgttgcagcctcgccgcgcaaggaaggcccctatgcacgggccatccgtggcatgcgtatctatctgaagacgcctcgactgaaaggcctgctggcgctgaacctgtgcgctgccgcgggtggtgcgatggtattcgtcaatacggtggtggtcgtgcgcaacgtgctgggcggtgctgaagcccaggtcgcctgggccctggctgcgttcggcggcggctcgatgctgatggcgttggttcttcccaaggtactggaccgcgtaccggaccgtcgcgtgatgctctctgcagccagcatgatgcttgcggtgcttaccgccttgggggttacgtggtggctgacgccctccgcgatcggctggcccctggtgctgtccggctgggcattgctgggcatgagctacgccggcttggtgacaccaggcggccggctgctacggcgctcggcagagtccactgaccttcctttcctgttcgccgcgcagttctcgctttcccacgtctgctggctgattgcctacccactggccggtaccgtgggggcacgcctgggcatgccggtggcggttctggcgctcgcggtggtggcctgcgcggggcttctattcgcctggcgtacctggcctgcgaatgatcctgacgcaatcacccaccgacatgatgatctccctgcggaccacccgcacatgcaggaacacgcgcatacggaacaaggccactcgcaccgttttgtcatcgatgacaaccatacccgttggcccggatga

SEQ ID NO: 500149 - DNA, 3246 bp, Stenotrophomonas maltophilia
atgatcgaacaggtgcttacaggtgccgtgcggcaccgctggctggtgttgttcatcacgctggtgatctcggtcatcggtgcctggcagttgaacatgctgccgatcgatgtcaccccggacatcaccaacaagcaggtgcagatcaacaccgtcatccccacgctcagcccggtggaagtggaaaagcgggtgacctatcccatcgagaccgcgatggcgggcctgcgcggcgttgccaacacgcgttcgttctcgcgcaacggtttcagccaggtgacggtcatcttcgatgaaagtgccgatctgtacttcatgcgccagcaggtcaccgagcgcttgacccaggcccggccgcagcttcccgaaggcgccgagccgctgatggggccggtttccactggcctgggcgaggtattccactacagcgtcgagttcacacaccccgatggcaaggacgcgccacgcaacgatggcaagcccggatggcagagcgatggctcgttcctgaccgatcagggcgatcgcctggccgatgacatggcgcgcctagcgtacctgcgcacggtacaggactggatcgtgcgcccgcagctgcgcacgacgccgggcgtggctgacgtcgacagcctgggcggctatgtgaaggagtatgtggtcgagcccaatgcagccaagcttgctgagtatgggttctcctacaccgacctggcgaacgcgctgcaggatgcaaatctttcggtgggtgcggactacatccagcgctctggcgaatcctatctggtgcgagctgatgcccgtatccgttcggtggatgagatcgcgcgggccgtggtgggtaaccgcaacggtgttccggtcacggtgggtgatgttgcgcgggtggtgatcgacggcgagctgcggcgaggtgccgccagtcgcaacggctacgagacggtagtgggcagcgcgctgatgctggtgggcgccaacagccgcaccgtggccgccgccgtcggcgacaagctcaaggagatcagcaagaccatgccgccgggcgtgagcatcgtcccgacgctggatcgctcgcagttggtggtggcgaccatcaagaccgtcgccaagaacctgacggagggcgcgctgctggtggtggtcatcctgttcgcgttgctgggtaactggcgtgcggcagtgattgctgcactggtaattccgttgtccctgctcatcaccgccatcggcatgaacaagctgggcatctccggcaacctgatgagcctgggagcgctggattttggactgatcatcgacggtgctgtgatcattgtcgaaaactcactgcgacgattggccgagcgtcagcatgccgaaggtagaatcctcactctgagcgagcgcctgcacgagaccatcgcgtcctccaaggagatggtccgcccgacgatctacggacaggcggtcatcttcctcgtctttgttccgtgcctgacgttccagggcgtggaaggcaagatgttctcgccgatggtgatcaccctgatgctggcgcttgcatcggcctttgtcctctcgctgacattcgttccggcgatggtcgcggtcatgttgaagggccacatctccgagaaggaagtgcgtgtagtggcggccacgaagagccgttaccagccgttgctgcgcaatgcgatccggcaaccgatgccatatcttgccggcggattgggcgtattgctggccggcgcggtggcgttctccttcgtcggacgtgagttcatgccgacactggacgagcagaacctgaacctgtcctccgttcgtattccctccacctccatcgaacagtcggtagccatcgatcttcccctggagaaggctgtgctgacgcttcccgaggtgcagaccgtctactccaaggcgggtacggcgagccttgccgcagaccccatgccgccaaacgcatcggacaactacgtcatcctgaaaccgaaggaccagtggcctgatggtgtgaagaccaaagagcaggtcatcgagcgcatccgcgagaagaccgcgttcctggtgggcaacaactacgacgccacgcagccgatcgagatgcgcttcaacgagctgatcggtggtgtgcgcagcgacgtggcggtgaagatctacggcgaagacctgacggccttggccaccagcgcagacaaaattgctgctgtgctgaagaagattcccggggcatcggatgtgcgtgtggcccagaccggtggcttcccgaccttcgacatggcgtttgatcgcgcagcgatcgcccgctatggcctgaccgttaaggatgtggctgatacggtgtcggccgcgttggccggacgccaggcgggccagatctttgagggcgatcgccgcttcgatgtggtggttcgactgccccgcgtcgaccgaagtgatctggacgtcctgggtgcggtgccggtcatgctgccgccggggaatcaggaaggcagcccttcggtgccgctgcgtgagctggtcagcttccgcttcacgcagggtctgaacgaggtgagtcgtgacaacggcaagcgccggatctatgtagaggccaacgtagtggggcgtgatctgggcagcttcgtggacgatgccaaggtagcgatcgcacagcaggtgcaactgccgaccggctcgtggatcgagtggggcgggcagttccagaacctgcaggcagctacccagcgtttggccatcatcgtgccgctgtgcttcatcctgattgccgcggtgctgtatatggccatcggcaacgggctgttgaccggcactgtgctgacggccgtaccgctggcgctggccggtggcttcttcgcgctggccttgcgtggcattccgttctcgatctcggcagcagtggggttcattgctgtttcgggtgtggcggtgctgaacggactggtgttgatctccgccatcaagaagcgtctgcatgacggcatggagccgaacgaggcggtggagcagggtgcaatggagcgcgtccggcccgtgttgatgacggccttggttgcttcactggggtttgtacccatggcgatcgcaaccggcacgggtgctgaagtccagaagccgttggcgaccgtggtcatcggcggcctcatcacggcaaccgtactgaccctgttcgtcctgccggcactgtgtgggctggtgctgcgcaggactgcgcgcaggaaggcagcgggcatcgaggacccactgccggcgccggaaaccgattga

SEQ ID NO: 500150 - DNA, 1167 bp, Stenotrophomonas maltophilia
atgaagcgaaacaccccttccgtgaatactctgggcatgctcggcgtcgccgcgctggcgcttggcgcaggcttcggcatcgcccgcctttcgcagtcctccagcgcgcctgccccggcagacgctgcgcccactgccgctgaagataacggcggcgtgcaggtcgttgccattcccgatgcatatcttggagcagccggtattgccgttgaggctgtcacctctgccgacgtggcagccaacattggcgcagcaggctccgtcgttgccattccgggtggtgaagccgtggtggtatccagggccgcaggcaacgtgaccgaggtgcttcgccaggtgggcgacaaggtcgccaagggcgatgtccttgcacgggtcgccagccctgatggcgcacgcattgcagcagatctgcgcgtggccaatgccggtctttccctggcgcagaagaacgccagccgggaccagtcgctgttggcgcagggggtgcttgcccggcaggaggccgaagccagccaagctgcctacctgtcggcacaggccgaagcgcaacgggctgcgctggtggctcgcaccgccaacgtcgatggcggcggcagcgtttcggtggtcagccccatcgccgggaccatcagcagttcccaggccacactgggtgtattcgttgaaccacaggccaccctctatcgcgtcaccggctcgaacggcgtggaggtgcaggcatcggtgcgcgcgggtgataccagccggatccgctccggtgatcctgccaccatcgtgcgctctgacggcaccgtggtatcaggcaaggtccgttctgtagcgacggcggtgggaggattgactcgagctgcaaccgtggtgattacgccggaaaacgctggcgccggacttgtcgtcggtgacggcgtgcaggtgcgccttgtggcgtcagccgggcagtccggtggcatgtccgttcccgaagaagccgtgcagaacatcgatggcaaagacgtgctgttcgtgcgcacggagaaggggttcaacgcccagcccgtgttcgtaggcgtgcgtagtggtggaatggcgcagatcctctccggtgtttccgcaggaacccgcgtagcaacccgcaacgccttcctggtgaaggcggaaatgaacaagtccggcggagacgagtga

SEQ ID NO: 500151 - DNA, 1224 bp, Stenotrophomonas maltophilia
atgaagtactcattgcttgccttgtcgacactgctggcgctgttcggcacatcggtggcgtgggccgccgacgcgcccacctacgaagatctactggaacagagcagggcgcaatcgccttacctgcaggaaaagcgcttcgacaccgcagcggccgccggcgatgcccggcaggccagagcattgcgcaaccccactatcgacggccttgtcgagaatctcaacgcacccttaagcaatggcagcagccagcgccagacgacctacaccctgacccagccgctggagatcttcggccagcggagcgcgcgtatccaggcgggcgagaagggcctgcaggcggccgaagctcggcaacaccaagcgcaggttgagttctcggcagcgctggcggtggcctacgccgctgccgaggccagcctgattcgccgggcaatcgcgcaggaggatgtggagcgcgccgagggcgacctgcgtgcggccaaggctctggtggaagctggcaaagaggccagccttcgttccgcccaagcccaggccggcctgagcgcggcgcaatcggctgctgccagtcgcgatgccgagacgacggctgctcttgagcagttgtcggtgctggccggccagaccgagacgtactcaggtgtgggccagtcccttctagagcgcgactggccaacggtgggcgcaaccgcaggcgatgccacggcggtgctgacagccaaggcggacgtggacgctaccgaagcccaactgcgtatcgaaaggctcaagcgtgcgccggacctgagcgtgtctgcagggcgtcgcagctttgcagcaggtggggacgcgctggtcgtgggcctttcgctgtccgtaccgctgttcgaccgcaacagtggcggcatcagcgccgcccgtgcccgtaccgacgcggccagggcgcgattggacgctgcgcgcctgcagagccaggcagatcgcgctaccgcgttgtcccaggtggctgcggcgcgacgcggcctcgaggcagctgccgagggtgaaaaagccgcggccgaggcctaccgcatgggccgtctggggtatgaggccggccgcacgcccctggtggaactgctgctcagccgccgcacgttgacagaagcgcggctgaccgtggtcgatgcgcgccttgcccgggtccgtgcctacgcatcacttgcaatggccaatggccagatcgtcttcggagaccgttga

SEQ ID NO: 500152 - DNA, 444 bp, Stenotrophomonas maltophilia
atgggcgttccggaaaccgacgtggacgacgtcgttcaggaaactttcgtgtcggcgtggcgcgcgttggctgagtatgaccccgctcgcccagtgcttccgtggttgatgcgtatcggaatcaacaaggttcgcgatacccagcgtttccgccgcgtgcgttacttcctattcaaggcccggcccatcgacgatgaagagggccggacgctggtatcggatcaggccggcccggaacagagcgccagttccagccttgaactcgccagcgtgatgcgcgtgctcgacagcatcgatcccgccttacgcgaggcactggtgctgacggcattcgtcggtctgtcccaggttgaagcggccgctgcgctgggaatcagcctgaaaacgatcgaaggccgcgtacttcgcgcccgggcaaaactggcctcggcgttgggtcgttag

SEQ ID NO: 500153 - DNA, 447 bp, Stenotrophomonas maltophilia
atggctatcggaaccgccatgcgcctgcctttggcgaccttggccggcgcggtcatcggcgtggtttgcgccctggggatcggctggggctggcactacctcaaccctggccacagcgacctgcatgaacggctgcacgccgtggtgcccctggacaattcggagaaggacatcctgcaggccaaagagcagctctttgcgacgcgcaggggcgagatcgaggcgcgcttgcgaatcgccaaccgtcaacttgccgatgccattgcggccgatcctcgctggagtccgcaggtagaggcggcaagcagggaggtcgagcgtgcggcgggtgatctgcagcgtatcacgctggagcacgtcttcgagatgcgtgcagggctgaagcccgatcaccgcgctgcctacgacaaggcgctgctggacgcactgcgcaacgattccccttga

SEQ ID NO: 500154 - DNA, 285 bp, Stenotrophomonas maltophilia
atgaacaaccttgatgactggcttgcaaaagccgcaaacgcaacgcgcgcagatgccagcgcgggaaccgatgcgctgctggcccgcctggcccaggagccgccacctgccaagtgggcgggacgccgcgagctccgccgcgctgtgacctgtgctgcgttgtctgcggtgctgacctgtggcggggtgggctctgcattcctcgtcacccagtccaacccgcggcccacttgggtcgcggcgccgtctgccatgtccccctacgccctgctggtggaacgctga

SEQ ID NO: 500155 - DNA, 1953 bp, Stenotrophomonas maltophilia
atggacaagaagggcaaggcagccaaccaagctctctttgaggaagactacgtgctgcggtcactcgggcggattggctatgacccagatatggcgctcactgagctggtggccaacacgtgggatgcaggggctgccagggttgccgtgatcatcccggaggaaacaagtggcatgctgtcggtcgaagacgatggccacgggatgaccgaggaccagtttcgcaagcgctggatgaccttgggatacaacaggcatcgaagccaaggggcgaacgtccagtttccttccgaacgcgacgattgggtacgcatggccttcggacgcaacggtattggtcgccatggcttgttgtgcttttctgatcattacacggtcgaaacttggacaaatggcgttctttctaccttcgtgattgggacccgaaatcagccgtcgccgttctacatccaaagccatgagacagccacccgttcgggccatggcacccggttgttggtggaggttgaacgccaccgcccagatccagatcggatcaggacggtcctgtcaggacgcttcctgcacgatccgcagttcgtcgtttcggtgaacggccagtccgtcccgctgtctgagcatgagggccttctggaggaacgcaagattcaggtcgaacctggctttgatgtcacggcgtatgtggtggacacaacacgcacagcgaaatccacccgctaccaaggcgtagcgttttgggtgagcaatcggttggtcgggctgccgagttggaccgttgggccgatggtcgttctggatgggcgggtgcgctttgccaagcgctatgccctcgtgattgagtgcggatcggagtggctttccgaaatcgaaccagactggtcgaagttcaagactacggagcgaactgatcaccttttcgaagcggccaacgggtatgcccaggaaatggtcgagaagttgtcggcccacctgatcgaggagaactcagaagacgcgctctacaagaatcgagaggatctgcggacgctacctaggcgatccatgcttgaagtagcccagttcacaaagaccgtggtgcatgaccagccagggataccgccggagaccctcaacaaggtcgtcaaagcggttatcaagattcagaaggcacgaagcggttcaagtttccttgacaagctgatgcagctggatgagcacgacatcgacgggctggatcgattgctaggacagtggactgtggaggatgcgctcacggttctggatgagatcgacagtcgtttgtccatcattgccgccatggagaagctcagcggcgacccggaagctgacgagttgcatacccttcatccgctcgtgacgcaggcgcgttggctatttgggccggagttcgacagttcggagtatgcatcgaacaacaccctgcgaacagtcgccaccagtctattcaaagcgagaaagcagaatcagacctttgctaatgctgcgaagcgccccgacatcgtcgtcctctccgatgccactctctcaatcgtcgggacggaaagttttgataccggcaaggatcagctcgtgatgatgcgcgatgtcctgctcatcgagttgaaaaaagggcgttctgaaatcggtcgcaaagaaatgaatcaggcggcagagtatgtcgatgaacttgtctccagcggaggcatacagggtgggcctttcttccatgccttcgtggtcggccattcggtcgcatccaatatcccaactgtcaataaccgggaatacaacggagcccagcgcggacgggtaacagcgaccacttacaaccagctcgcattgacagcaaaccggcgcctccatgggctaaaggcaagaataccctcacggtacgaggaggtttctggttacgagcttgtccagaaagtcatggggacgccaagccaagcatcgttcgctccgctggcagagtag

SEQ ID NO: 500156 - DNA, 1248 bp, Stenotrophomonas maltophilia
gtggtgttcttcccaaacggccgttcttgctgggaagtgaatgcgtacctagttcattgccgacgccttgggctgacggtaggtacgatatccacctatgcgagtgagctaagcctgctggtacgatttctgtacttgcgtcgcctggagctgagagagatcgatgatgatcatctgatcgagtttgctgattggctggtggttcgggatgagtccagcgcaaggcacatcaatcgtatcctctcacgtgttctcgctttcattggctgggccgaatgtatcagtctcggccctttccagatcggccggcttggtgagcaggcgattatcacggttgaaaggcgcgtggtgaggacgaaacggctggaccgggtgtcctcggacaggcatgcagcgatgcttccaagtggtgcaaagcgagtcgtacgaccaatgcctcttgaggtatttcgccgactcctggcgcagtgcgagcgaagcgcgaagcgcaccttcgtaaagagtcgcaatcgcgcgatgctcctgatactcgcggataccgggatcaggcgcgaagagcttgtttggatcagggtcaccgatgtacttgatgcatcgaagggtgatggcatgctgaaggtgcggacctcgaagaggagggggaaccctatacgtctggttcctgttcccgcactaactttgcaggaggtcatgaagtacatcagggtgcaacgggaaatgcatatgcgccgccataccaagtccggacgggggagtcgcgacaagggttgggtcttctgctctcagagcggttcaaggctagctgctgcaacggtgagccagactttctcggatctgcgggcgcttgccggagtttcagagcgcgctacggctcatatgcttcgacacaggtacataactcttcaggtcatcgatcggatcaagaggcttcgaaacattgggattcttggcgttgaggcagcagcaacggtactcgcacaggtggcttctttaagcggccactccaatcctactagcatgtgggactacattgactgggcctatcaggaaatggcctcggatgccgagaaccgcgggaccttggagattggcgagctcatccgggaactggaggtttttggtgaagcggcgatagaaagctccgaagggagagccctgcttagccgagttcgtagcgcacttgcttcgcagcttgagaaggctccgaaactgggtgtactcgcccaccaagggatggggctgggatga

SEQ ID NO: 500157 - DNA, 855 bp, Stenotrophomonas maltophilia
atgacaggtactgatttggaaccctatcggttgttccctttggttctcggactgatccgaatccatctaggtgtttgctttggacttgtggccttgtttgcttgtgcaaggagatccgagatcattgacatggggttgcatgcgctcctgacatctgatggtcgctaccacttgacgattcaccaggcaaagcggggggaagggaacgagaggccgaggtttgacaagcctgtgccacgtatcgttgccatggcgatatcgatcatgaacaatctcaggacgcaactacttcgggtgatgcccagggaggattcgttgctggatgatcgcgtgatgttcttcgtcggaatgcagggcatcaggccattcagtgagaatcatccgcgcgtcgttctccagctcataagtgactactttgatctccgtggccccgacggaaagcgatgggtgcttgagcctcatcaactgcgaaggagctttgctatgacattctttcattcggagggggaagagtcatctctacctgcgctcgcgtggctcatgggtcatcatgatgtcgaggagacttggagatacgtgaaggagtctatgacgggcaaggagatcagtcatgcagaagcctgtttggcgatggcggctgtgaactcaggtgatggctcggaatctgcccaaaaattgaaggcgcttcttctcgagcacttcggaagcgacgatctcgctgttctcgatcatgatgatgtcttggagtatctggagatgctctctgaggagcgaaagatcagtgtcaagccgattcagattacaaccggcgatcgtagtacgttcacaatcctcatttcgcacagaggggaatga

SEQ ID NO: 500158 - DNA, 1080 bp, Stenotrophomonas maltophilia
atggctcaacttccctcggaggtcctgtccttcttcagtcggacccaaaccggtttgagcccattagtgcgtccgtggtggctgaaatccgcggtccacgaatctgtatggagagttgagacgggaaagagagatctgcgccaagtcggtgagaagagtcgcggtgggcaggttctgagatgggatctactgctaccaacgggacgattgagcacatcatctcacgcagttatctgtgaacaatgtaaggcgttgatcatcgccgtagcgaaggtacgtggatcaacccggtcgctcagatcagttcatggcgcactgtttctcttcgcagagttcttggcccttaagtacgaagagaagttcctgcgtgacggactcctagtcgctcatctggacgacgtagaggcattcatggagtcctatgctgaggcggggtcttgcgggacggggcggttcattgagcgccttagctcttacctttcggctgagattccgttggaacggttagacgcggatgaggttaggaaccactttggcttgacggaaacaaaccagttgagtttggtcgccattggcgcggctatatcggtggactggcagaggctgcgcagtagtcccgcatttcggagccatctgacccagtacgggtaccgaggagaacgcgacttaagccgcggcgctcgtaccaccagcggctatgcggatatctttccgctactggctcaggcctcgcactccgtccagaccctaagcgcgtgggctttgagcaatgttcgcgaggttcgcgatgcttgccgaccttttcgcagagaacagtcgggccgcacggcgacattgccaccgaccgtctgtaggcagtttgttaggtcagcgtgtacgtggatgcttgaggaggcgcctgcattggaggctcaccttgcagggttgattgatgaaatcgcccaaagtggtgaccttggccaccggtcgccaactgcattgttgaaggatgcggaagcgctgattgaaaccggtccactagtacgctgttcgaggttcgtttcccagcgtttcagggagagaggggatgacaggtactga

SEQ ID NO: 500159 - DNA, 2085 bp, Stenotrophomonas maltophilia
atggcaactagaaagaagaagggtgtcggcgaggtccaaacgggcccggacggactttggatcacggtaagggcgatcggtcgggcgcatggagtagcgtcgattgacttcacatttcttcggagttggatcggacctcgcggtcaagccgcatttgtcgatgcaattgtcaagctatcaaggcgctacgtcgcggcccagaacacgtactcggttcgctgcgtccttcagttctggcaggccctcggtgcaagaagggggtggccggctccaagtcgtcgaatcagttccgctgccttggtcgcgcaactgtctgatcttcggggtgagttctacgcggccagagcggcggttggagtcgcgctaactacgatcacgaatcagtggaccagctttgttcgattcatcccctgtcttgttcagaccggtgcaatcaacttcgtcgaatcgaaattggctgccatctccgctccgcctcgcgcgctcatcattgcggatagggagcatgctgcaaactcaccagtgtgcctgaacaacgccccaaagactttgaactcggcacagaactcatacaacgacaatctcttcgagtcgatctcaatcgttgatggaagtgcagagtacctagatcgctatcaggaaaaacttgggaaggcagtaaacacgattctccactgcgcagtgaaggacttcgaggagttcgtggctcaacgagagagaggcttggctgaaattagccgtttcgacgtaggttcactacatgagcttaaggcgcatcgccgaggcggattctcccgagagaactgggggcacctgctgaatcaagagcgatatgagaagggtctcaggattgccttggggatatgcgtctttgatatgggcgggattcctaggcagcgacgcaaattcgatgtgaagtcgagcaaggcatccatcttagatgggtctagcagaatctgggacttcgtttcttcgttcggaaagaacgagctcctgccataccttggcatcatgagtagcaagcaggcggcagtctgcatactgatcctactcattgaacacccgattcttaacccagtggcgttgtacagggccaggatagaaagggatcgtcatggtggaacctacatctcctccgatggtcttgtcggaaaagggggtatccgctttagcgtggagaagctgcgtgcgggcgaggagaagagtgtggagctttcgcctcttgcccagcgagttcttgtgaaggtcttcgagtggaccgagcccgtacgtactcggatgatccaggaagggagaaggaaggatgcaaaccatctttggattggcatcagtagcctcgactaccgtttgaaagccttctcggagaaagcgttcctgaatgcacttggtgcatctgaagcttggcgcagtgtcaggggagccggcatggtcacccgggcaacgaacttcggggagcgccatgccgagctcgctccatggagagagaagctcacctacaagaatctacgaatgaactccggagtgctaaagttccttgaggcagatggtgatcttgtcgtagcggcgaggatatttggccaccgatcggtcaagacgaccttggggcactacgtcccaaatgcccttcgcatcgccttgtttgagaggcaggttaggcggcaccagaacagactgatcgttcaagcattttctgatcacgagcggcttcttgaagtgtcggatttctcgacggttgaggacctccacctgttcctctcgggtagcgcggacgaggctgctgaagctcaggttccccgccgtgtgtacaaggccgcttctcctggcgcgggactgatcctctgtaaggatcctgatgcgctggcggttgcaatgctctaccgggatcgcttggaaagcgccagtgcgaccttcctggatcgacctgatctccggaccggagttgccccgcgattctggagagactttgtggatgcgctgaccgcgccattgcccccggcattgattgagatcactgatcttgtcgagtgtgcattggctagaaagactgtcatcatttctcgcattcggctgccggagatccggtga

SEQ ID NO: 500160 - DNA, 306 bp, Stenotrophomonas maltophilia
atgcagatgaagacacgcatgaagaatggacgccagcgtgcacgtgcgcgcgcagaccagaccccgctctcggttgccgccatccgcaaggtggtgctgtccgtgcatacgcgcagccacgactatggcgacgatgccgatatcgccgagttgctgcccgagctggccgcattcggcatcaccacggtgaaaccgctgcggctgttgatgaagaggcaccgacgcgcgctgctgcaggaggaacggatcgtcatgcgccgcgcagagacgctgcatctgcgcaccgagggcggctcggtggcatag

SEQ ID NO: 500161 - DNA, 1080 bp, Stenotrophomonas maltophilia
atgcgcatgaccgccgctgtgctgggaacgatgctgatgtgcctggcgaccaccgcggctgcccgcgaatccagggcggccggcgagcgccatggcacgacgtcggcggccggcgccgccgtgcgcgacgcgcagcaccgagacaccctgcgctacacggtctggtaccccgcacaggccggcagccgggaaaccgcgctgaccctcggaccacccgatgcgccgctgttcgacgtcggccgtgccgcaatggatgcgccggtggtgggtgatcgcctgccgaccctgctgctctcgcatggcaacggcggcagcgcgcgcatgatgggctggttgggcacggcgctggcgcggaacggttatctggtgatcgcggtcgatcatcccggcaacaacggtgccgacgagatgaccctgcccggcagcgtgctgacctggctgcgcgcggatgatctgcgcgccgcgctggtggcagtacaggctgatcccgtgctcggtccccacgtcgacgccgagcgtctgggtgtcgtcggattctccgccggtggctacaccgcgctgctggccgccggtgcacgaccggacctgcaacgactgctggccttctgcaccacgcatccggatgacggtgtctgccggccccaacaggaagccgccacgcacacgatggaagcccgtattaccgctgcaagctcgccggaactgttgccatggatctcccgcgccaacgaatcgcgcgcgatccccggcgtgcgcgcggtattcctgctggcgccagcgatcgtgcaggcatttgcgcccgagcagctgtcctcgttgcggcagccggtttcgatcgtgctgggcgaagcggacgcggttgcacctccacagagcaatggcgcggccgccggggccctgattccgggcgcggaactgcagcgcttggccgatgtgggccactatgatttcctggccgcgtgcacagagaccgggcagcagcagctgcaggacctgtgcactacgtcggtgccaaaggcacagacccacgcgcaggcattggatgcagcgatacggttcttcgaccattcactgcgctag

SEQ ID NO: 500162 - DNA, 1374 bp, Stenotrophomonas maltophilia
atgaccgagcccgcaacgccccccgagcacctgcgccgcagcctgtccaaccgccacctgcaactgatcgccatcggtggtgccatcggcaccggcctgttcatgggctcaggcaagaccatcagcctggccggcccgtccatcgtcttcgtttacctgatcatcggcgcgatgctgttcttcgtgatgcgcgcgatgggcgagctgctgctgtccaacctgcagtacaaatccttcatcgatttctccaccgatctgctcggcccctgggccggcttcttctgtggatggacgtactggttctgctggatcgtcaccgccattgccgatgtgatcgccattgccgcctacgcgcagttctggttccccgggcttgacgcctggaagccggcgctggcgtgcgtgatgctgctgctgtcgttgaacctggtgacggtgaagctgttcggcgaaatggaattctggttcgcgctgatcaagatcgtggcgatctgcgcgctgatcatcaccggcgccgggctggtggcgtggggcttcacctcgcccagcggccacacggcgtcgctgtcgaacctgtggaacgacggcggcatgttcccgatgggcctggtcggtttcttcgccggcttccagattgcggtgttcgccttcgtcggcatcgagctggtcggcaccaccgccgccgaaaccgccgaccccgagcgcaacctgcccaaggcgatcaactcgatcccggtgcgcatcatcatcttctacgtgctggcgctgatcgcgatcatggccgtcaccccgtggcgccaggtggtgccggacaagagcccgttcgtgcagctgttcgtgctcgccggcatccctgccgccgccagcctgatcaatttcgtggtgctgacctcggccacgtcctcggccaacagcggcatcttctccaccagccgcatgttgtacggcctggccgaagagggccacgccccgcgcgggttgtcgaagttgtcacgcgccgccgtgccggcccgtggcctgctgttctcgtgcctgtgcctgctcggtggcacgctgctgatctacctgattccgaacctggtgaccgccttcaccctggtgacgacgctggcgacggtgctgttcatcttcgtctggtcgctgattctggtggcctacatggcctatcgccgtcgctacccggagcgccatgccgcatcgatcttcaagatgcccggcggtgttgccatgtgctgggcctgcctggtgttcttcgccgccgtgctggtgctgctgagcctgcaggccgacacccgccaggcgttgatcgccagcccggtgtggttcgtgctgctgggcgtggggtattgggtgcgccgcaggaccgcaaagtag

SEQ ID NO: 500163 - DNA, 2061 bp, Stenotrophomonas maltophilia
atgagccacgcggcgcccggcatccgccagctcaccttctcggtcctgcgcgcactgttccgtgccctgccgatgcctgcgtcgctgcgtgatcggctgcgcaaccggggcctggatcgcattggcagctggagtccccctccgccgcgtggtcgcatcggcgccgctgccgacggtacccgtccactgcagcgcgccgatgaacgggcgatcggctacgccgccgaagatgacgcgccattgcctgccacgctgccagctacgctggtggccttctatctgccccagttccatccgttcgaagagaacgatgcctggtggggcaagggcttcactgaatggcgaaatgtcagccgcgccctgccccagttcgagggccatgtacagccacgcctgcccggcgacctgggcttctatgaccttcgtgttggcgagacgctgcgggcgcaggccaaactcgctgcagaccatggcatcggcgctttctgcttctacttctactggttcagcggccacacgctgatggagcggccgctgcggcagtggttggccgacagcacgatcgagctgccgttctgcctgtgttgggccaacgagaactggacccggcgctgggatgggcgcaaccaggacgtactgatcggccaacagcacagtgccgaggatgatctggcgttcatcgcccacgttgccgattacctgcgcgaccggcgtgcgttgaagatcgagggacgaccggtgttgctgctgtaccggccacagttgctgcccgaccccaaggccacggcggcgcgctggcgtggctggtgccgtgaaaatggcatcggcgagatccatctggcctacgtgcagagtttcgaacgcccggacccccgcgacatcggcttcgatgccgcggtggagttcccaccgaatattgccgccccacgccagctgaacaccacgcagttcctgctcaatcccgattacgaaggcgacgtgcgtgactggcgtgagctggcgacacagatgcgccgtgcaccactggcggactatccgttgtatccaggtgtcaacccgggctgggacaacgaagcgcgccgcccgggacgcggccgcgtgctgcttcacgcgtcgccgcgtggctacagcgactggttgcacgacacggtgcaccagcgcctgcgtgatgtggcgcctgctcggcgcctggtattcatcaatgcctggaacgaatgggccgaaagcgctgttcttgaacccgatgcccgtctcggccatgcctggctgcaagccacccggcgcgcgctgttcccctcgcaggccgctccgtcgcgtccctgcatcgtcatccacgcgtggtacctggatgccctgccggagctgttgcaggcagtgaaggacagcgggctacaggcacgcctggtcatcaccaccacaggcgagcgtcaggcacaggtgcagtcgatcatcgatgcgcagggcctgaccgctgagatctgggtctacgacaaccacggccgggacgtcctgccgttcctgcacgccgccgaccgattgctgcagcagaacgaatcgctggtgctgaagctgcacaccaagcgctccacccaccgcgacaatggtgaccagtggcggcgcgagatggtcgatgcgctgctgggcactgcgcaggctgcggcgaacctggcccatctgctggcaaatcccagcatcggcctgatggctccggcgggccacctgctgaaggtagccgactacatcggcggcaatgcgcagcgcatggagcggctgtgggcattgctgggcctggacagcgcgcccggtgacgggcagttcgcgtccggcagcatgttctgggtacgcctgccggcgctgcgcccgctgctcgatgcccatctgctgccgagcatgttcgacactgaagcggggcagatcgatggcacgctggcgcatgccatcgaacgtgcgactggagccgtagtgtccgctgccgggttcaccgtggccgacacctccgaggtggaaggcgctcccccgcgcgcttcctcctcggaatatgcttacgcccgaaagcgctga

SEQ ID NO: 500164 - DNA, 3351 bp, Stenotrophomonas maltophilia
atggccggccccatgcccggcccaccctcattgatggcccagacctacaccgaagaagacctgctccgctggatggacgcgtggacactggaaaagagcgaacgttgcctgtccggtgtccgcaacatgcatctgaccagtggaatgctcatcgccgaagtgaaaggctcggccagatatccctaccgggtggaaatcgatctggaagccagcctgcgccatcctcgcagccgcctgcaaagtgaatgctcgtgccctgtcggccgtcactgcaagcacgtggcagccgtgctggtcgcccacatgctggacgcagcagacctgggcgatgacgatccagcgtcggagcacgaaccggtccagtcgccacgccgcgaactgctggaacagctgtcacgctggcagtccgtcagaacccagcctccccggtcacgtagaagcggcatcatcttcgagctgtccacgttcaatcaccggccttccatcctgctccgccgcgtcaaatacgccctcgacgatacgatcgagttcgacaagtggcaggaaatcacccctcagctgttgctggaaccgcccgcctacctgacgcaggccgacctggccgcggtggcgcagctgtgggccctgcatcagtcggtaaaaccgccggagtggttcgacgtcggcacgatcctgcagtcgatcgtgtccagcgggcatggctgggtgtcatgtggcatgcatgatcgcgtgccggccaggcccggcgcaccacgtcgcggtacgttggggtggagcgcagagacgactcacggcaggttgctgctggcgccgacactgagcgtggaaggcgatgcggacggcctcgtactgggatctagtgccggttacctggatccggtctccggtgaagtcggccttctcttgctggacgtcaagccggaggacgcggacgcgtttctcgcccttccccacctgctccccgatgaggaaccgatcgtggcgcaactgctgcaacagatcgaccccgcgctgccgcgccccggtgcaggcgacacactgcctacgctgcagatcagcgccatgacccccgtgctgcgcctgcatacgatcaaattccggccgccgtggctcggcccccgcgacccttcgcaatgggccgatatcgcaaccgtggccttcgagtacgacgagcacgtgcggttcctggatgatccgagcctgttcgcccacgatccggagggccaactcgcactgctgccccgcgacctgggtgaggaatcacggcgcgaggccgagctgcgcacggtgggcttgcatcgcgacacggctccgcgggcgccactggaaggcgccggcccgcagttccagctgcgtacccatgactggacacggttcctgctggacgacgtgccgcgcctggaagccttgggctggaaggtggaggcggacgaggatttccgccatcgcatcacccgggtggaggagatcgacctggacatccaggcggacccggaagacgcgggctggttcaacctgggcctggacatccaggtggaaggccgcgatgtgtcgatggttccgctgctgcagcaggtgctgcaggccgaccctcgctggatgcgtggccagctggatgacatcggcgacgacgagaacatcctgttgacgacgggcgacaacacgcgcctggcactgcgggccgcacgactcaagccgatcatggccctgttggcggacctgtttacccagcgtggcgcgccgctgcgcctgtctgcgcttgaccgtggccgcctgcaggcgctgcaggacactgcgcgcctgcagttccgtggccgcaaggatacccaggcgctcgtgcagcggctgatgcaggcacccgcaccgagcgaagtaccgccgccggcagggctggaggcaacgcttcgcccctatcagctcgagggcctgtcgtggctgcagtacctgcgccagcagggcttgggcggcgtgctggccgatgacatggggctgggcaagactctgcagaccctggcgcatctgctggtcgagaaggaaagtggccgcctggaccagccggcgctgctggtggtgccgacctcgctgctgcacaactggcagagcgaagcggcacgcttcacccctgccctgcgtgtgctgaccctgcatggaccggcacgtgaagcgctgttcgaggccatccccgaacacgatcttgtactgaccacgtaccccctgctgtggcgcgacgagcaggcgctgcaggcatatgcctaccatctgctgattctggatgaagcccagcaggtgaagaatccgaaatcacgcgctgccgtcaccctgcgcacgttgcaggcccgccatcgcctgtgtctgaccggcacgccgctggaaaaccacctgggcgaactgtggacgcagttcgatttcctgctgcctggcctgctcggcaccgagaagcagttcaaccagcattggcgccaccccatcgaacgcggcagcgaccatcgccgtgcccagctgctggcgcagcggttgcgcccgttcatcctgcgccgacgcaaggaccaggtcgcgtcggagcttccgcccaagaccctcattacccgtgcggtcgaaatggagggcggccagcgtgatctctatgaaaccgtgcgtgcagcgatggaaaagcaggtgcgtgaggccatcagcggcagcgggctggcgcgcagccatatcgtggtgctggatgcattgctgaaactgcgccaggtctgctgcgatccgcgcctgctgccgggcaacgcaccggcacgggctgcaggctcggccaaactggatctgttgcgcgagatgctgccgccgatggtcgaggaaggtcgtcgcatcctggtgttctcgcagttcaccggcatgctgtcgctgatcgcgcaggcgctggacgatctgggactggcctatgtgaccctgaccggtgatacccaggaccgggccacgccggtgcagcgtttcatgcagggtgaaatcccggtgttcctgatcagcctcaaggcaggtggcgtggggttgaacctgaccgcggccgacaccgtcatccatttcgatccctggtggaatcccgctgccgagaaccaggccagtgaccgcgctcaccggatcggccagcagcagccggtgttcgtctaccggttgatcactgcaggcagcatcgaagagcggattgccgagctgcaggagcgcaaggctctgctggccgaatcgattctcgaaggcggtggcagcgccgggccgcgcttcagcgaagaagacgtgcaggcactgctggcgccactgccgggcctgtcggccaaacgcacccgcaggccgggccggcggccgccgcagcactga

SEQ ID NO: 500165 - DNA, 1416 bp, Stenotrophomonas maltophilia
atggattcaccatcgcgcggcgcattcatcgtcgacgagaaggatttcatgagcggactgtccacagcgcccgttgcaaggaatgaaggggccccactggctgtggccgctggtgtggcagtgaccgcgttgctggtgcgcctgctgtacgtgcagttcttcagcacgccgatgcctttctgggaccagtgggacggcgagggtgccaccgcgctgcagccctggttgaacgggacgctgcagtggagcacgctgctgacgccgcacaacgagcatcgcatcctgccgacgcgcctggttgcgctggtgtcctatctggtcaccgggcagtggaacaacgtctacgaagcgcgcatcagcgcgctcgtgttctgcttcattccagcgctgctggtctggtacgcgctgcgtgacgccgcagcggccaacggacaccgactgctcgtcgccttcgcactgctcatgtcggtcctgccgtttgcctggcagaacttcctggtcgggttccagagccagttctactttctgatcctgtccagcatcgttgccattgggctggccgcgcggcaccaccagcgcattccggcgctgctggcatccaccgcgctgagcgtgctggccgccaccaccatggcctcgggcatgctgaccgccgtcgcggtcggcatcacctgcctgatcgcctgcctgtgcctgccgggcaggcgtgccccggcactctgcgcgacggcggtactggccgttctggctgtcgttgcctatcgcgtgattccggtcattgatggccacggcatgctgcgcgcacagtcgctggccgagctgctgctggcggcgacgcatgcgctggcatggccggcgcgctcgaactgggcggtcatcatcgtctggttgcccggcgcggtgatgattgcgcgcatgctgctgcgtcgacaggcgagcagaaccgatctggtgatggcgggcctgtgcatctggacggcgctgcagggcgtggcgatcgcttacggacgcggccatgagatgcgtgttcctgcgtcgcgctataccgaactgttcgtgcctgggctgttcgccaacgcctggttcgcactgcggctctggaacctgctgccggcgtcgcggatgcgtggcgccgcgcgtaccgccgtggcccttttcgcgctgctggtggtggtggcgccgctgagccaggtaggcaaggatttccagaggatccgcgagttcgctgcggcctgtcggctacagcaggaaaacgtcatccgctatctggtcaccggcgatccggctgcgctgcaggtgggcgagttcgagttgccgtacccggatgcggggaagctgaaggcgcagctggacgacccgaagctgcgcgcgatcctgccggtgaatcccgccaggccggcgcccggcgaccgatga

SEQ ID NO: 500166 - DNA, 1689 bp, Stenotrophomonas maltophilia
atgcacccctttctcggtctgccggacctgttctacgtcgcggccacgttcgcaatggaactggcactgatcgagctcatcacgcagcttgcactggatattcgaaaccgtgtggcgaaagccactgcgctgttgattccggccgcgatgggttcgatctacatcgcccagatgtattcgatctggatttccggcggcctgattccccccatcgcgcttgccaatcgagaggttgcgggcctgatcgcgttcaacggcatctacgccttgttgggcagctatcttgcggcattcgcggcgcatgcctatcgataccgcggtgtagcatcacgctactccaggcgcggcatcttcgcctgcgtcggcatcctggccatcgcctacgccggcatgatccacaagcagccgctggctcgcggcattaccgtcgcacgcggcgaatcacccgtgtcctcactggttcactccatgatcatgtacgcgggaatgagctcgcagacacgactcagcagcagcgagctcactgccgtccggacgcagttttcacggcgcaccgtctacgagcagggctttcccgaggacatgatcgccggtctgccgccgcgccccaacgtcattgtcctttttaccgaaggcatgtcggcacgctggatgggcagctacggcggagcctatgccgacctgatgccgaacctggatcgatttgccggtggatcgctgatggtgcgcaactactacaaccatacagcagccacgttccgcggcctgcgcgggcagttgacgtctggccaccaggaaatcgatggattctacgaggatggcaccggcatcggccaacgcgatgtttcccgcgagattaccgcgatatcgcgcgccagccttcccgacgtgctgcgctcgcatcagtaccacagcctgttcttcctgtcgcagcaggcattcctcaacaacatgatcgaaacgttgggcttcgacgcgacactgggcagggactacctgttcgacaaacacctgcgcaccacgccggacgaggaacggccgaagtatctttccgatccgcaattgttcagcgcgatgctcgatgagctggaggcacagccccgggacaggccgttcttcgccgcggcctacaacttccagacgcatgcgttccttgatggcgagcagaagtacggtgacggggggaatcaggtactgaaccgattccacacctacgaccacaacatcggcgacttcctgcagcgattcatggccagccgcctgcacgagaacacggtgctggtgatcactgccgaccactcgaccttccccgatccgccggcacagcaggccgacccggatgtcggcggctacttcatcgatccgattccactggtgatctactggaagggtgtcgagcaccgcaagatcaatgccgactacaagaattcactggattttgccccgaccttgttgagcctgcttggcatacggaacgccaacaccctgttcctgggctgcaccttcttcgaagagtgcgcgctggatcggatctccagcatgggcaaggacgagtattacctcacgcgcaatggtctggtctacgcccggcccaatgtacccgaggcggacgttgccgccttcgaagcgggtaccgaactgatcgaccgctacaaggccatggatctggtaatcggcgccgccgaatag

SEQ ID NO: 500167 - DNA, 960 bp, Stenotrophomonas maltophilia
atgctttccgccacaaccaggccgatccgccgcggacgggccctggcctggctgaccttggtagccggcatctatctgctggggctgtggtatgtcgaccgggacaagcagatcctgacccgcctgcaggcgctggcactccccttgtgtggctgcgtggccctggtgctggccagttacgggttccgccacctgcggtggcacatgctgctgcgggcacagggccagcccacgggctggcgtgccggcctgctcgcctatctcgccggctttgcgttcaccgcctcccccggcaaggccggggagcttctgcgcatccgctatttttcccgcttgggggttcccgcgcaggtcacgctgaccactttcatctacgagcgagcgctggatctactggtgatcactgcactgagcctgggcgcagcgcatctgatccccctctttggcgtgctcgctaccgtcgtgctgtgcctggtgctggccctgtgtctggttgcctgcctttccccgctgcagcgcgcggccatcgcggtgatcgaccggctccccggccagccggtgcgcaggctggcgcgctttctggtggcgggtaccacctcactgcgcccgctgttgcgtcccgggctgaccgcagccagcaccgcctgtggcctggcggcctggctactgacctcggcggctttcgcctggctgtgctacgcgctggggatcgttctgccttggcagtacgcgctggccatctacccgctggcgatgctgatcggcgcgctttccttcgttcccggcggggtgggcaccaccgaggcagcgatcgtgctcatgctggccgcatccggtgcggacctggatacggcgctggctgcggctatcggtatacgcctggccagcctgtggttggcggtggcggtcgggatggccgcgacggttgcgctggaggcgcgcacgcctgccaccgcttga

SEQ ID NO: 500168 - DNA, 1011 bp, Stenotrophomonas maltophilia
gtgactgcatccgtttcagccttcatctccgtcgtgtacgtgatacggaatcacgacgcgcacttggcgtcgctgctctcggagaccgtgacccgcctcggggcactggccaccgactatgaactcgtcgtggtggacaatggatccaccgatgggagcatcgctcgcctgcgggagctcacccgcgaaggcggcctgcccaacctgcaggtctatgcactgacccagagcgttgcctgggaaacagcggcctgggcaggcatcgaaagcgcgctcggcgatttcatcgccgttcttgaccccctgaccgatgatgtttcgatcctcccacagttgttggaggctgcagtcacgggaacggatgtggtctttgccaacaatcaggcccgccctcgtctgggcctcgcataccggctggccaatgccgtattcaatcaggccttccgctggctcaacggcgttgaccccggagcggaggccccgcagtacagagtgatgagcaagaaggtcgtcaactacatcctgcaacatcctcgaccagccgccatctatcgcctgttgcccgtcactgcaggcttcacccggaccaacgtgacgtaccggcacgagcccagaacggccccggaaaagaagcttgggcagagcatcgatagaggcatgcgcctgctggtgtcgagcacccggctccccatgcgactggtgaccatgctgtcgaccttcggcgcactggccaacctgctctattccgtctatgtcctggccatcgcaatcttcaaggccgacgttgcaccgggatgggtcagcctttcgttgcaacaatccgggatgttcctgttgatctctcttgtactgctggtgctgggcgagtacatcctgcacatggccgcactcagcaacgaggggccgtccttccatgtcgcccaggaattcaccagcgcacgccttgaacgccttgagcgcgtcaacgtagagcgcgctgcgggcatgcctggaccgcccgggcgtgcctga

SEQ ID NO: 500169 - DNA, 1149 bp, Stenotrophomonas maltophilia
gtgcctgagaccctgccactggacgccgatgcgatcatcatcggtggaggcttctatggcgccgtggttgccagctatctcgccaccgagaggggggtgggccgggtcattctgatagaacgtgaaccccgattgatgcaacgcgcctcgttttccaaccaggcacgcgtccataatggctaccactatccccgcagcttcaccacggcctatcgcagcagggtgaacctgccccgattcatgcgggaatgggagtcagcggtgcattccgacttcctgaaggtctatgccatcgcccgccgcaactcgaaggtcacggcctcccagttcgtgcgcttctgccgcacgatcgacgcccctctggaaccggcaccggcgtcactggcgacgttgttcaacccgcacctgatcgaacgggcgttcatcgcgcaggagtacagcttcgattccgagcgcatccgccagttgcttgaagccaagctggcaggcgccggcgtgcacctgggcatgggatacgaagcgactgccgtacagaaggaaaacgatgcgatacgcgtgtgcctgcgtagcactgaaggcagcgtcaccacatccatggcggccaagcaggtcttcaactgcacctacgcagggctcaacctgatcagtggcccacagggtcacagccacgcctcgctcaagcatgaaatcaccgaaatggcgttgatccagcttcctcccgcgctggaggggctgggcatcacggtcatggacgggccctttttctccatcatgcccttccccgcgcgccagtccagcacgctgtcccacgtgcgctacacgccccatacggcctggatcgacacgccggcgcgcaatccctacgtcgaacttgaatcccatgcccgttcaagccggttcgattacatgctccgggatgccgcccgctatctcccgagtgtttcgaaggccgtgcatcagcaatcgttgttcgaaataaaaacggtcttggtgaagaacgaaggcgacgatggccgcccgattctgttcgagtcgtatccccagctgccagggtactcaacaatactgggtgggaagatcgacaatatctacgacgtgatcggccatctggatacgatctccttccccccccctccccggggagggtga

SEQ ID NO: 500170 - DNA, 783 bp, Stenotrophomonas maltophilia
atgtctcacgcactcatcggccataccggcttcgtgggttccaccctgaagcgtcagacacggttcgagcatctgttcaatagaagcaatatcaaggaggtcgcggcccaggcctaccacacggtggtctgctcggccgcgcccgcgcagaagtggatcgccaaccgcgaaccggaagccgactggaggaacatccaggcactcatcaaggcgctggatgcgatcacctgcgaccatctcacgttgatcagcacggttgacgtattcgccaacccgatcggcgttgacgaatcgacgcaggtcatgacggccgggttgcatccctatggcctgcatcggcgccggctggaagagttcgtggaatcacgattcaggtccaggatgatcgttcgcctcccaggcctggtcggcccaggcctgcgcaagaacatcatcttcgacctgcacaacgacaacaatgtgcacgccatcgacagccgtgcccagttccagttctatcccatggtgaatctcagcgcggatcttctggctgcgcgacagcaggaccttgaactgatccatctgaccagcgccccgataagcgtcggcgagatcgcccgcgaggtgttcggcctgcagttcgatggcacgtccgactgcccgcctgcccgctacgacatgctcagccgacatgcccgggacgcgcagggaaaccctggctaccactatgatcggagcgccacgctcacggccatccgcgcctaccatcagaccgaacctgcgactgcggtgctggcaccatga

SEQ ID NO: 500171 - DNA, 831 bp, Stenotrophomonas maltophilia
atgagcatctcgatctccaacatcgcgtggaatccagatgaggatgacgctgtcgggcggctgcttgccgaccttggcgttcgccatatcgacgttgctcccagcaagtacttcccggtgtttgcagaagccagcgacgcggctgtcgccaaggtcaggcgcttctgggaagcgctcggcatcgacatcatcggaatgcaatcgctgctgttcggcacagaaggcctgaacgtctttgcttcagtcgatgtccagctgcgcttgcttgagcatcttcgccatgtgttccggatcggatcgggcctgggtgcgacacgcgcggtctttggctcgccgcgcaatcgcgaccgcggctccctgccactgcagcgggccaacgaagctggcgcggctttcttccatcgcgtgggtgaagccgcccgactggagggcatcaccctgtgccttgagcccaatcccgaatgctatggcgcgaacttcatgacgcataccgaagcgactgccgaagtcgtgcgcctgacagggcactcgcacgtcaggatgcagttcgacaccggttcaatcttcatcaacggagaagagccggcacagctgctgcagcggcacgccgacataatcggccatgtccatctgagcgagccaggacttgcacctttgggtacgcgggacaccaatcatgcagagatggcaattctattgcgccgacacatgggcgacataccgctgacgatcgagatgctgcgcccagccgagggcgagcatgcgatcagggcgtccttgcaattcgtgctcgatcactatcgaccccagtctattggagcatcgccatga

SEQ ID NO: 500172 - DNA, 360 bp, Stenotrophomonas maltophilia
atgaacaagtggctgatcctggtcgtcggcatcctatgcaatgcgggcgcaagcgccctcatcaaggttgcggtaagcgcgccgaggcagttcccctcactcaccgatccgatgggggccctgcgcaattggcccttctggacgggcctgtccctgtacggcggcgccttcctgctctactccatgtcactggcacgccttccgctcaatgttgcccacccgatctcaacggcaggtgccattgccctggtggcttgcgtttcagtgatcgcgttccgggagccgatgccatggacaaccgtggcaggcattgcattgatactctccggcgttgtcctgattaccgttcacgccccctga

SEQ ID NO: 500173 - DNA, 837 bp, Stenotrophomonas maltophilia
atgaccactcccatcacgcccccaagcccggctggacacagcgcggattggcaggtacctgccttcacgaagacacttctgcaaagcaagtgccacgatcatgccgttgtcattcccgtgatcaacgagggcgagcggatccgcgcactgctgtcccggatgcatgagatcggcactgcctccatcgccgacatcatcatcgttgacggtggaagcagcgacggctccctggatgagacctttctgcggagctgcggtgtcactggactgctcgtgaagaccggccccggtcggctcagcgcgcaattgcgctgcgcctatgctttctgtctcgctgcgggctaccgcggagtggtcaccatcgatggcaacaacaaggacgagccctcccccatccaccgcttcatcgaagcactcgaacagggcgtggacttcgtgcaggcctcgcgcttcatagcggggggtgtggccgagaatacccccttattgcgccatgccgcgatccggcttgtccatgcgccgctgctgagcctgttttccggcttccactggaccgataccacccagggcttccgcgcctacagccgggcactgctggaacacccggacgtgggcaccttccgcgatgtattcaacggatacgaactgttggcctacctttcctatcgcgcgccccgccttggcttccgttgccaggaactacccacggcacgccgctatccggagggagaggtcccgaccaagatcagcagcgtaaggggcaacctgcagattctgcgtgtattgcttgcggcgatctccggccgctacaacccgccgatcgggcacaaaccatga

SEQ ID NO: 500174 - DNA, 1932 bp, Stenotrophomonas maltophilia
atgatgattcgtgcaatccggaaccatttcaccgaccccgcggccactgcggcatgggttgtctttaccatatcgatggcagcgctggtggcctaccagctcaggctgctcaacttcagcgaatttgccgatgagaccgaaaccatcgttgccgcaaagatgatggttgcaggcagcagtctctatcgggaaattttcaaccatcatggcccgcttacgttcctgccgggcatgttggtcgagttggcgggcggccactccatagccgcacatcgcgcgctgattgccatattgcagctggtctcccttgccgcattgctgttttctccactgatccggaaccagcatgcaatcgtgcgtgtgacctacacgctgcttattgccaccatctatgcggggatattgccggctgggctcgggcacacttattcctaccaggtgctctgtggaatcatgctcagcgtagcgttctcgacctggttgctccctcagatagcaggagagcttcgcgtcgggacggccaggaccattgtcggaggtgcgctggtcgcttcgatcccgtttcttgcgatcacatacattccggcagcgatggcgtttcttgtcgcatccgtgcacaaggacaactggcgcaaggtgctctgcgggtccgttgcagccatcgcgttcaacctcgtgttcctcgtgtggactggttccgtcaggggatacctcgccttccatgtctacctgaatgccgtactccttccacagtacaaccaggggcatggcctgctgatgctgattggaaacgccttccacgcagcaacatcggacctgggaggattgcttctgctgggcgtcatcgtgaccgcccttgcggctgtcgcgtgcaaacgtccagcgcttccctggcgtgagatcctggtcgcactggggctggggtcgatgctcattcgtggccttgatattcatggcctcagttatatctacgtcgcgctcaccatgcctctgctgctcctgcatctgatcccagcggggttcccccgtcagcacagtctgctgctggtgttgtgctgcatcctgacggctcgactgattgttggcggcgccaaggaagaccagttgctggtcgatcgcagaattccggaaacaaccgagtttgcgcagctcgcgcagaaactcaccgacccgggcgacagaatcctggcctattccttccagaactaccagtacctggccgcaggacggctccctgcctccggctactatttctatcttccgtggcagcggcagtacctagaccatccggtgctcggggtacgcattgatccgtgcatggacatcgaaaagacccggcccaagcttgtcatgctggatgagtggaaggtgtgggaaaagtacgactgggcaagctacggcgggtgcgtcatagacgcgatggcacgcgactacatccgcctgccccacacgcagtactacgtccgcaaggacgtagcggcaggcatcggagttcttgctcaggcggacgacaacctctctgtgagccctcccgtttccaagggggatcgctttgccatcgcccataccccggacaacacccacgagacgccccgacggattggcctgcgactggcaacctacgcgcgcagcaacccgggcgtggccgtactgacaaccccgctggcggacgggaccccatcggtcctggctacgctggacctgccgggcatcgaggacaacgcctatgcctacatggaggtgcccccgggtacaacggggcccctgtccttcgagataagggagggtgggggtatcagcttctgggaatcgcgaaagccggatgggacgacccaaccctgcattatcatcgagtacccatcgacgccccccgggcgaaccccgggctgcccccttgatctcaagcgtcttctgacggatgtgactccataa

SEQ ID NO: 500175 - DNA, 1425 bp, Stenotrophomonas maltophilia
atgcagaacgtgaccacatcccgcgccctctgcgtcgacctcgacggcaccctgctccgctcggacatcctgtacgaatcgttgttggcgctgctcgcccacaacccgctttacctgtttctgatcccgttctggctgctgcgcggcaaggcctacgtgaagcgccagctggcctcgcgggtgcagctgccggcggagacgctgccctacgacgagcgcgtgctggagatcctgcgcaccaccacgcagcgtccccgcgtgctgtgcaccgcctcggaccggctgctggtgcaacccatcgccgatcacctggggctgttcgaggaggtcatggccagtgacggccataccaacctgtccggcagcaacaagggccacgcgctggccgaacgcttcggcgagcgcggcttcgactacatgggcaacggccaggtcgacctgaaggtgtgggcgcatgccagtggcgcgatcgtggtcaacaacggtgcggggctcgtccgcgcggcgtccaggcagagcgaggtgctggcccatctgcccgcgcagaatggcaacctgctgacctggatcaaggccctgcgtgtctaccagtggctgaagaacctgctggtgctggtgccgctgctgaccgcacaccgcttcctggatccggccgccatcgccgatgccggcgttgccttcctggcctttggtctgtgcgcatccggcgtctacctgctcaacgacctgctggacctcaccccggatcgcatgcatccgcgcaagcgcaggcgtccgttcgcggcaggcacgctgccgttgctgcatggcctgctggtcgcgccgttgatcaccctggccggctttgcgctggccttcgtgtgcagtgccgagttcgcgctggtactgctctgctactacgtgatgaccctgagctattcactgaagctcaagcgcatcgtgatgattgacgtggtgatgctggccgcgctgtacaccgtgcgcatcatcggtggcgcagttgcgatcggctcggagctctcgttctggctgctggccttctcgatgttcgtgttcctcagcctggccatgctcaagcgctacacggaactggcatcggccctggccaatggcaaggagatggccatcggccgtggctactcggtggccgacctgccgctggtgcagtcgctcggcgcggctgcgggttacatcggcgttctggtgttcgcgctttacatcaacagcccggagagcctggagctgtacagcaatcccaagctgctgtggctgctgtgcccgatcctgctgtactggatcagccgcatgtggatcgtctcccaccgcggcgacatgcatgacgacccgatcgtgttcgctgccctggaccgcggcagccagatcgtcatcgcgctgtgcgtactgatcgtcctgatcgcgatatga

SEQ ID NO: 500176 - DNA, 1311 bp, Stenotrophomonas maltophilia
atgaccctggtcagcggctcatcctgggggcgttacccgcgcgtacaacaacgcgtcgtccctgtgctcgatcgtgaggatggcctgccgctgcctgaccatggcagcgtgctgccgcacggcaatggccgcagctacggcgacagttgcctgaacccggatgggaccctgctggccagccgggcgctggaccgcttcatcgccttcgacccggcaaccggcatcgtccgctgcgaagccggggcaaccttggccaacatcatcgacatcgccctgcccagcggctggttcctgccggttacccccggcacgcgctatgccacagtgggcggggccattggcaacgatgtgcatggcaagaaccatcatcgtgcgggcacgttcggccatcatatccgtcggctgcagctactgcgcagtgacggcacgcgactggaactggcacctggcgatgccagcggactgttcgaagcgaccgtaggcggtctcggtctgacaggcttcatcacctgggccgaactgcagctgcgacgcgtccccggcccctggatcgagaccgaatcgatccgcttcgacaacctcgatgagttcttcagcctgtcgcgggagtccgccagcggcttcgagtacaccgtggcctggatcgactgccttgccagtggcaagcatctgggccgcgggcatttcctgcgcggcgaccatgcgccgggcaatgcacaggccgctgcccccagctcggcgccacgccgcagcatgccggtggtaccgcccgtatcactggtcaaccgcctgactctgcgcccgttcaatacgctgtattactggcgccagccggcacgccgcgcgcgccacgtctcgcactaccagagctatttctatccgctggacggcatcaaccactggaaccgcatgtacggcccgcgcggcttcctgcagcaccagtgcgtgctgccgccggccatcgcgcacgatgccaccgcggcgctgctgggcgaaatcgcccgcagcggtcgcggctcgttcctggcggtgctgaaggagttcggcgaccggccctcaccgggcatgctctccttcccgcgcccgggtaccaccctggcgctggatttccccaacgacggcgccgacctgttgaagatgctcgaccgcctggaccgcatcgtcagcgaggccggcggcgctgtctatccggccaaggatgcgcgcatgtccggcgcgctgttccggcaggcctacccggcctgggaggccttctcccgccacatcgacccccgattctcgtccggcttctggcgccgggtgatggagtaa

SEQ ID NO: 500177 - DNA, 732 bp, Stenotrophomonas maltophilia
atgcagaagatcctgatcatcggcgccacctcggcgattgcagaagccgtcgcccgcctgtatgccgcccgcgcggctgcaatctatctggtcggtcgcaatgccggtcgattggacaccattgccgcagacctgcaggtgcgcggtgcgcagcgcgctgagtacggcgtgctcgacatcaacgatgtaggcgcgcacagtgcgctgctcgatgcggcctggaacgcgctgggcggtgtcgacaccgtgctcatcgcgcatggcaccctgcccgaccagtctgcctgcgatgcctcggtgaacctgtcgctgcgcgagttcgccaccaacggcacctccaccatcgccctgtccgctgcactggcgcagcgccttcagccgagtgccaccctggcggtcatttcctcggtggccggcgatcgtggacgcgccagcaactacctgtacggtagtgccaaggcagcggtgaccgcctacctcagcggccttggccagcgcctgcgccctgccggcgtcaacgtgctggtgatcaagccgggcttcgtcgatacaccgatgaccgcagccttcaagaagggcgccctgtgggcgaccccggagaaggtcgctgtgggcattatgaaggccatcggcaagcgcaaggccgtggcctacctgccggggttctggtgggcgatcatgatgatcatcaagaacattcctgaattcgttttccgcagaatcaagctctga

SEQ ID NO: 500178 - DNA, 672 bp, Stenotrophomonas maltophilia
atgcccgatatcgatcgcgacctagacgttctctatcagcaccgcttcccaaaggaagagctcgccaacaagaatcggatctggcaggtactgtgtggccagtacttcagtcgtttcgtggatccatccgatacagtggtcgacatcggcgcaggctactgcgaattcatcaacaacattccggcggcgggcaagatcgcggtcgacctcaatcccgatgtccgccagttcgccgctgatggcgtgcgcatcatcaacgagagctgcacggcggtggcttcgatacccgatgccagcgtcgatgccgtgttcatgagcaacttcctggaacaccttccgaccaaggatctcgtcctgcagaccttgcgcgagagcgcgcgcatgctcaaacccggtggccgtgcgatcattctgcagccgaacatccgcttcctgtacgacgaatactgggactatttcgatcatcacaccgcgctgagcgaccggagcctggtcgagggtgtgctgatggccggtctcgagccccgggttgtgatcccgaagttcctgccctacaccaccaaaagccgcctgccacaggcgccctggctggtctcgctgtacctgaagattccgctcgcctggcacatcctgggcaagcaagctctggtcgtggcctacaagccacgctga

SEQ ID NO: 500179 - DNA, 945 bp, Stenotrophomonas maltophilia
atggtagacaagaacgacaagatcgtcctgaccggcgccgcgggcctggtggggcagaacctcatcgtcgagatgaagcagcagggctatacccgtttggtggcgatcgacaagcacgcccataacctggagatcctgcgcagcctgcatcccgacgtagagacgatcctggccgaccttgcggagcccggcgactgggcgcgcgccttcgaaggcgcgcgacttgtggtgcagctgcatgcacagatcaccggcaagaccaccgaactgttcgtacgcaacaacctgacagcaaccgggcacgtattggccgcctgcaaggctgccggcgtgccctacatggtgcacatcagctcttcggtggtgaattccgtcgccaaggacgactacaccaataccaagcgtgagcaggaagagatggtagtggccagcggccagcgccactgcgtgcttcgccccaccctgatgttcggctggttcgaccccaagcacctgggctggctgtcgcgcttcatggcgcgtacgccggtcttcccgattcccggcgacggcaggttcatgcgccagccactgtacgaacgcgatttctgccgctgcatcgccaagtgcatcgagaccgaaccggacggccaagtattcgatattgtcggagatacccgcgtggactacgtggacatcatccgcaccatcaagcgggtcaagaagctgcacacggtgatcgtgcacatcccgatcggattcttcggtttcctgctgaaggtatacagcctgttcagcagcaagccgccctttaccgccgatcagctcaaggcgctcagtgccggtgacgacttcaagggtgtcgataccgaggcggtgttcggggtgaagcagaccccgttcgaagccgccatccgcgaaagctacaccgacccgcgctacagccatatcgtgctgcagcgctga

SEQ ID NO: 500180 - DNA, 1308 bp, Stenotrophomonas maltophilia
atgcccaatttcgccatcatcggtagcggccccatgggtctcatggcagcactggagctgctcaagcagggccaccaggtcgacatctacgaacgcgacgaccgcatcggcggcatgtccgcggatttcgacttcgacggcttgcgcatcgagcgctactaccacttcatctgcaagaccgactacccgctgttcaagctgctcgacgagatgcagctgtccgaccgcctgcactggacggacacgaagatgggctactactaccagggcaagctgcacaagtggggcaccccgttcgcgctgctcggcttcccgcatctgggcctggttgacaaggtccgctacgccctgcatgtgatgcacaccaagggaatccaggactggaccgcgctggacaaggaaaacgcccgcgactggatcacccgctggatcggccccaaggcctacaaggtgatgtgggagaaggcgttcgccctgaagttcttcgaataccagaacgacctgtcggcatcgtggatcggcacccgcatcaagcgcgtggcgctgtcgcgccgcaacctgttcaatgaaagcatgggctacctggagggtggctcggcggtactgctggaaaagatggccgtagaggtacagcgccggggaggccggatcctgctgtcgcagccaatcgaggaagtgacggcggtcgatggcaaggtcaccggcatccgcaccgccagcgcgcaacaagcgtacgacacggttgtctcgaccgcccccatccagtacgtgccgaagatggtgccggcactgccgaaggtcttcgccgagcaggtcgatgccatcgagaacatcccggtggcctgcgtgatcctgaagctgtcgcagccggtcagcgagaacttctggatgaacatcagtgatgaccgcatcaccatcccgggcctgatcgagtacagcaacctcaatccgggcaagggtccgggcgagcacatcgtgtacgcgccgtactacatgcccaagacccacccgaagtggcagtggagcaaccagcagctgatcgacgaggtgatcagctacctgccgatgatcaatccggcgttcaagccagaatggatcaaggcgacgcactgccaccgctacgagtacgcgcagacgatctgcccgccgggcttccaggacatgctgccgccgatgaagacgccgctgcagggcttcttcatggcggacaccgcctactactacccggaagatcgctcgatcaacgagagcattgcggtggggcagacgctggcggcactggccttgcagggaacagtcgcaacgtga

SEQ ID NO: 500181 - DNA, 408 bp, Stenotrophomonas maltophilia
gtgagcacagttcccgtagcacggcagttcgtgctgttcctcattgccggtggcctcgcggcgggggtgaacatcggttcacgcctgctgctgggtcactggctcgcgtacataccttccatcctggttgcctattgcctcggcatggcaaccgcattcgtactgggcaagcagttcgtgtttgaaaaggcgcagaacccattgcaccagcaggccctgtggttcatggccgtcaacgccgccgctgttgtccagacgctcctcatcagcgtgtcactgtcccactggctgctgcccgccatgggcatgcacttccacaacgacacactggcacacgtagtcggcgtactggcccccgtcgtgaccagctacttcggccacaagcacctatccttccgggccgcgtga

SEQ ID NO: 500182 - DNA, 405 bp, Stenotrophomonas maltophilia
atgaacgtaccactgccctcaagccagttcatcaggttcctgctggtaggcgggctggcagccgccgtcaacgtcggctcccggatcctgctcagccactggctgccgtatgtaaccgccatcctgctcgctttctgcttgggcctggtcaccgccttcgcgctgaacaaggtgttcgtgttcaaccaggccagcaaccgcctgcaccatcaggtgctctggttcattgccgtcaacatcgctgctgtcgggcagaccctcctcatcagcctgctggtggcacgctggctgctgccgcttctgaacgtggattttcataacgaaaccatcgcccacgcattgggcgtcatcgtaccggtgatcaccagctacatcggccacaagcgactatcgttccgagcctga

SEQ ID NO: 500183 - DNA, 1950 bp, Stenotrophomonas maltophilia
atgaaacaggcgatcagatcagtcaacggtgcggacggtgcgggggcggccatgacgcctgtgtgggcggcctgcgtcgctttgttgagctcctttctggtgatcctgatggttacgccgttcgcaccggcgatgccattcgagagtctcgatggatcgtggatgtatgcgatgaaccacgccgttgccgagcaactgcgttttggcacgcagatcgtcttcacctttggaccgttggcatctgtctataccacgctctatcacccggccacggacctgctgatgctgggcggctccctactcatcgcggcagccctgtttgcaggcatgttcgccgttgcgccccctcgctggcgcgcatggttgctgctgttgccgctggtactcgggctgggcgtaagccgcgacgttgccttcctgttccttcctgttctgcttccatgcgttgtcatgcgcggtatcgagcgcgggcgtgcgtattccgctgtcgtctgcctgattgcggcggcgatggcaatattgccgctggtgaaaggcaacttcggcgtgatggtcgcgctggcgagcgcggcgacgatcctgctgggctggcgattggatcgccggacggtaatgctggccctcgccgtccaactgatcgtgatgccgatggcatggatggcctcaggccaggcgctgccggatctcccgcgctacttcatcgctcaggccccgatcatttccggctacaccgatggtatgtcggtggttggcaggggcaaggacatcctttacttcctgttggcggccgttgtgctcgttggcctgtcactgtgcagcggcgggcgtcgctattggcatgtaacgttgctggttgcggcctatctgttcgttaccttcaaatccggcttcgtacggcatgacctgcatgcgctcaccgcggcggtggcgctgacgatggttggcgcattcctgtgcatccacaatgccggccgcgccggcatgctggccctggtcattggcctggccgggtggtgggcgattaccgatccctatgctcccgtaacgccgaagtcactgtcagcgcagttcgcccagtcaatccagcggcccgcagccggactggtgacgcggatgatcgagccggaggcactcggcaaccagttcaaggcgatttccgcggcgatcggctcgcgcgccccgttcgcagggtacacggggacggccgatgtctatcccaccgaactcgctccgctgatcgcggctggatcgacctgggtgccacgtccgatcctgcagagctactccgtttacacgccggcccttgcgacggccaatgccgatcatctgctcaaggatccgccttcgcgcatctacttcaaggtggatccaatcgatcatcgctatccagccatggacgacggcgcgagctggctcccgttgctgggcagctataccccggtggctctggaagggggatatgcggtgcttcagcggtccggtcggccgccgatggcgttgcagcctcaggacgctcagctcaccgttgcgcgggtggaccaggaagtcgccgtaccggactggagggagccggtctgggtctcgatggatattcgaccgaccccggctggtcgcatcgcatcgacgctctacaagctccccaagttgtcgatcaaggtccgcttcgagaatggcctcaccgccgactatcggctgatcgctgggtcgacccggacgggcttccttctgtcacccacggtggccgacgccagggatttcgttgcgctctcttccggtagccgcgaggaactgctgcgtgggcatcgggttgttgcctttaccgtctatggcgacagcggtacccggcggttctggaattcaagcttcccggtgacctttgcacgtttgcctattcctgaggccgccgggacagaccgtgtactggctgctgcgcaggagcccgcccactga

SEQ ID NO: 500184 - DNA, 528 bp, Stenotrophomonas maltophilia
gtgacgcccgccgtgcacaaacgcgatgcctacccgcggcaactggaagatgcactcgctgatgcctatccgcatgcggtattgaatgtgatcacttccgctgtcggaggcgagaactcccagcagggccgcgaccgtttccagcgcggggtgctggacctgcacccccgcgtcgttttgattgactatggcctgaatgaccgtgctcttcccttgcagcagtcggcacgcaatctcgcctggtttgttatgtcatcgcgcgcggcgggagcgtgtccggtcctgctgacgccaacctgggaccaacaggccgagaacggccaggctcgtgccgctctccgggcccaggccagcatgatccggaagctgggagagttgaccgacacccctgtcgccgacagccttgccgcgttcgaagcctatcctggtgaccgcaaacggctgatggcgcagttcaatcaccccaaccgcgaaggccacgcggtcgttctcacgcaactgctgccgctgttccaaaccgcacagtaa

SEQ ID NO: 500185 - DNA, 2349 bp, Stenotrophomonas maltophilia
atgaacaacggtaaagtagcgatgacccggctgggctggctggcgtcgggtctggcgtgcatcctgacgatcctggtgctgacgcccttcgcagtggagatgcccatcgccggtgtcgacggttcctgggcctacgcgatgaacgtcgccacagccgagcacctgcgcttcggcaaggacatcatctttacctttggtccattggcttcgatctacaccgaggtgtaccacccggcgaccgatcacttgatgatcggtggcgcgatgttgctgtctgttgccgtgttcgcagggctgtttgcggtcacgtcgccgcacaggcgcgtgctgctcccattgtttccattcctggtggcattgacctggctgcctgattgggatggttggcgcgacgccgtgttcatgctgctgccgctactgcttccgatcacggtggcgcgcgggcaggagaccggcaagcccaactgggctgcaatcattctactggccatcgcgattgcgattctgccgttgatcaagggcagcctgagcgttccggcggcgctggccagtctggtggcggtgctgttgtgctggcgggagtcgccgaggctggcgatcacactgtttgtcgtcgaagttggcgtgctgatcgcagcctggctcaccgcaggtcagtcattgctcgacctgccggtctacttcctggcgcagatgccgctcatctcgggttataccgatggcatgtcggtgtcggtagatgggcgccccctgaacatcgtgatctacctgttagccagtgtgatgctggttgccctttcgacgttcggaggcgtccgtcgtcgttggtatctgccggtcctggtcgcgctgtatctctttgtgatcttcaaggccagcttcgtcagacatgacccgccacacgccctgattgcttcgtcggcgctgctcctgatgggcgcactgctgtatctggtgccgggctctggtaggtggccgggcatcgccgccatggcagtgggcgcgctgggctatgggctcctcgccttcgccttccttccgttggatcctgtggcgtcactggcacgggttggttcgaagttcgagctttcggtcgaagccgcatggaggcgcgctacagagccggcagcactggcgaaggagtatccgcgtcgcttggtgctcctcggggacaggccgccattcaagggcctgtcgggcgatgctgatctctatccatgggacctgtcaccgctgctcgcttctggcgcaagctggaagccacgcccggttccgcagagctatgcggcattctcgcccccgctactcgatgccaatgctgagcatctgcgcagcagcccgccgaccaggatcttcttcaacatcaatcccatcgatcagcgctaccccagcatggaggatggcgccagttggctcaccctgcttggagggttccgggcgcagcgcatcgatgcgggctacgcgttgctctcgcgccgcgatgccgtggcggaaaccctgcaaccacggccggtgacctcgaccgaggtccgcatgggcgaggacgttgcggtgcctgagaaccaggggccggtgtgggcatcgatcgacgtccagccgacgctcctgggcaggctgttctcgattctctacaaggctccggagttgacgctgcaggtgcgctacgacaacggcgaaaccgcgtcatatcgtttcattgccggtctggccaagagcggcttcctgctttcgcctacgatcacggatgtgaatgattttgtcgcgctgacgtccagccaccgcgatgacctgctcggcaaccgcaaggtcgtcgccatgggcattcgcggggccagcggcacacgcctgatgtggaagtcggcggtcaggttgagctttgcccgtctggatgttcccaccgccccggaggccgacgcggccttggcgggtatctggaagcacggcgatgcggtggagtcctacgtggctgctggtgattgccacatcgataccgtgaaccagctgcaggcggagggcggcacgctggatctgccggcaggcctggtgaaagtgcgcggttggtcggcgctcgatggcgcgcggggaaggcccaacgacggcgctttcctgcttgcgtcggccaccgatggccgcacctggatgttgccggcgaaccgggtgccccgccccgatgtggctgcctacttcaagcaaccggcactccattacaccggttttgaagcgttcgtggacacccgccagctgcctgaggacgtgcagatccgcgtgctgcagaaggatggtgagcaactgaaggtctgcgccgcagtgctggccatccgccgggcgagggttgcggaactgccctga

SEQ ID NO: 500186 - DNA, 1701 bp, Stenotrophomonas maltophilia
atgagttccgtccgtcgcgttgcggttgttgcccacttcgacgccgaaggccggttgactgacttcacgcgtcggctgctcgaaggcctgttgcggcacgcagagcgcatcgtgctggtgtccacccgcctggcgtctgaccaggcggtgggcctggatgagcgcatcacggtcatcgtccgagagaacgttggatacgacttctactcgttccggaccggtgtgctggccgtggaggcgttgtatgcctacgacgagctgatcatcgccaatgacagcgtgctggtgattgatccggagggcctggaccgtgccttcacgaagatgcagggtgtggaatgcggtgcctggtcgatgaccgagtcgcagcaggtcagccgccacctgcagtcgtatttcatggtgttccgcaaggaggttttcttcagccagtacttccaccagttctggcgcgatgtgcgggtgctggatgacaagtgggaaatcattctttcctatgagatcggcttgacgcagtggctgttgcatcacggggtacgcattgcgtcggcgttccagcctggcgcggatgggatgcagaagctggctgcgcgcctgaagcgcaagcgcgagcgcgatgcggctccggacagcattgctgcaccgggggcattcgagatccagcaggccaatctggtccactacctgtgggatgacatctaccgccagtttggtttcatcaagaccgaagtgctgcgcgatgatcccaatggcgtacaggacgttggcctgtccagcctgatcgccgacccggtgcgcctgggccaggtcgaggaggaagtcgccaggatgcgggccacgcgtgtcaacgcgatgccgctgctcgcccagtccagtgacggaatttcacaggaagaactgcagcgctatggtgtcggcgccattcctgctgacaagctgaagtcgcggttcgccatcgtgcttcatctctatcatctggacctgatcgaatcgatccaaggctacatgaagaacatgatcgttgatcatgatctgttcgtgtcggtgaaatcggttgctgatcgtcgggtggctgtgcgctttttcgaagagcggaaggtgcgtgccttcgtcttcgtgcatccgaacatcgggcgcgacgtcggtcccttcgtcagcctgctcaataccggcctgctcgaccgctatgacgcggtctgcaagatccactccaagaagagcgtgtaccacgatggcggtggccagtggagggacgagctgatgaagtccctgctgggctcttcacacaccgtgctgaagatcctgcgcgccttcaggcacgattccagctgcggcatcgtgggcccggagcatgcctatgtcagcaatgcccgtttctggggaggcaatgaggaacggctgcgccgccttgctgcggaaaccgggatcgacgatgcccgcatccggctggggttctttgccggaacgatgttctggttccgcccggcggcgctgtatgcgctgcgggagcgggcgctggccttgagtgagttcgacccggaagcagggcagctcgatgccaccctggcccacgtgatcgagcggcttttcgtactgtgggtggagcaggcgggctacttcgcggcgaccacgcggactccagacgctgcgttgcgccatgagaactacgccaatcagggcatttctgtccttccggcctga

SEQ ID NO: 500187 - DNA, 1311 bp, Stenotrophomonas maltophilia
atgtctaccgtcaagccaatctgcttctatctgccgcaataccaccccgtcgcggagaattcggagtggtgggggcctggcttcaccgagtggaccaacgttgccaagggaaagccgaacttcgccggccactaccagccccacatcccgcgcgagctcggtttctatgacctgcgcctgatcgacaacatgcgggcgcaggccgagctggcctcgctctatggaattcacgggttctgcttctactactattggttcgatggacgtcgcatcctcgagttgccgctggacaactacctgaagagcgacatcgagttcccgttctgcgtgtgctgggccaatgaaaactggacccgcacctgggacgggctcgagaaggatgtgctgctcgagcagaagcacggcgccgatgaggatcgccggttccttgaggacatcctgccgctgttgaaggatcgccgtgcgatcaaggtcgatggcaagcccatgctgctggtctaccgtgccgacctgttcccggacgcgaaggaaaccgtcgcgcgctggcgccaggtggcccgcgagaatggtgtgggcgagatccatctcgtggcggtgcagttctacggcattgtggatccgcgcgattggggttatgacgctgccgcggagttcccgccgcataccttcatcggcgcggagaatcgtctgacgcgaccgatcgacatcaccaatcccgagttccgtggtggcctcgtcgattatcgcaaggtggtcgcccagtccatcagccggcccaagcccgacttccgctggtaccgcggcatcgtgccgtcctgggacaacaccgcgcggcgccagcacacctcgcacacgctggttgacgcctcgccgtcgatctaccagtactggctgcgccgcctggtcgagtacacccgggtcaacaatgcaccggaagaccagatcctgttcatcaacgcctggaatgaatggggcgagggctgccacctggagccggacctgaagcacggcctggcttacttggaagcgacccatgccgcgctgaacggtgctggcagtgatgagatgctgatgaaggatgaggcgttgctgcgcgcactcggcggcgagcgcatgaaagcgctcctggatgatcgcgagcgtctggtcaacgatgtggtcctgctgtccgccgaagtacgcaggaccaatccccagggaatctcttcggtgcccaggccgggcctgcgtgcgttcattggccgttgcctgaggcccttcccccgcctgcgttcctttgcggtgcgcgtctatcacgcgtggcacgcatga

SEQ ID NO: 500188 - DNA, 1023 bp, Stenotrophomonas maltophilia
atgaacgattttccgctgtcgaacagcatgctgatctccccgcgcgaactgtcgctgagcgcgtggctgggtcacattccctttgcctcgtggctggtcgagcagctgcagccgcagtcgatcgtcgagctgggcacccatcgcggttcctccttcctcgcgctctgccaggcggtgcaggagcaggggctgactgcacgggtcttcgcggtcgatacctgggaaggggacgagcacgccggttactatggcgacgagatctacaatgcgttgcgcgagtaccagcagcgcaactatgccggcatctccgagatgctgcggatgcggttcaatgaagccctgccgtattttgccgacggctcgatcgatctgctgcacatcgatggcctgcacacctacgaagcggtccgtgaggactttgaaacgtggctgcccaagctctccgatcgggcggtggtgatcttccacgatacctgcgttcgcgagcgtggttttggcgtctggcagtattggagcgagatcagccagcagtacccggcattcgagttcacccatacccatggtctgggggtactgctggtcggcaagcagcgtgttcccgcgttggcggacttggcagcgcgcgcggccgcaggcgactttgctccgatcaatcgcctgttcgacacactgggcagcaacatcaagcgtgccgaagaggtggagcgtgtcaatgcaggattgatggatgcacgcaacgaggtcaaccgcctcggaacgctgggccacgagctgcagcagcgttgcctgcaactggagcaggacgtgcgtgatggccgggagctggttcggcaggcggagcagcaggtgcagcagcagcgggaacgcgccgaacagagcgctgtgaccgcagaagacctgcgtcgcatcgtcgccgaggagcgtgccaggatggtcgaagaggtacaggcggcactgggaccgcagctggattcgcaggcacgatcgctcgacaggctgctgcagccctggtggcgtcgctaa

SEQ ID NO: 500189 - DNA, 588 bp, Stenotrophomonas maltophilia
gtgagcgcatcgcagggaccgacggtgaccgaagcgcacggcttcattccaccactggccagtaccgacccgcgcatcagcgtcggtcgatacacctatggttctccgcaactgaaggtatggtcggaaggtgaacgcatcgagatcggggcgttctgttcgatcgccgatgacgtagtgatctttgggggcggcgagcaccgtctggattgggtaacgacctatccgttgcgcatcgcgctgaactcccccggtgctggccacgatgggcacccgcacaccaagggccccacgcgcatcggcaacgatgtctggatcgggcatggcgcgatgattgtttccggcgtgaccgtgggcgatggtgcctgcatcggtgctggcgccgtggtttcgcgcgatgtgccggcctatgccgtcgttgctggcaatccagcgaaggtggtgcgtacccgatacgacgagccgacgatcgcccgcctgcgtgcgattgcctggtggagctggccgatcgaccgtatccgcgccttcgaatcgctgctctgcagcggtgacgttgaagccttcatcgccgccgccagtgcgccctga

SEQ ID NO: 500190 - DNA, 1395 bp, Stenotrophomonas maltophilia
atgtcatctaatgaacctgtgcgtgagcctgatgatctggcgatccgggtctccggtgtcaccaagtgcttccaggtgtactcgcagccacaggaccgtctgaagcaggccgtgctgccgcgactgtcgcggttgctggggcgtcctggtggcatgtactaccgtgagttctgggcgctgaaaggcgtcgatttcgaggtgcggcgtggcgacacggtgggcatcatcggccgcaatggttccggcaagtcgaccctgcttcagatcatctgcggcacgctgcagccgacgcacggcgaagtgaccgttcgaggtcgcgtggccgcactgcttgagctgggtgcaggcttcaatccggagttcaccggtcgcgagaacgtctacatgagcgcgtcgatcctgggcctgtcgcgcgaggagatcgatcgcaagtatgacgatatcgtggcattcgccgacatcggcgacttcctcgaacagccggtcaagacttactccagcggcatgtacgtgcgcctggcgttcgcggtgatcgcgcatgtcgatgccgatatcctggtgatcgatgaagcgctggcggtcggtgacgcgatcttcgtgcagaagtgcatgcgctacctgcgcaagttccgtgagaacggcacgctgctgttcgtcagtcacgacacctcttccgtgctgaacttctgccagagcgccgtctggctggatcgtggcgacatgcgcatgcatggcactgcgcaggaaacctgcaacgcctacatcgaatactgctcgcaggaagtgtatggcgatacggtcaagctgcagtcacggcaggccgctgcccgtgccgcggaggcatcgcctggcactccgtcgccagcccggatcgagaaggacctgaaggtcgagctgttcgacaacgttgccaattcagccggttggcagtccggcgtggcaagcatcgactcggtcaccctgtgcaacgaggacggtgagcccttcacgacgtttgccggtggcgagcatgtcgtgctgaaaatccgcgcgaccgcgcatgatcccctgacgagtcccttgatcggattcttcgtcaaggatcgccttgggcaatcgctgttcggtgaacacacctacacctatatccagccgccgatggaagtggagggtggcaccgggttggaagcgtcgttccggttcactctgccgctgctgcccaacggcgagtactcgatgaccgtctcgatcgccgaaggcgacccgtacaccaacacccagcacgcctggctgcatgatgcggtgctgatccgggtggcctcgcccaagctgcgttatggcctggtcggtatcccgttcgaggaagtgaccatggtccgcacgcgtcagccgcagccgacaggagagccgcagtga

SEQ ID NO: 500191 - DNA, 831 bp, Stenotrophomonas maltophilia
atgaccgtgtcgtccgccaacacatcagtttcgccgctggcgatggtgcgcagttttctcggcaaccgcgtactcatctaccagctggccaaacgcgaagtcatcagccgctaccgtggctcgttgatgggtttggcgtggtcgttcttcaacccgctgttgatgctcgccgtatataccttcgtgttctcggtggtcttcaatgcccgatggggcggcgacgtggcgcacaagggcgacttcgcgatcatcctgttcgtgggcatcctggtgcacggcatcttcgccgagtgcgtcaatcgtgcccccagcctgattgtcggcaatgccagctacgtcaaacgcgtggtgtttccgctcgacacgctgccctgggtggcgatgggagccgcgttgttccatgcgttggtgacgttggtggtgctgctgctggcgcaactgctgatccgtggcgttctgcccgtcaccgcgttgtacttcccactggtcgtgttcccgttggtgttgttcacgatgggccttgcctggctgttgtcggcgctgggcgtgttcgtgcgcgacatcggccagatgaccggcatcttcactaccgtgctgttgttcctcgcgccggtgttctatccagtgcacgcgttgccggagaacatgcgcaagtggatctacttgaatccactcacgttcatcatcgagcagtcgcgggaagtgctgatctggggcaaggcgcccgatttcattggcttgggcaagtacgccattttcgccgccgtggtcgcgtggctgggctatgtctgcttccacaaaatgcgccgggggttcgccgatgtcatctaa

SEQ ID NO: 500192 - DNA, 690 bp, Stenotrophomonas maltophilia
atggaagataggcccgagccgcttgcttcattgcacacatggatggcggtggccccttggcgccgctggctggttgccggcgtgctgttggtgaccgggttgggtgtgttcttcgccggttggttcggcttggcaatgctgctgggcgacaacgaggatggcgctgcgatggcgttgaatgccgccttcgtgctgctgctgtcgttggtactgctgccggcgctgcactatggcttcctgcgcggcttccgaagtagcgcgcaggggcgcgatcggttggccttccggttcggagcggaggatgcagcgccggtaccggccatcaagtggccatggtcctggcggctgcggcatgcggtgctgtacgtgctgggtattgcgacgttgctgctcgtcttcctgccgcacgacaaccaggcggctttcagtgccttcatcggccgttacagtgcgggccgcgcgtctgcgggcagtttgaccatgctggtattcgcgtggctgccgctgctcacgctgatgggggtgtgcatgctgctgcttcgccgccagttccggctccgcgatgccgggttgctggacgtggtgggcaagcggctgctttcagcggagagccactggctgttttcgtttgcggccgcgtttgccgcgacggcgttcctgtgccgcttgattggcagcgtggcgctgtag

SEQ ID NO: 500193 - DNA, 738 bp, Stenotrophomonas maltophilia
atgcgaacgtccattctcttcactctctccgtcctgtgcctgaccttgctgtctggttgcgccagcggaccggattaccatcattccaatcgcgagatcaccagcgcattcgtggccgacgacggcaagctgtacctgctgccggtctatgacgagccgatgcgctttgatgcggcgccgttccgtgattaccgcgccctgatggacagcccgctgcgcgaggccgtggtctgcgcgcagctctacttccgtgaggactggcgcgtgccggccgaccggagcaaggtgcatggcagctacgcgctgctgctgcggccggagcaggtgacgcccgaacaggcggcgcagttcaagctggagcggttggagatcagcccgcgggtggccaaggccatcgctgcgttgacgcgccagccgtacatccttgaagcccgaagccgctacgagctggcggccaacccggactgcaatctttccaggcagggcggcagctattacagcgcgctgttcgagagtgatggcgagcgggtgaagctgccggacgctgcggcgctggccgcgaaggcgaagctgccgcagtcgattaccgcgcgtgctgagcgtatccggccggacgatacggataagcctggggttgggacggcggccggaaaggtgctgggtgcagcgttggtgccggtggcggttccggtgtttgtgttgagcctgccgttcctggggccggatcattggaagtga

SEQ ID NO: 500194 - DNA, 840 bp, Stenotrophomonas maltophilia
atgaacctgatgacccggctggccgcagcgctggccctgaccctggccgccagcggcgcgcatgccgccaacgtgctggtggtgctgtccgacgaaaaccacctggacctgaaggacggcaaggtgctgtccaccggcttctatctcaacgagctgatgcagccggtcaagctactgctggacgcgggccacgaggtgaccttcgccacgccgcatgggcgggcgccaacggtggatgcgtcctcggtgacgccggcgtacttcggcaacgatgccgcgcagctgacgctgcacaaggagttgctggagaagctggcgctgacctcgccgacggcctcgccggtggtcagcctggcgcgcgtcgagcagcagggctatgcgcgtttcgatgcggtctacattcccggtggccacgcgccgatgcaggacctgctgaagagcccggcgctgggccggctgctggccgacttccaccagcgcaacaagaccaccgcgctggtctgccacgggccgatcgcgctgctgtccacgctgccggatgctgcgggtttcgtggcaacgctggacgcgggtgcgatgccggctacgccgaagtggatctacagcggctaccagatgacggtgatcagcaaccaggaagaagaacaggccaagccgctgctgggcggcggtgagatgaagttctacccgcagactgcattgcagcgggcgggtgcgaagttcagcagcaatgccacgccgtggaccgggcacgtggtggtggaccgcgagctgattaccgggcagaacccggcgtcggcgctggaggtggggcagcggttggtggagcggttgaagtaa

SEQ ID NO: 500195 - DNA, 1056 bp, Stenotrophomonas maltophilia
atgaccagtaacgatcagagtcagacgtcgactgaaaattcgactgcccttcaggcgggaagggatatcaattttcagcagggaatgacatatcaagacgttaggcaggtggcgcacgacctttttgaggctaacttctatcgactctcagctgtcgcccgggaggaggctacccgtcgggcagaatacataacagagaaattcataagtagacttatgaatgagaatccgtctggcttcagtcaagctaatgatccttctttccagcatgctctctacacggtacaaaaggagcacgctagagccggggatgaaaatttggctgatttgcttgttgatctattggttgatcgatcaaagcaggagcagagagatctccttcagctggttttggacgaatcgttggcaactgcccccaagctgaccgaaggtcagttggcaaatcttgcagtggtcttcgtgcttcgatacacagaaagtgtcggaattaagtctgataatgcactgggggcatatctagatagatatatacttccatttgtggaggcgctggcggtaagcgattcctcgttcacatatctggaatttgccgggtgtggatcaacatctttgctaatggagatttccgtggagggcatcctcctgaaggactaccctgcattgtttgttgcaggtctttctcgcgatgaaattgaagagatgggtttctctggtggtgtggattcgcgaatcttcattccttgcctgaatgatgcaagtaagtatcaggttggtgtaatgcgatacgcggatatcgagcccgatctttctcgtcagggtattccgctggatgttattgatcgggtaaaatcaatctatcagcggaatctaatgactgaagaggaagttcgggccaaggtgttgagaattcgtccggcgactgaggtgctattccaaaagtggtcaaattcagcaatgaagtctctttcactcactagtgttgggagtgccatcggacatgcaaatgtaaagcgtttggttggtagttttggtgggctcgagaattgggttaactag

SEQ ID NO: 500196 - DNA, 987 bp, Stenotrophomonas maltophilia
atgcaatatggcagagaggaggtgggattatgtcccaattgcggacggggggatggcatcaaacttggcagagcgcctctggcctacctggccgaacgcttcttcgtcgacggatccttccacaagtatgactttggaggagctcctgccattcagttgaacgaacaccagaaaaccagcatcgatattgatgctgtgctgacggatgacataggagttttcgagaggctgctgggagtggggttcttctattatggccctcggctgtggatgattggcgaggttgagccactgaaagccctactagatgacgggaagcgtacagccgtcattgagcggatcatggccgagtacccgacaaggacggtcgggacggatgagacgttctatcgagtgcggaagagtcccggctcagttatcaatcccctcgaatacgacacgccaccctcaaacgtcccgcaggatggacgactaagttccgatggattgccggtcatgtatgcctctcctttgatcgacttgtgcgtgcatgagtgccgttacaccatagaggacgacttgttcgtcgcctcccttaatccacgacgtcaactgcgcctcctagacctgacggtagttctggaggaggatgcgacagagttcgaaagtctcgacatggcggtccatatgctctttcttggcggcaggggggcctacgacgcagcgcgggcgattgcgcgtgcagccaaggacggtggctacgatggtctggtgtatccctcgtactttagtagtcactatcacggtgagagaccattccagaccgtctatggaataactcgccgtcggttcagcggcgccgaggcttatgagcggtcattgagcgtccccaatctggctctgtttggctatccaatcgcagagggaatggtggaggtcgatagtattaatcgtttagtgatcaaccgcgtggcttatgaattccatcatggaccagcaatcgcctag

SEQ ID NO: 500197 - DNA, 753 bp, Stenotrophomonas maltophilia
atgaattcgactccacggcattcaggccgaggccaagccttcacaaggtgcgtaagggtgcatgcgctaggaggaacgctgtgggccctgtttggcgtcagtgcgctgttgatgtttaaagccagcgaggaaccattgatcggtccattgcagggcacttggatcgaggtcgtcttgacgtcgtttcctgttggaaatcagattgttttcaacatggcgattggcgttctcgtcagtcagattatgtatatgctcgtggtttggttgccggcaaatgccaaacgaaagcgaatccgaaagaaccttcagcaccactatgctctattcaaagagcagtgtatttaccaactgctgttcgcgagcgatggggctgctgaccctaaggtggttgaagatcttgcggacatcaagaaatttagggcctacttcgctgccatcgggccgtccggtggagagaagtggtacgacgttatgaatggtctggaggcagggcacgtcagctccatcgtcgtagaattgggaatcttggctgaggagctgaagtacacgctcgccgcgatagatgttggcgaagacgaagtctatgcttttctcaaaaggctgaaccgcgcgattgtagttcttcgagatggatccgaaaactcggacgtcgagtatctggccaacttcctttgggaattgtttgccggttggtccgtggtcactggctaccaggacggagattttgttatggatcggatagataaattatga

SEQ ID NO: 500198 - DNA, 975 bp, Stenotrophomonas maltophilia
atgcacttggacgccctcgccgccgcccgtcgccacgaacaccgcttcgacgacggcaacccgctggccgaacgcaatacccgccgcgccctgtggctgaccgtcggcatgatgctggtggagatcgtaggaggctggtggttcaactccatggccgtgctcgccgacggctggcacatgagttcgcacgcgctggcgctgggcctggcggtgttcgcctaccgctgcgcgcgccgctacgcgcacgacccgcgcttcgccttcggcacctggaagatcgagatcctggccggctacaccagcgccatcgccctgctcggcgtcgccgcgctgatggccgtgcagtcactgcaacggctgtgggtaccggcgccgatccactacaacgaagccatcgccatcgctgcggtcggcctgggcgtgaacctgctctgcgcatggtggctgcacgacagcccgggccacgcgcatcaccaccacgggcatgaccatggccatcatcacgggcatgaccacgaacaccacgatcacggccatgcgcacggtcacgacctcaatctgcgctcggcctacgtgcacgtgctggccgacgccgccacctcggtgctggccatcgtcgccctgctcggcggcaagctgctgggcctgacctggctggacccggtgatgggcctggtcggcgccgtgctggtcacggtgtgggctgtaggcctgctacgcgacagcggccgcatcctgctcgacgcgcagatggacgcaccggtggtggccgaagttcgcgaagtgatcgaacagggtccctggccggcgcgcctggccgacctgcacgtctggcaggtcggtcgcggcaagtacgcggtcagcgccagcgtggttaccagcgacgcccgcctggatgcggataccgtgcgcaacgcactggcgatccatgaagagctggtgcatgtcaccgtggagatccaccgcagcgcgtga

SEQ ID NO: 500199 - DNA, 639 bp, Stenotrophomonas maltophilia
atgaagccacaaggaaagcgccggatctgcatgctcgctggactgctcgttcttctggctacggggtgccgacccgaggcggctggcgacgcaggctcgatagcagaggcccatcgtccggatctggtgccgcttgtgcgagccatgccgactacctcaatggatgcaccattgacggtcgagttcgatgtggatgttcccagcaggaattcctctccaacgctcatgatcggcattcgggtcaatcgtacggacgacgtcccggcactggaggcactggtcgatgttcaggcatccgggctccaggccaacgtctccatggcgcgcctggaatcgggtggatggaaggacgtgccgttgctccggctggagtcgatcatcggggaacctgcccggacgattcccatccccgccgatggtcgagtaaccagcgcgtggctggacgatgctgacgtactggcgctgcagaatgctgggctggaacgacccggtgatacctacgcacagctggccttcgcatgggcacgcaatccctcgccgggccgataccgggttgaagtgcaactgcattcgcccttgccgcagcttgagccgttccacccggaactgctggttgcttacctgcgcaggcccaaataa

SEQ ID NO: 500200 - DNA, 3348 bp, Stenotrophomonas maltophilia
gtggctggacattccactcatttgcaggaccatcacgcgattgagcagcagacgctgaggcacagcccattgctcgcaaagctgcaggaggccgggcgattcaatattcacgcccaagagaaccggctgttcctccccgcaaaccctgcctatgcagatgcgatgggcattacgccgcacagtggcggaccgttgggtgaataccagaacggaatgattcggcgcttgaacgagattcagagaacgcgagacggtaaggccgcgctgctgaatgactctgacgccctcgatagagtgatggtacgtgttgaagcgttgcgagacaccgtcaaggtcgggttgatcaatggtgatctcaacacgaatactccgctgggaagcacgcctgcgatcacgaacaaacgaatccgggatttttttgacggcgttcctgagtaccaccaaacgcatatcgctcagatccaggccttgaaaggtttcaccggggtcgaccttggctgggtggctgtcactcattccgaaagtggtatcgtgactacgctcaatagaatcgagtatgacgccaagccactgactcgcggtggaaacattgagttgcagcgaagcggcctgtcgcttgccatttccaatgcccaccacggtggccgagttgttctgacagagccgggtatccagacggtcgagcgcgtgctcggcgaggaagccgggcatcgcattcgcagcccgcgctcacagcaaggcggtgcgacattggacctcctcctcggcgaagcctccaccagccaacttatccgctccggcggcctgctcgcatccggcgccgatgccgtcatcaccgcccgccgcacctcacagctgctggaagaaggcaacggcaccgccgcccagtccgagctcacccatgccttggcgcgcaacggcggtggctgggtcggtggcatggccaccgcgtcggtgatcggcacgtccagcttcgtccctgcggccatcgtcgcgggcgatgcgctgctgatgagcaaggcgttcgacaagggcgccgatctgctcgacaaccgcgccgtttaccggcagaccgacaaggccggcgtcacgtggcagttcaatggccgcaattgggagcgccaggcggtcatggacagcgcgggcgacggcctgggcaatccggctgagcgcagcgttggtgccagttacgagaaggcccgcgagctgggcgcatacgcccatgtaaaagcggtagagctggcgctcggcaaggcgccgccgcctcaggatcctttcagtattccggcgaaggacggcgagggccgtctggacaatcccaactggcaccgcgatgcgcagaccgaacagtggacgcggcaggtcaagattggcgtgtccggtgccaacgaccggggtgtgtatgagacgcagaccgccagtcccgaacgcgccaacgagttgaatcgtgaggcggtgcagcgcatcgagaacaacatcgccaacggcaaggccgccattgccgcgagctatctggagacctacgccgctacccgtgccagcgacttcgtgccgctggtgccggaggcggtggagcaggcccgtgccaggcccgacgccgtccagggctcggacaaccagctttaccagcgcgatgaagaagggcaatggcaccacgctggccagatcgcgcaggggaacatggcgctggagttggagctgacccgcaccatccagcagccgtcgctcgatcagttcaaccagaccatcgctgcattggacgcgcgaccgttgccgtctgcggcggaagtgaaccagaacgagctgcgtcacagctactacgctgcgggcgttgcgctgaccccggcgtgggagcaagcgattgcgctggccacggcgcgcacgcgcgagcagcacggcataaccggggccacgcttcaggagctggggcctgtagccgagggcaacgccggtgcctcccggcccatcacgcactatcaggtaggtcaggatggcgtggcgcgcgccgtcgcgaccaccagcacgcaggagctgcaggccgcatggaatgaggtgcgcgcgcgtgccaatgagcaggcgccgttgcccgactcgcccgagctgcgcattgctgcgctgtcggcgggtgagcaggaggcgtaccggcaggcactgcaggaagcgaatcggctgggtgctgcgcagttggatgcaggacaggctgcacgagcagccgcgcaggtggcacatggcgacaagccatccgagcaggatgggaacgtggaagtgcggcctgaagagccggcgactgcgcaacccatcgcacctgcggcggttgcggcagcgccgcccgtgataggggtcacgccaccgcctacgcccgcccctcaggacaagcccgagcttcagcgacacgccgagcagcgcgatccgccgcggcgtgaggcggagccgcaacctcagccccatccaaatagcgaggcgcccaccgaaaaccgtaccgcctcacagacgccagagcccgtggggcctacgcaggcgcccacggccgcacctgagcgcgcgacgccacacgctgtcacgcctctggcagcggcaacgcagacggtgcccacgcagcgcacagagcaggcatcggagccggaacggatcgccccggtgcctgcggttgctcccactccaaagcaggacatggcagtgcaggaggtggaaccggtgcccttcaaggagccgctgcctgctgagccttcacgcgatccatggcctttggagcaggaaacggcacaacacgtgccagagcccgaaccggctctatcggatgacctccagcctgtcactgcggctgtccccgttcctgccgagcccacgatagcgccaagccctgagccagccgcgcctgcaccggatgaggcatcggccccgaacctggcgctgcagggccctacgcagcccggccaccccgatcacgcgctgtatcagcagatccgcgagggcgtggaagcgctggacgccaagcacggccgcagcttcgatgaagtcagcgaacgcatgacggccagccttctggtactggccaaggacaacgacctggagcgggtggaccatgtgctggtgagcaacgctacgcgcgaacacccggccgggcacacgctgttcgtggtgcagggtgagcccagcaatccggcccatcagcgcgctgcgatgccgacggagctggcggcgcagacatcagttgaagagtcactgcaacagttcgactctgtcagccgtgaagcgcatcagcgtgcgcttgcgaatcagatggaccagcagctggaagaccagcgggtgcagcacgacatccagattcgtgcggccagcgggggatga

SEQ ID NO: 500201 - DNA, 633 bp, Stenotrophomonas maltophilia
atgacttcgaatctgccaaagaagggcgagttcttcgagttgcgcccagatgcccgacggcgcggcaaagggcatggcgtcgtttttgagaacgagtcttccctgaagacgcctccaaatttcctcttgcgtcccgatcaggggggcttcccgcctctgcgcgagaccccgcgtctagtgtattacccaagcgaagggtggccaccggaggatcttgaagctgggatgagcggctattggctcgtttccgggcgtctccgagaggtgatggcggccgtggacccaggagcttttgcgttcagggagactgactatcgactcgctgatggagcaacgggtggcccttatttcctttgcgatgtcatcagaaccattgatgccttggatgaggcagcatcccagctgaagatcatcgttagtgacgactatgaagaggggaaatactacgatctgactggcgacgtccgcttggcgttcaagcgggaggccatcggcgatgctcacgtattccggctcccttactacgaaggtgtcttctgcgaccgcactttcaaggaggcggtcgaagccgcgggactgatcgccagcggtacgtctaacggtctgtggttctatgacgcggtgaactgctga

SEQ ID NO: 500202 - DNA, 639 bp, Stenotrophomonas maltophilia
atggattcggtttcaacccgccatcctcgaaaaggggagttctttctccttgagccaggggcgataagcggccctgcctgcggggtcgtcttcgagaatctggatcgcctgctgtctccccctcgcatgatcttgctgccggaggagggcggcgtcccctcgcttcgcgaggcgccgcgcctggtacttaaactgagcgaaggaccgccgcctggggatctggagtcggggttcagcggctactggctggtctctgagcggctgcatgacgtgatggtctccgtcgatccccacgccttcgcctttgcggaagccgactatcgtctggaagacggtagccggggtgatcgccacttcctctgcaccgtggttcaggtcgttgacgcgttggacgaaggtgcgtccaagctcttcatcgacaccaccgaggaattcatcaacgggaagttctacgacttgggcggcggtgcgagtgtgacgttcgaccgggagaggctggggcaggcccacgtcttcaggactccgttctccggctctgtgttctgtgaccgcgtgttcagggacgcagtggctgcagccggtatagacactgacagcgatgcggacggcgtgtggttgacggatgccgcggacatttag

SEQ ID NO: 500203 - DNA, 216 bp, Stenotrophomonas maltophilia
gtgaccaagatcgaacccgcatggctggaagccttcgacaaggaacttctccacctgttcgccatcgaccatcgcgatgccggcatggatgagtacctgctgggctgctacgcagaccttccgcctcgcgaagcagcactggcgttcggcagcgactacgacttggagcgcgacgatgcgctgtggcctcggccgggcgtggcgctgcaaagttaa

SEQ ID NO: 500204 - DNA, 351 bp, Stenotrophomonas maltophilia
atgaagcctgtgatctatggcgctgtgctgctggcggcgctgtctgcaacgatcgccagccagcgtgtacccaaggcaggcttggaactgcggacgtttcggaaggtgtccgacgctgaatttgctgtcatgcgcgaggaagccgttggactggtacgcgagcgtctggtgcaggacgcgtggtacgcgggagggagatacttcgaggtcagttgcgacggcaagcccgtgatgctggtggacaattcgttggagcagcttgtgattctgctatttgcggacaggtggattgatgttccgtgcattgtgccgctgacatcgcattggagcgggaggattgttccggaataa

SEQ ID NO: 500205 - DNA, 315 bp, Stenotrophomonas maltophilia
atggctgccgaactactagagcatcttaatgtcgaaccggaagatttgggcgagtggcgaggcgagggcccggtcaaggaactcgaggaagacaagcgcattagcgagactgagaagtcccagctcatcaaggcaagaatgggacagggcatctatcgaaggagcgtggacgatggtggtctgattctgagcaaggagatgccggaggcagtacggttgcagtgggatgtgtatcagaacagctcgcccgttccgctctcggcagcgcaggtccagtacctgaatcatcatcggaccgtgctgctgcgtaagtag

SEQ ID NO: 500206 - DNA, 348 bp, Stenotrophomonas maltophilia
atggcgtactggtgggtgaaccagaagcagacgtttgataggactgttaagggggggctgtggtctccgaaggccaacgtgaagggcgacgcgaatcccttctatgagcacatgactcaagtacagccaggtgatgtggtctttgcgtttgccgacacccgcatccaggccgttgcgatcgtcaacggcgcgtactacgcgaaagattgccccgaggacttcaaggcgacgggcaacacgtggcggaacgatggttgggccgttccggtcgactatcacctagtggatgcgccactgaaggtcagcgaccacatggggaagatcgagagcctcctccctacgaaatag

SEQ ID NO: 500207 - DNA, 1638 bp, Stenotrophomonas maltophilia
gtgactgatctttggtttcttactacaaatgccattaagctcgcaaattttagaactctagccagaggaactggcctttcgatacacagctttcatgaaagaacatttctcgcaagttactatgagccccggctagacgatcgccaggagattcttcggcttagctatgagagtgctctctttcaatggaatcgtgctggtttagacttggagtcattcttcttcattgaagatacctcagtaataattcatgcgttaagcggtgatcgagaggtcccgggcgtcgatgtcaagtactggatgagggatatggactttccgacactagacgagctgcttaaggctcgtggaaatgaccgtgcggtaacggtcaggtcggatataattctccacttgccccccagtattcagaaatggttccgttctgatagtggatatattcagtttacgggggagacaaacggtcatattactgatgttgagcacgctctaggtcagaaccccctccgaccatggcaggactccaagagctttaataagtggtttgtaccgaacggatgccaggttccattcagcgcgctggatccggacagtgccgatcaggctgactttaggcgacgtgcatttgaagggcttatttcattcctatcggatattgggatacgttccacaaattcgtcccctcctcagcggcagatgcagatgcccggattgccgccgggctcaccacttctagtcatttgtggtcttagcggttctggaaaaactaccattgcggagtatctcgttaatacggcgggatatatgcactttgaggcgagcgatttcatgcgttgcgagtactacgagcgcctcggtcgttctccgtcggtccgcttgtcagacttcgctattcaagtgcttgactcagagccttggataattccagagaaaataatgtcagccatggagggttttggtgatttcccgattgtaattaccggattccgctccgagagggaggttgaacaccttcttgcgaactgcgaacgtcacggtggtgttgagattgttgtggtggaggctaggcagaatctaaggtacgcacgcattcgcaagcgaggtcgacgagatgcgccgaagtcattgcgagatctgcgctctaaggatcaagagcagcttaggatgggtgtttcgaggatacgcaagaattggcctaaaataattaagaataatggaagtatttctgagctgaggcgaaacgtccgccatattgttccagctcaaaatccaggaaaatggcgtaaagaaatgcgcattgcaacgaatgagctggagcgttcgctgattcgagcgatgggttcaattagtagtacagatgggctgacgacaactcgtattgcagatctggttaaccgactatcgattcgtgattttgacacccataaggacaacgtaagcagatacttcaatcaacgctttagtccttactttacttttaagctgatatctggcaaggggtattactcgttgtcgcagacggggcgatcctatttgctcgctttgaaggctagtcctcacactaacctaaagcgagcccctccagagaagaatgaaaggcctcagctgagcttgccctttcctcctgccaaaccttaa

SEQ ID NO: 500208 - DNA, 981 bp, Stenotrophomonas maltophilia
gtggggtgtcgattggtgaagattgacattccggccagaattcatattggccttatatcgctctctgacaacgcaacaaggagaaacggtggccttgggttctcgatcgctgacttcggaacgaaaatgacagtcgaggcggccgcgtccactgaggttatcgacctccgcgattcgccgctctctgtagacgaaagggaaaaaatacggcgtctgatatgtaccgcgctggagaaggtggcgagtggcgctgcagcaaagatcgttattgagcaggactcgattgctccccacatagggcttggcttaggtactgccaccatactaggcggaattgaaagcgcagctctggtcaatggagtatccctagatcgggcagccctactcgcgctatcaggacgagggggagcctcgggtgtcggtgtaaacacatactttgatggcggctatgtgtttgatcttggtcaccgccgagggaacggctcattcacatcttcagacttctcgttctgcaatgaacagcctgtagttggatggaaaggagcgcttccagattgggagattggtctctgtatccctgatatccctgcgccctcactcgacgacgagagacggttgttcgaagaaatctgtccgatcccgatgtccgagtcggcgctcgcggcgtactacgcgctctttggagtacatgcttcagtaattgaaagggattacagcggtttcgcgcaagcagtagaggaaatgcaaaaactcacttggaaaggtgccgagtgggcccttcatggggatgaacttagacaagtctgtgccatccttcggtcgtcaggtgcacatgcggttggtatgagtagcttagggccaagcttgtacttcatgtcggacaacatcgcggcaaccatgaggcgagcggagagtctgctgccgagggcgtctctagcggcggtctatccgagccgacttgggagagttataagtgactga

SEQ ID NO: 500209 - DNA, 714 bp, Stenotrophomonas maltophilia
atgtgggagaaatacttaagggttagagctccgttgcttgttctcgtcttctatctatttctctcgctggggttgttgatatggcatttgtggtcgccatttgtaggtaaatgggagccgatagtcacgggagtcatcgctggcgccttcattgcggtcctccaattctcatgggactggctcgatgcaaagggtgtagccaagttaaagtcactgaaagtttcaaatgtactagttacgcgagatgaggaggagtactaccgcagtaaaattgaggggtcgaaaaggaagatcgacttgcttggtagtactgcatctcgatttcttagagacttcgctgacggctcaactacccgggaagacaaaaaggtactgttgcgagccctcgaacgaaatgtttcggtaagaatcctggttgctgaagagaagtttcttccggatgatgaggcgagatcccaagcgcggcttgctaaggttcgaatgaaagagctaggcacaaaatatagcgggttcaaggttcgttattattcgcattctgccgcgcactcagtatttttggtcgatgacctttgtatggtgggtcctattttcgccgatcgcatgagcaaggacactcctgccattgaaatgctcgtcgagagtcctttagtcgccgtgtacctcgagcactttgaggcggagtggaaaggtggggtgtcgattggtgaagattga

SEQ ID NO: 500210 - DNA, 1089 bp, Stenotrophomonas maltophilia
gtgattgtgcagataaacgggaaacctgaggctcacgtcgccgtagtgaacggaaaagctcatcttcctacgactagatactatggaagcaaacgtcgacagatcaattggcttaccaatcagctgttgaagtatgaatttcatagtgtgctagatgcttttggtggtacaggtactgtctcacttcacctgtccaacctggggaaggaggtcttctaccacgactcatttcatttcaattcaatctccgcaagagcgctgctttctcctaattcgcgccttataaggagggagcggttggagggcgttatttcagctgtacgccctcaaagcggtttcatcactaagaactacgacggaattttctatccaaagtccgagaaccggtggttggatggtgcattgcgtgctctcgatgaggctagactaaggaggggtgatcaggatgttttccagtactgcctttttcaagcgtgccttcagaaacgcccctacaatatgtttcatcgcgctaatctggggatgagaacggcgagaaatgtttcgagaagttttggaaacctgactacatgggagacgccttttgaggtgttaatgcttagggcgtatgatgagcttgttctcgcgaggggtcattattctggtcgtgggaaagttataaaaccaacttccgttatgagtattaagcctgaattcgatcttgtgtacctggatccgccatatctgcgtgaaagagcacctgaaacttatttgcgcagatatcacttcctcgagggggtggcgagaaggacgaattgggcggatttgatcgatcgtgagtcagggtgtaacttcttcaggaaagactatttctctgaggattgggagaatcctaagacaatcgagataatgcttgatagattaattgagattcattcaggggcaactgtagcgttgtcatatgttgataatggagttccagatgtgggtgctcttcgtagaatatttaaaaggcatttttctgaaacaaaaatatacagaatgccagtgagctatgcgctctcgcgacgaagcaatggcgagttactaattattggaaggaatcaatag

SEQ ID NO: 500211 - DNA, 708 bp, Stenotrophomonas maltophilia; identical to SEQ ID NO: 497920

SEQ ID NO: 500212 - DNA, 1911 bp, Stenotrophomonas maltophilia
gtgaatgtctctcgtggcaccgccgaccacaacgcgatcacggtttctcagctcaaggacgcactcgtcaccctcggcgctggcgcaggcatggatgccagcggcaatatcatcgccccaacttactcggtgcaggctggaacgcagaacacggtcgaagacgcactgatggcgcttgatggcgccgtcatcaccgcaggccgccgcgcggacaaggtggaagatcagctcagctccatcttccaggactcgccgtcggcccgtgccgatggcatgaaccagatcgcgctcagtggcgcgaacggcatggtgctgaccaacttggctgacggtcgggtagcgccaggaagccgtgatgccgtgactggcagccagttgtacgctgcagagcagaagatctcgcagaatcggaatgatctggaggcgatgcgcaaggagagggagacggggcagcaggcgatgcgtggattggatgcgagcggtccgattgatttcggtggtgcgcgtttgactggcgtggcggaggcgaagctgtcggctgacagctcggacgtcgtgcgcggcagtcagctctatgggaccaacagccgagtctcggaacttgaggacgtcgcacagtctgtgagtatcgggtcagcgcccttcagtgaacgcgcggaagcgggtgtggcaggcgttgcgttgggaaattcggcgaagacgggcctagagggaggaactgcggtagggacgtttgcgggggccatgggaaagaactcgaccgcaattggtagagcggcgactgtctctgtggattctgcgaatggattcgcaatgggagtcggtgcacaggtcggcggagacgcgggcggcgcgaatgagggtgtcgcaattggtgctggcgcaagagtcggaagcggggcgcacggctcgctagcacttggaaatggctcccaagcagatgaagagggagtcgcgtcatttggtggtgttgggatcaagcgccgtctcgtaaacatcgccaacggcaccgccaaccacaacgccgccaccgtcggccagctgcgcggtgcgctgtccgcgctcggcggtgaagtcgatgccaacggcaacatcgtcggccccagcttcaccgtgcagggccagtcccagtccacgctcaatggtgcattggaagcactcgacggcgcagtggtcagcaaccgctcgcgcgtgaaccaggtcgagtcgcagctgcgcagcgtgttccaggacacgccctccgtccgcgccgacggtctcaaccagctcaccctggccggaacccacggcatggtcatttccaacgtggccaatggcctgattgcggccggcagccgcgatgcagtcaatggcggccagctgcactcgatgcagcagcagctcaacggccgcatggacgggctggagcagcgcatcgatgcgccgcagtcgcaggcaatggcggtggcttcggtgccggagccggaagcgccggtgccgcaggccgaaggcggccagcaggtggcgtcggtcggcgagggtgagaaacctgcaccgcagccgaagacgaaggaggacaccccgaagccccaggtcgataccgctgaactggagaagatgctggcccgtgccaacgagtacaccgatggcgcgatcagcaccttcgagcgtcgcctggacaagatggacaagcgcttcaaccgcatggcggcgatgagcagcgcgcagaccgcgatggcgatgaacaccgccggcctggccacctacaaccgcctgggtgcgggcgtgggctacagcgagggtgagtcggcgatggcggtgggctaccagcgtgtgctcaacgagaagggctcggccaccttcagcctcaatggcgcgttcaccaacagcggtgaacgcagcatgggcgtcggcgtgggcatcggctggtaa

SEQ ID NO: 500213 - DNA, 1017 bp, Stenotrophomonas maltophilia
atgctagatgccgcgatcaagcctgatgcctgtggcatcattggcaagtacaaggctgccaattcctgcaccactggccttcggcatgtatccaagtcagatttttccaaccctcactcaagctaccgcgcctatcgctgcgcggtagattcgggcacgtctttccacatgagaactcagtcacacatcattgacaccaaagcggtcaaggccgtcatggcgcagctaccagatcactgggtcgttcgggaactatccgaacgcgactatggcatcgatcttttggtggagatttttgcgcctggcttgaaagatgcgatgggcaaagatgccttcgtcgccaccggtgccgttttccacatccagattaagggcactgaagagccactcaagcctgtcggcgcgggcacgatcaactactcactccaaaagaaatcgctcgcttacatggaaaaattcagcacaccatttttcctgtttcgcgtaagcactaaagagccccagacaatatttttcacatggattcaaggttacattaaagaagtcatggatcgcgaaacccccatgtggcgcgatcaagacggcgacaccattgtgatccgcatccctccagcaaacctactctcagccgacctgaataagatcgagaatattgcatttgaaccaaaattcttggaggagtcgatcgaattttccgaaatttattcagacatctcaaacagaatcaatgccatcctccacagagcacacgacttcgaccaagatgtggcgaaagatctcaggattcgcgcctatcgcatgcggcgactcgacgtactcctcacacgcaacgattgctgcattaaccgggaaagtgtggatgatctaatcgcctacattggcgagctcgacacgcgtcaaggccgtctcgatccgcccccccacagcgataactttgagcttcttatggacaccctgctcgcaagatccgacgcgaggcgtcatgttctggagaacgatggacttacaatctattga

SEQ ID NO: 500214 - DNA, 1524 bp, Stenotrophomonas maltophilia
atggcgatctaccacacccgtgtcaaaaccttctcccgtgccaaaggccattcggccgttgcggcagctgcctaccgcgcgggcttgtcgctcgtcgatgagcgcaccggagcgcggcacgactattctcgcaggggcggcgtggtcgagagccgctgggtggtgcccttgaaagcgcccgactggtcgctcgacgctgccaaactctggcaggccgccgaggcagccgagaggcgaaaggacgcgaccgtggcccgcgagttcgagattgcgcttccgcatgagctcgatgcgcctcagcgctcggccctgacggcggacattgctcgcgcactggttgatcgctatggcttcgcagttcaagcgagcatccactcgccggggagcaaagacggactcaattggcacgtacatatcctcgccacgacgcgacgcttggatgccgaagggcttgcggacaagacacgcgaactcgacggtgggccttcagggcgcagcgaagtggagtggctccgagcgatggtggctcaattgaccaaccggcaccttgaagctgccgagatcgcagtgtcggtcgaccatcgaagcttggaagcgcaagcagaagaagcgcttgagcgcggtgatgtggtcgcggcagcgatactgggccggcgcccaacgatccacttgggccagcaggcctcggcgttggaacggcggggcatggaaaccgatgtggggaaggtcctggccaacatcgttgcggacaatcaaagaacaatgcatcaaacaagcatacggtttgagaaagcggtcacggacggggaccccgctcgtgggcgtccatcgttgccgccaaaccgtatccgactcgggccagaatcaggcgaaagctacatcgaggacgctaagggattcactcggcgaggaatcatggccattcgcgctctgccggatgcatccgaaccaccgctccaaaccctgatggagaaagcactggagttgtggcgcgacgtggtagcggctggctttgagggggtgcttcgaaccacccgcatgcttctgcgccgcctggattcggccattcgcaatgggaatgtgggtgcaaggctacgcaaggacatccagcgaacgctaaggggtttggctgcggtaaggcggcgagcttcagagtggaagcgtcgtgtggaggctgagcggcgggcagcatccctgctgactcgtgcggagcgatcgttggaggactttgtcgaacaccagccccgtccggcaggagctgcagtagtggcttggactcggcgtcggggacggcgcttggccgcggttgagcagcgcttggataccttgagggctgcccgcatgaagatcgcgggtggtcaggaggaggcttgtgagaatcaactgacagccgccgtggcagagttggaagccggcagcaaagtagccctggatcggtttgaggatccgctccacgaaacgagagaccccgaggtgctgactgcgtccatgcagcaggccacgcctcggcctaggcttcattga

SEQ ID NO: 500215 - DNA, 2088 bp, Stenotrophomonas maltophilia
atggactccgaaaagccggcaaagcaatacacagtgccccgaccgcccgagggctgggacaagacccgctggctcggcgctcaggacgagatcgagatcgcgggcatcgttatccggggcggcctgttctacacaggcccgcggctgaccacccctggcacgcgtgagaacgagcccagcttggtcaatggcgttcttgccgttgggcggtacggggattaccggtccacgacgcgctactggggaggctacgcagattttgaacccgctgaacgccacgcctacctgaagtggctcgcttcggaccgcaccgatcccagctgcgcaatccagtatgttcgattgttcctgtttggattggagcgtcgcatcttgctggattcggtgaacgatccggaatccaagcaagactggcccgctatcgaggcgatgctccgccgtttgtcgtctgcttatgccgccgtgcttccgaacgtccacggtcatgtcaacagcctgctcgactggatggcttcgaccgaagcaggcgaccagctttacaacgcgccgcttcccgcattcgaacgaagttacgaactgcccttctacatccgcttggccctggggcaatgctccttggatcgagtccccgtgcccgccgcgctggccacggcttgggtgcgcctcaatccagagattccgctgcgaaccgccgcaacgcgttgcgcggaagagttcgatcgccttttcgctctgcggtatcaagagacgttcggccctggaatggtgctgccaaaaaaccgcaccaagctgaagttcacacgccgcccctttaacccggccctggaccgaaccgacgctggcaccaagactttcggtgacattcccgatgtcaccgcgttgcgagtgcccctaaaggcactgcaggaacttgtttctcagtgcaccgaggacctcggagccttcagccggctcgtgggcaagaaccccgaggcccgccaatccattgagggtaccttgctgcttccgccagagatctggccgctggccacgcgaacagccttggccgaagtcgcttcggatgttcaaaccgccaatttgtcgatcaagctgactgacctattgggaaggcttggggcagtcggaaccaccttgggcaaggacaaaattcgggaactcgcacgagcactggaacagtccaaggtcggcatggaacccaatgtcctcgaaggcgcgcgggtgccgggtgagaacgacccaatcgttctcttcgccctgcttcccgatcaaacccatcggaccgacgctcaggcatatcaaacggcccagttgacccttcagctcggctcgacggtcgcccagtctgatggcgcgttcagcgcccacgaacttgagcacctttcacgcgaaatcgaaagctggacgcatctgagcgagggggatcggcgtcgactgcacgcgcacctcgagctccttgcgttggcgccgctttccctgcctgcgctgcgcaagaagctggatccgctcagtgaaggcatcaaggacgccatcgcagggtccatggccacccttgcccaggtcgatgggatggtctccccggaggaagtccggtttttggagcgtgtctacaaagcgctgggcgtggatcccgctcgtgtgttcagcgacgtccatgccccaacaccaccgaaagcccgttcgacattggcccgatccacgacgggtgctttccagctcgaccccgataaaatcgctgctctgcagcgcgacacggctcaagtttctgcgcttctcgccaacatcttcactgatgaggtggtggaagccattcccgatgttccgcaggaaggcagtcaggaagagacgagtgggcctgccactttgctgggtttggacgaggcgcacagcgcgctgctgcgcctcatgctgtcgcgcccggtttggacccgtgccgaactggaagatggcgccgctgacctggaactgatgctggatggcgctctggagcagatcaacgacgcctcatttgacgcctacgacattccttttgccgacggtgacgatccgttggaaatcaaccctgaattcattgagaagatcgaacaatga

SEQ ID NO: 500216 - DNA, 1299 bp, Stenotrophomonas maltophilia
atgagcagcccaatccgctccaaggaccgcgacgcggtgatccagtcgctgcgcaccggtgtcgtgccacgcgcaggccagcatttgatccaggtcgggcgcgcccgtgaagtgcaaactttggtcagtgacatcgatcggctcgccgatggcggctcgtccttccgcttggtggtgggtgagtacggcgcaggcaagacctttttcttaaacctcgttcgcgccattgcaatggagcgaaagctcgtcgtggccagcgcggacctgaatcctgacaggcggttgcatgcttcagggggccaggcccggtcgctctacgcggagctcatgcggaacttggccactcggaccaagcccgacggaggcgccctgcccggggtggtcgagaagttcatttcgaccgcagttgccgagtccaagtcgcaaggcgtatccaccgagcaggtcattcgcgcgaagctcgagcagctgagcgaactggtgaacggctatgacttcgccgacgtgatcgccgcttattggagagggttcgagcaaggcaacgatcagctcaagtccgatgccattcgctggttgcgtggcgaatttgccacccggatggacgcgcgtgcagcgctgggcgtccgaaccatcgtggacgacgcatcggtctacgaccagctcaagctcatgggccgctttgttcggctggcgggctatagcggcctgctggtgtgcctggacgaactggtcaacctctacaagttggccaacgcccaggcccggaatgcaaactacgagcagctcctgcgcatgctcaacgactccctgcagggcactgcggttggccttggttttgttctgggcggcaccccggatttcctgatggatacccgccgcggcgtctacagctatgaagctcttcagagccgcttggctcagaatacctttgccaccaacggactggtggatttcagcggccctgtggttcgactgtcgagcctgacagccgaagatttctacgtcctactcaccaagattcgccatgtctacgctgccggcgacgcgggcaagtatctcttgcccgacgatgccattcaccaattcatgacccactgcgccaatcgaatcggcgatagcttcttccgcaccccgcgcacgacgatcaccgccttcatcaacctcttggccgtcttggagcagaacccgggcgtggactggcaggacctgattggatcggtcgaggtggcagctgaccacgggggcgacggcgaactggtcgtgcaagaggacgacgagctggcgtcgttcaggctctaa

SEQ ID NO: 500217 - DNA, 132 bp, Stenotrophomonas maltophilia
atgtcgattaagcctggaccgaagcctatagctccatccaccggcgagccggataagcgtcggcgggataacaaggatacccccgggaatacccctggcttgaagcctcacaagcataagcccggcaagtga

SEQ ID NO: 500218 - DNA, 489 bp, Stenotrophomonas maltophilia
gtggcgcaacgggtctgtccattgttagtaattgcgatcctcttcgcgccgctgggagccagcggtgcgacgcccactgagcccgagctgcgcggtgagctcctgcggatgaaggatgccggtcaggcggtgcgggacctctcactgactgccgagggcgaggagagggtgcacagtgccgtcgatgcggtgcacaccgctcggctgaagtccaccgttgcggcccgtggctggccgaccggggcgcaagtgggccaagacggggcggacgcggcctgtctgctggcccagcattccgacaaggccccggcgctccagcgctctcttgcggaagccatggagcccttggtagcgaccgggcaggtcaaagcgtccagttacgcctacctttgggaccacaccaacgacccccaacgctatggaacgcaggggcgttgtgcggatatggggcattgggagtactgcttggcggctcttcgggcatggtga

SEQ ID NO: 500219 - DNA, 1761 bp, Stenotrophomonas maltophilia
atgcaacagctggacaactacctgcgatcaccccaacccggctatgccatattgatctcaggggactggggggttgggaagtcctataaatggagtcgctacgctgcggagctaacggatcgctcgcccatcactatctctgctgcgggtctggagtcgttggaggatctggagcgggccttgctccaagcatccatcaccatggcagttcctggcgtggttgctgaagtggggtcagtgcttggaaaggcgctgcttcgcgtggcaaagattgagccaaaagatatcacttggcgagcagagctcacacgtgacaagaccgtggtctgcatcgatgatgtcgagcgctttgcaggtcctttcagtgtcctattcgggttcgtcgtcaacctcatcgacagcagtggcgttcattgtctgctgattgccgacgaagttcgtgcgggcgagaacttcaaaaattttggaaggtataaagagcgtatcgtcggtgccaccatccacgtggagcctgatctgctggcgttctgccaactgacgatcaatggcattgcggaggatggtgtgcgtcggatcgttggtggaggtctctcggaaatcatcagtctcatcgagagcgctcgcgtcaccaacttgcgaaccgtcagaacggtgatagtcgaattgaagcggctggcggaagcgcttccaaaagatgcgctggatcagattttcaacagtcccctgcccagcgcggtgttcttctggacagttgccctcgcgcgcgatgccaatggccgcgagcttgtcaggaaggtcttttcgaccgatcaggtgggcatcatgcttgcccttcacgacgtaatgaaggagaagggacaggccaccgaagacgagacagcctccctagcatccacgttggagcggcttggactgtccgcagctgtccacagctggcctgcgtcacaagagttcatcgatcacatgcgtgggtcggtgggcgtcgactaccaagtgcttgccgcccagtttgggctcatcccggagcttcgttcttatgatccgctcatgatgatcggagactatgcgtccgccaccgatgagcagattcaggcggctataggtcacgcacaggccgaactggaggcgggtggagaggatggaaaagcaattaaattgtctcgcatcttaagcatctatcgaagcttgtacttcctcggcttcaaaggtgtattcgtccagacgcaggaagagtggacccagacggtgcttcggaggctggattactatctgagcgcacctgacctcatcgactgcgatggttatgaagtctggccggacgactacagcgctgaagagagggaggtcattagtaagtgtgacgagatcgtagagatcgcccgaaagcatgccaaagtcgtggcgagcacgattgcactttcctggattttcagcggggaaggcgtggcgcccaatacaagcggcacgcctgtgttcagttccgcaccgccgccggaggacttcctggcaaagcttcgagaaagcggtatcgcggctgtcatccgcctgaacaaagtatttcggatgcggctcagtgtcaccaactcgcctgattacgtgggtggggatagagcctacgcccagcagctcataacctgcatcgagcggagtgttccttctcaacgcccaatgtcattgcttgatgcggaaatcaagcaagcaactacctacctccgctccttcgtccaatacgtcgataggtatgagtgcccatccgcatag

SEQ ID NO: 500220 - DNA, 315 bp, Stenotrophomonas maltophilia
atgagcgaaaagatggaagaagagatcaagcgctggaccgcccggcgcaagtcggcactggtccttgagatcatccagggcaagacgacggtggcggcggccagccgccagttcgacctgaccccggccgagatcgagagctgggtcgaggacggcaagcgcggcatggagaatgccctgcgtgccaagccggaggacgtgcgcgagcagtatgcgcggcagctcaaggatctgcaggaggcctatggcgaggcgatgctggagatccgcgcccgaaaaaagctggcgtccctggtgggaaaggacgagagctga

SEQ ID NO: 500221 - DNA, 696 bp, Stenotrophomonas maltophilia
atgcagattcgatttgcgcgagttgcaactcacgcatgccaacacgatgttggagatgaagttgctccccccatgatgcaaagatacgtagtgatcctcgtggcaactggcaggctcaccaaggccatttacagcaccacccggtccctcgagggatctgtagcagtagtagcagcgacgctcctggagcaccagcaatgtcctaatctgctcagtgctgtgcgagcctggcgccgccttcgacttcagggcccggcgaaacgacgttcgtcggcgcgtctcgcgggcgcggactttccaatgcgcatgaaaggtattccagggcaagagcacttccagatcggaggactggaagaaacggcgatcacctgctctgcacgcctcgtgaacgctccaatcctccaacgtcccattgcagcgcgcgcatcgcccgtgtttggtaaaaaactgcatcagctcgtcgctgattccaaaacgtgcgttgaggtccacgcgctgaaaccggcaaccgatcatgccgtcggaaaagacctgatctcccaggcgttcatagggataacgccggaccataccccaccctgcctttgtcaaacatccgagaatggtgcccgctttccctaccggctgccagcagaggtcgcccgtggctggtccagaccttctcgcagtaaccgccgcaccaactcgctgacgtga

SEQ ID NO: 500222 - DNA, 261 bp, Stenotrophomonas maltophilia
gtgaacatcctcccgcgttaccgcctgttcctgttccagccggttcttcagctcccgtggcacgcgaacggcgacttgcacgtaaggtggccggcccgcgtggacagcctcaccaaggtgagcccctacgtcaataccaacgcgtggcgtgcgccgttgagggcgccacgccacccgctggcgttgggcatgacgtccgatcgacgcgaccggacgaccttttgctacgggaaaagcatgctagacccgaaaagggcttaa

SEQ ID NO: 500223 - DNA, 1038 bp, Stenotrophomonas maltophilia
atgcgcataaaatcgttaaccgtcatgacggtgttcctcttcctggctgcttgctcaggcaacaaagcgccagcaatctcactcgattctaagcttaagtgcgagcagctcgccgatagccagtcgatgggcgatgactttgcggtcaatcgccagatagagacggtttttcaagccgccgctgctagctacaagggggactcagatgtcgagtattactttcagaacgtcctaaaaggaaggtccaagccaagaaaggacgtggatcaagacattatttcccaatgtttggctgatacagggcgttccttggctgatgttttccgtcaaacggtgaagtctagctatgatcgacacggaagagacgtcgggcttgcgagctgcaaagcttcgactgatggactcctgccacccaatgcggaagtcaattatctctcttccgttattgaagagcgacgagctgcttcggttgttgggttcatcttcaagcctggtaaggaggatttggaggcatatcggcaagaagtagaagtggcctgcgctgcctcaccggaacggctagtgtctcgcgttgcggtagccctggtcgatgaaaagataagagaagcgcagagggcgcagcaccagagggagcaacaggagcaggagagcgaagatgagagaacgttgacatcggtagcgcagatcaacgctcttctcgatgcctctgaacctgtctcttgtcaattgttagcggatgtgcaaagtgataggagctacaggaccggtgacgccgtagccgaagctgtcgaacgagcaaagagcgtggtgcgtcgtagatcctcgcctgcctatgctgcagtgttttatggtcaagcttttgatattggggaatgtgcgaaagagggactaactctcgagcagggtgtccaagccaagtatggtccagatacggtggagaatactaaaaagctgtactttggagatgagatggagatggagagggcggctgcctcggaaatgcagttgcggaagcaaatttatggtgaccagccttag

SEQ ID NO: 500224 - DNA, 237 bp, Stenotrophomonas maltophilia
atgagcaaaccaaccctaacgctgtatcgaatgagcgccgactacactggcgagcacctccacgttctgttccaggtcgaccatccaacgctgccaccagttctaggaacactggagccggtcgaggtgccagccgaccatccagtcaggatgactgagagagagtgctggctgcatcgatgcgacctgatggaccgaggatggaccgtgctggggtcgcagcacaccttcggatga

SEQ ID NO: 500225 - DNA, 1113 bp, Stenotrophomonas maltophilia
atgagccaacggatcattggcctggcctgtatggccatgctcgctggatgcaacgcacccactccaccgcccacggcggggcccgaacctatagcgcttccggcacctgttgcagagcccgaaccagtctccgttccggaggaagtacccgctgctgtggccgaggagccaaaggcacacgccgatgatccggcggtggtagcgcgcctgagaaagctgatcaaagaaagggacgcattgggcacgaaggtgttccgggctggcgtgtccatcgatggggcaagttcggccggcacggcatacaacgaaatccacatccctgagcacacgtgttttgtgctcggccagctgctggacaaggcggacttggtagccccattggctatcgaatacgagccggactacgagactcaaaccaccgaaaatgcgtcagatctccgcatcatgggcaattccttaggcaacttcgccagcgttgctcagcgcgtgttggacatgccgcacgacgaacgtgtgatcacttggaacctggactgcgccggccagcttggcctgcccaaagcctacatcaagcaggagggacaatcctcgttctacgtggtgacgaacgagggccatgccctgaaggtgttgggtgacatagaggccgggtttgcgcagaaggtcgaagacgccatcgaggctaaccccacggtagaggtcgtgatgctgggaagtggcgggggctatatcgatgaagccatgaaggccggtgcctacattcgacgcaagggactggacaccaccctttacaacaactgctactccgcgtgccccttggtcttcatggcaggggttgaacggctgaactggtcgccctaccccaagctggggttccatcagatttacacacccgatggccaagccgtcccgcttgacagccaaccctaccggctcgtgtttggctacttgacccgcatgggcattgaacctcgttacgtgctgcagaaaatgtggtcggcgccgccgtcgggcatgaccaacgtggacggacaggacgaggacctctgccaggccaacatcaccacctggattcagcggggttgttccaaccgagactacggccacctgtga

SEQ ID NO: 500226 - DNA, 285 bp, Stenotrophomonas maltophilia
atgtggctgtgctcgcccgacgagttgggcctgcgcccccgttcggccgccctttttcgatgcacggcagaacacctgctggcccgccaggacggcgggaaggacgtggcagacaacgtcgtggccgcgtgccacctgtgcaacctgcggcgacacaagcgccctaccccggccccctcacccgacgcctatcgcgtccgtgtccagcaacgcatggccaaggggacttggcgccctgccctgtccaaggtggccgcccacaaaggctttcacgccttatcatga

SEQ ID NO: 500227 - DNA, 3288 bp, Stenotrophomonas maltophilia
ttggcgctggacggacgcacccaccgggtcaacgtcgaggacgaggccacttaccgcgtcaacaccggcaccttctggaccgacatcacgttccatcctgggcagggccgggaagtaagggccgacgggctgcccaacgtccagggcgccgccttggttcaagcgttgaacgtggcattgacagagaaacgcctgcgcgaggacgtggcgttcctcaagggccagcagcgctcgatagacgtgtggctggaccacaaggcagaccaggagcggggctgtttggagcagcgccgctggttcacccacgagcagcaggaggacgtcctcgctgcccgccccaagatggatgcggccggtcttcgatcgcgcctaaaaaagccgggcgtggcggttcgattgggaccggctgcccaggcgatcgagcgctcgctggcagcgtgggaagccgaccaccgccctgcatgggccgcgctcaacgctgcccacgtggaccgcgaattggtggcctgcaaagacttgctggaccgggtggagagcagaccgctcaccccggaacaggcaagggccgtggtgtgcttcgacaaccgtgtgcaggtggtggcctcggccggctcgggcaagacttcgaccatggtggccaaggcggcctacgccatccaccgcgggttcgtggatcccaagcgaatcgtcctgctggcgttcaacacggacgccgccgaagagctcaagaagcgcgcggtcttggcgtttgagcgcttgggcatgggggacgtaaccgtggaggcgtccaccttccacgcgcttggtttgcgcctcatcggcaaggccaccagggaaaagcccgacgttcccgattgggccaccgacgcggctggtggcgtgcgaaagctcaccgacctcgtggaccagctcaaagaccagtcgcccacgctccgccgccagtgggacctgttccgcttcgtctttggcaaggaccttccagcgtttggtgcaccggagccgtccgacgtatgggacgcccaaggcaagggcgcgctggtcaccaaccgcggcgagcgggtgaagagcgtggaagaggtgatgatcgccaacctgctcttcttaaacggagtcgactaccgctacgaggccccctacccccaccgcaccgccgacgaaacgcaccggcaatacaagcccgatttctactaccccgacttgaacctgttccacgagcacttcgcgctcgacgccaatggcgtgccaccagcgcacttcgaaggctacatggatggggtgatctggaagcgacagcttcacgcggagaaaggcaccgagctgtttgaaaccaccagccacgggttgcgccacggcgacgacttcgatcggctggagcgcgaactgaccgaccgggggttggtgctcgatcccaaccctgaccgggagattcccaaggaaggccagcagcccatggcatcggtcgagctcgttgggctggtgcgcacgtttatgagccacgccaagagcaacggcttgagcgcatcggatctgcatcagcggttggacgcgatgcccgccgacaccttcaagctgcgctaccagatgttcctggacatcgccgttccggtgatggcggcgtgggacgaagccctggcagcagaggatggcatcgactttgaggacatgctcaacctcgccgccagccatttggaaggcgggcgcgtggaatcgccttacgacctggtgatggccgacgagttccaagacgcctcgcgcgcccgggcccggttgtgccgtgcactggtccaaggcaagggccgcttcctcttcgctgtgggcgacgattggcagtcaatcaaccgctttgccggcgcggacgtgtcggtgatgaccggctttcgccagtggtttggtcacggccaagtgctcaagctggagcaaacgttccgatgcccccaggcgctgtgcgacgtctccagtgcatttgtctccaagaacctggggcagatcgccaagcgcgtgcattcggccacccctgcccatggcccagtgctccaagcgttccaggtggacaccaaggaccagctggccgatgcaatcgaccgcttcgtggtgaacttggccgagggggtgcgcgatggcacgatcccgccggggcgcaacggcaaggtgtcggtttatgtcttgggccgctacaacgccgatcggcagtatgtgccgatgaggcaaagccggttcaaccgctgggtggaggtttcctttctgaccatccaccgctcgaaaggcagcgaagcggactacgtcatcctcccggaaatgatcagcgccccgcgtcggcgcagctttcctaacacccgcaccgacgatccggtgttggcccttgccatgcccgaaggagacaccttcccgctgggcgaagagcgccggctcttctacgtggccctgacccgggcccggcgcaccgtggcgatgttcaccgcccgtggtcaacgctcgatgttccttcgggagttggtggaagacgggatattggggatcactgacaccgatggcgaagccgtcaaggaagaagcgtgtccggcatgcaagcaaggcgtgctggtgctgcgcaccggcccttatggggagtttcgctcctgttccaatttccccgtttgcagctacaagccgaggcgacgcggtgtagacccctctccgctcgccaccccaccgtcgctcccgaaacgcgcgtcggcggtgcacccgagccagccggtccgctctgcctccgttccccagcctacacctcccagtcggacactcttctccttgctcgaatccttcaacaatgggctggcggagatcaatcgcaatgtttcccgcgccagcgctgtgcaaagcgcgacgtccgacttgaagcaccgaatcttcgctgaaagaagcacgatagaaagtgcattggagttggcgcgatccgcaatctcgttggaagaaaaactgaaagaccctcgcttcaaggaagcctacgaatcgctgtccgaagcactggatgcaaaccgccacgagcccgaagaggcgcagtcgtgggtggaaaccccactgccgacgttctcgcgcagccagcagcatccagacgaagacattgatgccgcgattcagcggtcgtttgatgggctgagggaggatcgggacgcattcctgtccgcaatccatggtcagctcgcaggggactccgttctgcgccaccactttctgacttcgatcgaaaagctgcacggacgccactatctggtagccctagaccccacatcctcttggcaccgcatctaa

SEQ ID NO: 500228 - DNA, 300 bp, Stenotrophomonas maltophilia
atgaccatccaacttgactacctcctgtatggcctggctgcagcggcggtctctggcgtcatcttcgccttcaagcgcgatgcactgatccgcagtcgcaacgcctccaagatcgagcacctgaaggccggcctccccgcctccccgtcccatcgggcttcgctcgatgaggtcgacgacaccgttaaaaagatcgacaacagcttcttgctgcaggacgaggatccctacgggaaccatctgtcgaccagcggtgagccgcatggctactggggccggaaccgtgtcggcccgggctga

SEQ ID NO: 500229 - DNA, 306 bp, Stenotrophomonas maltophilia
gtgtcgcccatcaccacctacgctctcatcgcggctctcaccgtggtcgttgttgcggctctggtctacgccttcaggcgagacgcagaatccgaacgaactaaaacggcgaaggtgctaagactcacgcaggcgctgcccgcttcacgtccatacaacgaaacagccgccgaggcggaagtgacactgccgaaaatcgagacatccgcgttcagcgatacggaagatgcctatcgtaggaaccacgtctcggtgatcggtgaacgcgatggattccacggaacaagcaacatcggccctccttaa

SEQ ID NO: 500230 - DNA, 852 bp, Stenotrophomonas maltophilia; identical to SEQ ID NO: 498401

SEQ ID NO: 500231 - DNA, 957 bp, Stenotrophomonas maltophilia
atgccggagcatccgatataccgtaacgcgctcaacgcgatacaggttggcgtggaggatttcaacgaagggtccccaccccgactgtcttcagccgtccgaaacctgaccgccggcattctcctcctgtgtaaagagaagcttcgccgcctgtcgcccgaagacgagatcttgatttggaagcaaatcagcccgtcgctggatgacaatgggaaagtcatctttgaggggtctggaaagacgacagttgacgtctctgagatcatttcccgctttaaatcgctcggcattgaagcagatggaaagctcttagaccgtatcacacgagtcaggaaccgggtcgagcaccaccacgttgatgacgtgggtcagatccgaggcgctttcgctgacggtcttcttttcctctctcagttcatgccgaagcacctaggggtggaccctcaggacgagatagacgacgactcctgggccctcctagtagccgagaaggagatcgaagaccgcctcagagcagagtgcagggcgtcttacgctccaatcgacgggcctacctcgctgacggatgctattgagcgcgaggggtgccctgagtgcagctcccatttggtcaggcaaactcaagcccaaaacaccaacccatttgaggcccagtgggcgtgccgagcttgcggtcatagcagctcaaatcaggagtggcttggtcgcatccttcctaacttctttgccggcgcaagcttcctggctgcaaaggatggcgggcctgaccccctggatacctgtccagaatgtaacaaggaggcatatgttcacgaggaggagatgtgcctcgcctgcggctttgagcttgagccgatcgaatgcgccgtctgttcacagccacttggcctagacgagtatggcgaaacaatctgttcatatcaccgctatgtcgcagagagggagcgagaccggtag

SEQ ID NO: 500232 - DNA, 1785 bp, Stenotrophomonas maltophilia
atgcgagttgcagatcttgccatccataacttccgtggcgtgagtgagggctacttgcgcttcagcaaacacgtggtgctagttgggagcaacaacaccggcaaaaccactgttatcgaggccctcaccctgatccttggtagggatcgtctgatacgggacctcacggagcacgacttctttgggtcggatccactgccggatgaccgcatcaagctgattgcgactatcacgggctttgaaggcaatgaccccaatcagcactccgaatggttcagagatggacgcgctgtcccgaagtggttggacgaggcgaccggcaagattcacccgttgccgacagagaccgctaaacaactctgctgccagattgcagttcaagcctattttgaccggctgtcactcacagtggaggtcgtgcgctacttccacgaccacgatggcgcagtcgaccctttcgatgaggactcgccggtagcggttccccatcggctcatacagcattttgggttcttcctggttagagcaagtcggacctgggatcgagtgctgtcgtggggcagcgagctctttcgcaggaccctccatgccgcagccgcgcagccagccggcgctatcattgcccagcgggaccagctgcgatcgcctgaaacagccattgaggacgacaggcagattgcgcccctagttaacagcgtgaacgatgaggtcgcgcgctgtattgcaggctcgcctaagctgaggcttcgtgtcacttccacggacagccgctcggtattggatgccgtggcggcccactacgctgtgccgaacggacctagtgtgcccgccgcccgccaaggaaacggtttgatttcattgcaggggctgttcctcctccttgagcttggaagactgcgtgctaaaggcggcgaaggcttcaccatggccttggaagagccagagcttcatctgcctccggcaactcagcagcagattgtgctgagagtccaagcactgtcctcacagacatttgtcaccacccactctccaaccattgccgcgatggctgatcccacctccgtcttgctgcttagaaacactggtgggattttgaccgccaagcctttcttggagaaaaatcttgatggtcaaacggctaactggcgacgcaagttctatcagcacaaccggactgaggtcattaacgccctcatgcactcgtttgtgctggtccccgagggccgttcagatcacctgttgctacagacacttctcaagccactcatgcttagacaaggctgggcaggcgagcatgctcactcattcgggttggaggtcggcctagttccaaccgaagatgccaaggttgttgagacttggaccgaccttcagcggttgcatccgtgcgtttgctgccttgtggacggcgacggagaaggcttccgatactccgcggaacttgctcaggcgggggctcgtcccggctctatcatcaggtggtccgatggtcagatgctggaagatgtcctgtcttggatcttctctgctgacccagctgcgattgcggtagtaacgagggatactccgacgttggcggatgccgatgtgcccatggtcgtagcgcatgcaaaaacgaagaagtgcgacttggtgctctacgagtctatcgcggatgccatcgtcagcaacgaggcatgtagagggcgagcgtcggagctattccaaggcatggcgttggcctgcgccgatctggagagcgcccgctttagcagggccgagaacatctgggtcttccagccatga

SEQ ID NO: 500233 - DNA, 1266 bp, Stenotrophomonas maltophilia
atgaccgttaccgtcttttccggcggggcgggcagtggaaagacataccagctgatgcagaagcttgcagaggtcattgccgagacgcctttggagatcggaagtaaggttttagcgctgaccttcatgcacggcgctaggcgacgcttagatgatcgacttgcccgggttccgggaattgaacgtcgttacgaatgcgccacactagacagcttcgccgcccggcttgttcgacgctggcagtcgctggctacccaggagcactacggtgagccgcgtgaatccgaatacgaagagacgtgccgggtagccgcagcccttctcaaccaccgccgcgtcgtgctctgggtgaaggcctcatatcccatcttgatcattgacgaggctcaggatctctctgcaaaccgcctagatgtcgtccgtcacctcgcatcggaactgacaacgctcattgctgccgatgagttccagtgcctggacggtgaccttcgaccgaatccggcatggggctggctccaaacccaagaagaccacgtaaagctggagcggacgatgcgcacaaacgtggattcattgctcaacgccgccgctgcactcaggtctggcttggatctccccatcggcccccggttctctgtcagagcgacagcgaacgctgcactggcgtctaccttcttgagtaaccagatcgcatggaaggtaagggagaagtccttggcagttatatcccctgtagtgaaggccttcgcagaagagactgtgatgacgtctgccaccaaagccaccaagcagggcaatgggccctaccgagtcgattgggaacaggccgaggaaaaggtcgtggaagcactcttggctcggatagtggctcccgctgttgctaccccagccgaggctttggaggccgtgagagcgacaggcaatcaaggtctctatgatgagtttgccaactgggtggaccgcttgattcggaccaagcgtgacgtagctatctctcgagagatgctctcagccgccgttaaacagatttgtgcaagccgcgtcaggttccagcgctcttcggacttcggttacaaggcgatgtccgtgcacagggcaaaaaacagagaattcgaccatgttgtggttctttggcctgctgcaacgccaggagacagtgaacaaaagcggcgattgctctacaacgcggtgacccgggcaaaagtggagtgcctggtactcgttcaggcgaagaagcacatcgatgcgccgcccttcaagcaatag

SEQ ID NO: 500234 - DNA, 333 bp, Stenotrophomonas maltophilia
atgccccaacccaagacgcccgcgacggtctatggcaagcgcctgcgcagtgcgcgggtcgcgaagggttggacgcaagcccagctcgctgagcgcattggcatggtcgactcggtgtcgggagcgacgagggtgagccgctacgaaacagggcagcacgacccagacccggccacttcagaggctctggcgaaggcgctcggtcttccggtggcctacttccacgccacgtccgacaccctcgctgaggtcatcctgctggtctcacgactgcctgcgtccaagcagaaggaagcgttgaagaggctgcgcgaactgtcagaatctgcttaa

SEQ ID NO: 500235 - DNA, 465 bp, Stenotrophomonas maltophilia
atgacgactacaccctcatatgcgcacatcggctgcgcgactgtcctgctcggcggggccggcctggtgttcacggctggcggtcttgaggccctgcagcaggaggccactctgggctggctcgctatcgctggcggtttggccatctggaccgtcttgggctttctctactggatcaacgcccgggcataccggcgtcaggaagatgccaaagggcaaccgtacgccccaccctcgccccagcgcggcgggttctggaaagggttcttcgtgacctggaccatcgtggtggccatccacatggcagctttcctaggaatgggttttgccgacctgttgccgcgtcctgagcaaagccgagcaatcttcagcctgctcgtcctggcgttggtgccggcgcacgtggtggtgcccggtctggtggcaattgtctacagcatgatgcgccggacctcgtccaggtag

SEQ ID NO: 500236 - DNA, 774 bp, Stenotrophomonas maltophilia
atggcggacactggagcggacggggagcagacgaagaaggaggcaagcaacccgggcgcgaagtcgccttcgcacatcgcttctgcgctaacaacgatggcgggcggcatcttggccgtagctaccctgatcgggttcttccttcatttgtccggtgatgtcgcgcattcgacctacttgacggagatgggtgttcctgcgggcctcttcccccaggccaccgatgcaaaaatcatccatggctactacgtggtcatcatccaaggcattcggctgatcagcgacattccttggggcatcgtgtttaccatgatcggaatgtccacgctgtccattgtcatcgcccgtgcgcccgtcaaggagaacacagcgatgcgagggtggcttgagcggcgatcctattggatcagacaacctatcgttgcgctcctgggatcagcggtgttcctctctgccgcagcgagcgtcggttgctttgtcctgctactggccatcgtgccgggccttgtaggggagaagtttggcaaaagcaaagccgacgaaacaaagaagctgcttcttgcggaagcctcggcaaaaggctcagaactctggaaggaatcagagcgcctcgccggaggccgcgttgttgaggcgagcgacagctggatcgcaatctacgacagcgagctaaagatggtgcgaattctcaaaaacgatggcgttgaaataagaactcacctatcaactgcaaaggcgtcttatcaggctagtccacccatgcaatcgcaataa

SEQ ID NO: 500237 - DNA, 249 bp, Stenotrophomonas maltophilia
atggaaataaaacttgattccaacggcacaactatcggccccgtctcggtcgcgaagcccgagaaaaaaaagaccgtggtcgtaaaggtcaggccacagtctgctgatgaacgctctttggccaaaactgtacaccagtggaacttcaatccggttactgtgaaaagcaaccctcctgagtcaggcaaagttggccagccgagcaggtttgggaagctattttcttccttccgggttaagaaatggtga

SEQ ID NO: 500238 - DNA, 1728 bp, Stenotrophomonas maltophilia
atgagtaccgagaggaaggccgtggaggcgagaaaggtttacgttgtgttccaaggcggaggcgcccgcggggcagtccacgttggtgccttgaaagcactagagctagcagaatttccgccgaaagatctatcaaagccagcaacgagacctgaaatagtaggagtggctggtacctcggccggatcaattatggccgcattagtgtctgcgggctatgaatctgatcagatcctagatttgagcggaaagagtgatcatcacgtcttgaaagggctggaaggattttcttctggctcacttaccgggctcttcacggagcgtggatgggctaggataaagaaggctaggtggattgcagaaaataccgccattcttaagtttatggcggtggacttgctggctggattggtctttgccttatttgcggcccctacactattcgcgctttcattgagggctactggatttctggttgtattcagtgtgattgttgtgctcttagttgctgggttggtttcattttttaagttgtgcaagttgctgagagaggggcttgctccccttgatcaagttcgtgatgtcattgatgaggtgttggcaaattcaccaataaaggacggtatttccggtgggaaggatattacgttcgaagagcttaaaaatgctggtggtaagcccctccggattgtcgccacaaatttgacaaagaagacgttgcagttgttctctgtggatactactccggggatttcagttgccagcgcagtgtgtgcttccatttgtcttcctttaatatttaaaccgtatcctataaggatgccggatgggagcataaatgagtttgcggatggcggggttgtctccaatctgcctctgtgggcttttgatgatgagcgaatgttccagccagattgttggacggttgggatttcactacggtctgcggattcatccagtgctgcatccgggcattggttaggggcgatcatcgatgccgttgtgtccggtcctccggagattcatgctcggaatatcccagggctggtgattgtccccgcgaagacaaggctgcatctattggatttcgacaagagccagaagtgctatgttgatgaggcggttaatgttgtaaatgaatcgactattgagctttacaaggcagttgcaaccccatttattgagttagtagtgcagcgttttgtaggctcacttgaagacacaatacgtagcgctttgattgaggcggacttgccgcatgactttacgctgaaggcggcaattgccacgaggcgaggtgacgaaatcctcaagctttggcctaggtttgaggtgggatacggcccagaagaagcggcggagcgtcggcgtcctattgctaggactgtgctgcgacaggacaaggtgttcgtccggcaggctgagagactgggcgagcaggcggatgatgatctgttcacagatacttcagtttggccactggctgacagcctctggtgcctagccatgcctcttgtgctggcaggggataccacacagccggatccgcctgtactggtgattgagtcatcgtcattgactctggatggaatttgcgctatatacggggcgggtgatttgaaaagttcgttcacctcagtgatcgattccgtcaagcagattttgttagctgtggataaggattcgaagctgatcgatagcgtcagaggtgcgcagctatggaaataa

SEQ ID NO: 500239 - DNA, 1479 bp, Stenotrophomonas maltophilia
atgcgagtagcgcactacttggtccgcggcacgactggccgcttctacgttcggctgaaggtgccgagcgatcttcaatccctgctgggctgcaaagtcatcaaacgcgccaccgcgacgacctgtgcgcgtgtcgccaccgcttgtgcgctggtgatgcaggcaggctatgctcagatcttcgctgccctcaggaatgacggtatgggaccggagctggatgagctcttgaagatgctcaagggaaagcctatccgcgagttgacccttcaaggggtcaagctgccgggtggtgtggagctgggtcgtgtcgagatcaacgacgatcgtgatcgtgtgttgtttcaggagaccgttcgcgatctcttggcgctcgaccctttggccgccgccgtcgaaggcgttgtgccgccctcggcgcctcttccctctcgaccggtggacaatgagcggccacccgtgccggtgggtatcacccttgcggatgcgcgcgagaaatatctgttgggcatacaaggtaagaacgttggcaagaccatcgttcagaagcggaaagcgctggttgacctggagctcttcttggcaggacagcgcaagaatggccgaccggtgctgttgcaggagctgacgcgcttggacttcgccgattggttcttgcatgagcagtccttggggcgggtgatcacctacatcgccaaccgcttctcggtttgcgtgaccttcctggactgggctcaaacctcgggcctctatcccgtcggggataaccctgcggagggtcacgctcgggtgtcaaagcaggtcaagaagcagcgggccaaaacgcacggctcgcaggcattctctccagaccaggtgcagcgtgtctttgaccccgagaacttccggcaactgaagggagatgcggctaagtggatcccgctcatccttctctacacgggtgcgcgttccaacgaagtggcccgcttggagcttgaggactgccgggaggaggagggcgtcccgatcttccacttcacctggttgggcgaacacaagagcctcaagaccgacgccagtgaccgaaagacgccggtgcatcccgacctcatcgcgttgggcttgtgggagcgggtgcgtaggctgaaggcggctggcgagaccaagctctttccggagctgacgtttgacgccaagaatgggcctgccggcagagctcagcacgccttctctcgctacctggtcaagctgggcatcaaggcgcgcggcggcggcagggtggggcaccacagcttccgtgacaccgtgatcggcgcgctcaaagcgaagggcgtccaccgtgagctccgggaggagtacacgggccacgagctgtccgaccggcaagaacatgcccacgcttatgagacggagttcgcgccgcgggcgctggccgaggcttgccacccggtgctccactggggacttcggttgggcaggggggacttgggtgaggagtga

SEQ ID NO: 500240 - DNA, 2070 bp, Stenotrophomonas maltophilia
atgaaaatgacttcccgccccgcgggcgcctgcgcgcgcctgccggttgcccttggcctggccgtggccacgtcactggcctacgctgcgcccgccgaagaggcgcgcaccctcgacacgatggtggtcaccgccgccgcaccatcctcgccgctgcactgggtgaccgatccgcgcctgccgcggcagccggtgccggccagtgatggtgccgattacctgaaaaccgttcccggcttctctgccgtccgcaatggcggcaccaacggcgacccggtgctgcgcggcatgttcggttcgcgcctgaacatcctcagcaacgacggcaacctgatcggtgcctgcccgtcgcgcatggacaatccgctgtcctacatcgcgccggaaagcttcgaccggttgaccatcatcaagggcccgcagagcgtgcgctggggcgcaggtgcctcggccggtaccgtgcgcttcgagcgcgacacgccgcgcttcgatgaacccggcctgcgtgccgatgccagtgcgctggtcggttcgcgcaaccgcaatgaccaggtgctggacctgaccctgggcaatccgaccggctatgtacgcgccagcggcaaccgctccgaggccgatgactacaaggatggccacggtgacgtggtgccgtcgaagtggcgcaagtggaacggtgacgtggccatcggctggacgccggatgccgacacgctgctggagatttccgccggtgccggcgatgccatcgcgcgttacgccgggcgcggcatggacggtgccgcgttcgaacgcaccagctatgccgcgcgcttcgaaaaacgaaatctgcccggtgcgtgggacacgttgcaggccaacgtgtactacaacgaagccgaccacgtgatggacaactacacgctgcgcacgccgaatcccaacagcatgatgccgatgccgatgccgatggcgtcgaacgtggaccgccgtacccagggcggccgggtcagttccgagtggcactggcaggacgtgcaactggtggcgggtgtggacggcgaagacagtcgccatcgtggccgcatgggcatgggccgcaacacctaccgccaggccgcctgggagaccgatgccaagttccgccgctacggcgtgttcaccgagttgaccctcggcgccggcaccgatcagcggtggatcagtggcctgcgcatcgaccgcgccagcgtccgcgatgagcggcaatcgatccgcggaatgatggggaacaggcccaatccgactgcgggccagcgccgcaaggaatggctcggcagtggtttcctgcgctacgagcaggacctggccgacggcctgacctggtacgccgggctcggccacagtgaacgcatgcccgactactgggagctgttctcgcccaaccatggcccggccggcgcagtgaacgcgttcaccggcgtgcagcccgaacgcaccacccagctcgacgtcggcctgcagtacaagggaccgcgcgtgcagacgtgggtttcggcgtacgccgggcagatccaggactacatcctgttcacgtaccacggcagcggcatgatgggcatgagccaggcccgcaatgtcgacgcgcgcatcgccggtgccgaggcgggcctggaagtgagcctggccgggcagtggaagctgggcggcacgctggcctatgcctggggcgagaaccgcgaccagcagcgtccgctgccgcagatgccaccactggaagcacgcctgagcgcgaactgggaaggccagagctggagtgccggggcactgctgcgtgcggtgacccaccagcaccgcgtggccgagggccagggcaacgtggtcgcacaggacctcgggccgagtgcaggtttcgccacgttcgcgctcaacgccgcgtaccgtttcagttcgcagctgcagctcagcgcgggcgtcgacaacctgttcgaccgcgcctacagcgagcacctgaacctggccggcagtgccgacttcggcttcccggccgacccggtgcgcatcaacgagcccgggcgcagcctgtggatcaaggtgaactaccggtactga

SEQ ID NO: 500241 - DNA, 639 bp, Stenotrophomonas maltophilia
atgggtttgcgggggtgtccgcggcatggatgccgcggccaagcctccacggacggattcacggcgtcccccgcaaacccatcccgcccggccacggacagtttccgtgtgcgtccaccacggaaaagaaaaagaagatcaaaagcagaagcggatcgcttcgctacgctcgctcggagccaagcatggctcggctctggagaacgtccgtgcgcggaaaactgtcgaaggcggggtgggttggatggcgggggtgtgagccgcatgggcccgaggcatgcctcgggcgggttgggcaggacgcccaacccgggtcttgccgtgtgcgcaggacagcgcacacgagcaagcggcgaccaagcctccatggatggattcacggcgtcccccgccatccgacccaccccgccaacccgcagcaatccagctgttgctgttgctgttgctgttgctgttgctctgttgcctctgcaggtgcagggctgcaagccctgccaaaacacctacgtcacccagcctgcaatcaccagcagggcgaggatcgccagccacagcagcagcatccgccacaccaggctcatcgcatcacgcaggtccggcaaccgctgccacaccggcaacagccccgcctcggtgtag

SEQ ID NO: 500242 - DNA, 1446 bp, Stenotrophomonas maltophilia; identical to SEQ ID NO: 498039

SEQ ID NO: 500243 - DNA, 1083 bp, Stenotrophomonas maltophilia
atgacgatcaatcgaaccaccctcaacaccggcctgggcctgggcgtgctggccctggccgtcggcgcgtggctgctgctgcgcgatggcggccaccagaccaccaacaatgcgtacgtggtggccgactacaccctggtagcgccgaagattcccggcttcgtcagtgccgtggaagtcgaggacaaccagtcggtgaaggccggtgatgtgctggcccgcatcgacgaccgcgactaccaggtcgccctgcaggcggcccgtgccgacctcgccaatgcccgtgcacagctggccaatgcgcaggccgcactggcccagcaggactcgttgatcgcgcaggccagggccagtgtcgatgtcagccgttccgaactgaccctggccagtgccgaccagcagcgttaccgcgaactggcccgtgacggcgccggtaccgtgcagaacgcgcagcaggcgcagtcgaagcaggccgtggccagtgcgcatctgcagcagggccaggccgcgctgtcgaccgcacgccagcgcaccgacatcctcagcgcgggcgtgcaggctgcacaggcggcggtgcagcgtgcggaagcggcgcaggcacgcgccgaactggatctgtcgcacaccgtgctgcgcgcaccgatcgatggcatggtcggtcgccgcgcggtgcgcgtgggtgcctacctgacgccgggtacgccggtggccgcggtggtgccgctgaagcgcgccttcgtggtcgccaacttccaggaaacgcagatgacccgcatgcaggccggccagcaggtcgaactgaaggtggacgtattcccgggcaagccgctgcgcgggcacatcgacagcattgcaccagccaccggcgtcacctttgctgccgtcgcaccagagaacgccaccggcaacttcaccaaggtggtgcagcgcattccggtgaagatcgtgctggagccgggccagccgctgctggaccagctgcgtgccggcatgtcggtggaagccagcgttgacctgggcagccgcgcgcgcgcgcagagcgtgcagcacagtccgggccacaagagcggggagggcgcatga

SEQ ID NO: 500244 - DNA, 1014 bp, Stenotrophomonas maltophilia
atgcgcaggttcgggggaacaggcggtgtgtcgatccgcttcgggggatttgaagtttggattcgaatgcagagtgcggcaggcatctggctgtgttgtgtgctgctgatcggccttggcctgtcaccaaccgcaatcgcccagaccacggtgacgtacatccacactgacgccctgggctcggtcgtggctgagagcgatgccagcggcaacgtgaccaggcgcaatgactacgagccctatggggccgtggtcggtggtcaggtcacggacgggccggggtataccgggcatgtgagcgactcggctaccgggctgagttacatgcagcagcggtacatggacccgcagttgggggtgttcctgtcggtggatccggtaacggcgcaagagcagccggttgggcagttcaaccggtaccggtatgccaatgggaatccttacagattcacggatccggatgggcgagtggcttaccaggccggtagtaccgtctacattcccatctactatcagggcgcaggggcgacccccgacttcatcgctggccaggtgaaggcggccgccggtttggttactgaagacggtacgcggttcgtcatcgttccgcttcgcaacaacatgtatccccgtggcaacatcatggacgtatcgccaggacagaattcaaatacgatccgtggcgaaggcatcgtgaggggatacaacggatcggtggcccatatcgactccacccgcagtgatgccaagggggcgaccctgcatgattctctgcactttgtgccgggtttgggggatggtcggaagtccgatggctaccttgaggcggcgggcaagggcggggggcgtgcattcactggttacaagcctggattcggcaaggaccagatcatggccaataccggtggcaacctgctgaagtcgtttgaaacaagcttcatgaaccacgcatacaacggcaacggtagcgagcagcagttcaagacgctcatcgaggacgacaagaggaaatga

SEQ ID NO: 500245 - DNA, 435 bp, Stenotrophomonas maltophilia
atgaagaagatcctgatgtatctggttgcgaccatcgcccttgccggttgcgcgacgcgccagatcagcgccgaccaggcgcagccggtgccaaccgaccgcgtgtttgcgttcaacacagccggggacggtgcttccgggcagctggtggtgacgcgggacgtcggcgcggtcggtggcgcatgcccactggcactgtatatcgatggcaccttggcagcgcatctgcggcgaggcgagtcggtgacgttgaccgttcccgccgggagtcgaatcgtcagcgcaagttttgctggcaagggcctctgcaagtggggggatgagtcggctcaccggcgcgagatttcccacatggtgaccgccggtaacaaaaccagtatccgcctcgctctggcccatgacggacttatccaggtcagcccgaccgcgttctag

SEQ ID NO: 500246 - DNA, 2109 bp, Stenotrophomonas maltophilia
atgatcgaaatcagaagaggccaggtagatagccctggagccactgaggcattggctcgtgcgattggcctacttcctgcagagagcgagggagtcgtttacgttggctatccggtcatgggtacgccagacgggccttttacaatagatgcgcttttggtttcacctgagtttggtctaattgcctttgacctagttgacggcaaggacctgcgcgactttgaggaaagacacgatgctgcctatgccattcttacggccaaattacttcagagcggccggcgtctaagtaaaaggaagcgtatcacaatcgaaccacaggtcgtcacgcttgctccaaattgcaagcagccagatgatgatctgcaggactactcagtcctttccacctcgcaagagcttgcgcggtggatcgagaataatgccaccgctctccccgaattcaatgaagtcctgtcgactatacagtcgatttctaacattcggagggctagagctaagcgcgacatcaagaaggcggggtcgcgcggcgagcgattgcagcgactagaggacgcaattgcaactctagacagccagcaaagcgacgcggtgatccagacattcgacggagtgcagcgcatcagaggactcgccgggtccggtaaaaccgtggtacttgcacttaaggtagcttacctctacacgcaaaacccagactggacaatcgcagtcaccttcaacacgaaatctcttaaaggtcagtttcagcggttcataacctcttttatttacgaccaggcgaacgaagaacctgactggtctcgcattaaagttttgcacgcctggggatcctcctcgaacgaaggcatttattacagctactgcattcgcacgggcactgcctatcatgacttgacggccgcaaaggccaagtttggtcaaggcgcagagttcgcgggagtgtgccagctggcactcgagtcatcagtggcagatgtccctctatacgacatcatcctaattgacgaagcccaggacttccaccctgcatttcttaggctttgctataggctcttaaaagatccaaagagaattgtttacgcttacgatgagttgcagaatctaaaccgaggggagatgcctccgccaagtgagctcttcggcctgaacaagaacggcaccccactcgtcgcgttctccgacgaccctgaccttgcaaaaaggcaggacatcattcttaggcgttgctacagaaactctcgcccagtactgactaccgcccatgcacttggcttcggcatctatcgcacgaagggactggtgcaaatgttcgacaactcagacctctgggaggacattggttactccgttgtagacggcgagctggaggatggacagaacatcagcctaaccagaacagatgcgaccagcccgaaattcctcgaaacgcactcccccttgagtgacctcatctcattcgaagtatttgacgacgacgcccagcaagtggagtggctggccgatcagattcggaagaatatagaggaagatgatctgcgcccagaggatatacttgttatccacccaaatcccgtcaacgcccggaaagctgtaggcggtgtacgaagcgccttgatgtctctcggcataaattccatcattgcaggcgtgacgcactcacctgacgaatttgagtacgccggatctgtcaccttcactggcatttaccgagccaaaggcaacgaagccgccatggtttatatcatgaacggacaattctgcggcactgattgggatgcagcgtgggcacgcaacatactattcactggaattacgcgcagcaaagcatgggttcgggtctgcggcttcggaaaaggcatggccacgctcaatgaggagtttgaacgcgttaaagcagctgacttcaaattgaacttcacgtatccgaccgaaaccgaaagaaagaaactgaacattgtaaatcgagacctcactcctgcagaaagaaggcgcagggaaaggtcgcgatccgaccttaagcgcattgcgagcgacctgaaggcaggccgaatacagcgtgaagatatcgacgagatccttggatcactgctccaacagggcgaatga

SEQ ID NO: 500247 - DNA, 669 bp, Stenotrophomonas maltophilia
atgaccctactcagctcaattgaaaaatcaactttatccataataaaggcattgattgaaaggggtctcgccgaccacttcacgatgccttctgtagtgtcaaacaacaagtatactggtgacatcggatttgcctccggcgtagacatatcatgggcaatgaaagatcaaccatacgcagatctatacgcagaactaatccgtcgccagcaatttcatgtagtactccccgatggcggcgcacttcagttcttatataaagttagattagacaagataaccaagcatcgattggcattttatccaaacccgagcctgaaaccgttcgacaccgactcaatgcgctatcttcaagactccgtatggggccacgtagtttccgagttccaaatgccggttgtcgtgcggctggactatgagagcacgcctgagagctacaaagcgattcaacactcttcaagccatatgactctcgggcaatatcccaactgcagaatccccgtaagctctccattcacgccctgggcgttcacagatttgatccttcggaatttctacagcaaggcgtttgaaccactttccagagcaaacatatataagtgcttgccgtttgaagactgcctcaagcgagaagagatgaatcatatgcatctaaggttgcctgcttag

SEQ ID NO: 500248 - DNA, 204 bp, Stenotrophomonas maltophilia
gtgctgaacgttccgaaggagcgtaagcgcattgcggcccgagaccgcaagcgtcgacagcgcgagcgagagcgcagtggggccgctatgacggatcaggagtttcaccgggtgctgaaggaggcaggggatcccaaagtgatccagaggcgcgagaaggacaagcagcgccgggataggaggaaacgcaagagccaggagtag

SEQ ID NO: 500249 - DNA, 1608 bp, Stenotrophomonas maltophilia
atgaccccgcattccctcacgctcgatcgcgtgtcgtatcgattggccgacggccgcccgctgttttccgatctgacgttttccttcgaaccggtcgccaccggcctggtcggtgccaatggcgccggcaagagcgtgctcgcacgcctgctggccggacggttgctgcccgacactggccaggtgcgcggcaccggccgcgtgttcctgttgccgacgcccggctatccacccgccggcacggtcggtgaactggccggcgtcggcgcggaactggccgcactgcaacgcatcgaagccggcagcgtggacgaggccgacttcgcctgcgtcggcgaccgctgggatctgcgcgaacgcctgcagcagcaatggcgggcgcttcggctgcccgacgatctcgatcccgccctgccggccgcgcgcctcagtggtggccaggccatgcaggtcgcgctgtccggtgcctgggccagcggtgccgattggctgatcctggacgaacccagcaaccacctcgatgcacgccatcgccaacagctgtacgagcagttgcagcagtggcgcggtggcctgctggtgatcagtcatgatcgcgagctgctggcgcacatgcagcagatcgtcgaactcgatgggcgcgggctgcatcgttacggcggaccgtggcagcactatgccgatgcgcgcgccgccgagcgcgaagctgccgccgcccagctcgatcatgcgcgcgcccagcaccgccagcagcaacgcagcgcgcgcgaacagcacgaacggcaacaacaacgccaggcgcgtggcaaccgcgatgcgaagcaggccaaccaggccccgatcctgctcggccggcagaagcagcgcgccgaggccagccacggccgcgcacaacaggtgcaggccgaacgcctgcaggccagcgcagagcatctgcgcgcagcggcatcggcggtgcacgcggcgccggaactggcactgttcgccggtgcgggtgaccgtggcagcatgcgcctgctacaggccgaggcgctggtgctgccacatggctgcagtgcaccgttgcagctggagatccgccgcggccagcgcatcgccgtggtcggtgacaacggcagcggcaaatcgaccctgctgcgtgtgctggccggccagctgccggcacgcagtggcgccgtgcaacggcatgcgccactggccctgctcgaccagcagctgctggggctgtccggcgagcgcagcatcctcgacaccgtgcaggccgccaacccgggcgcggacccaggcgagctgcgcacgcggctggccctgctcgggctggatgcacagcgcatccagcgggcagcccacagcctcagcgacggcgaacgcgtgaaaggtgcgctggccagcgtgctgtacgccgatcccgcgccccagctgttgctgttggacgaacccggcaatgcgctggacctgagcgcattgcaggcattggaggaactgcttgcggcgtggccgggtgccctgatgatggtcagccacgacctgcatctgctgcaggcattgcgaccgacgcaggtgttgcaggtcaccgccaaccactggcaatggcgcgacagtctgtag

SEQ ID NO: 500250 - DNA, 2271 bp, Stenotrophomonas maltophilia; identical to SEQ ID NO: 498335

SEQ ID NO: 500251 - DNA, 954 bp, Stenotrophomonas maltophilia
gtgttgctgtcgccggacagcgtccagcgaccgccctggtcgacgatgacgtcggccgggccaaggatgcggccggtgaggtcgaggccgtcaaggaagcgcagcgtgccgctggcggtatcggcaatggtgaagttcccggccagcgtggaagttcggccggtaaagtcgaacagggcacctgcattggcctgcaggaggttgccgttgccacccttcagcgtggcgccgttctgcacaatgaagcggttgacctgcggagctgagccctgggtattcgcgctgagcgctgcgccagcggttccttccaccgaagagccatcgacaagtacgtaccacccatctgggcccatggcgggctggccgccggcgttgtgtctgctgtcgatgccatcctgcgcgccgacgacagaagagccgctgcgtaattccagaatgcccgccagcatcaggacgccgtgcacatcgccagcaaaggccgtcgatgaggcacggatggttccgccacccgaaatgcgcgatgccgtaaaaggactttcgacgcggctgtttgaaatggcgatgaccgtgcgcgccgatatcgggttggacagtactgcaccggtgttcaggccggccagtgtgctgcctcggatgtcgccgacggaatccatcaacgagaccaggccggaggatgcattactgagcgtgagtgtcgaattctgcgaatttactgtgccgacacgagtgccatcgacggtcagctgcgaattgccgcggagcgtgaagtcctgcccgacccagacatggccccgaacgaccgtagcggatgcgccgttggtcagatcaacggccgcggcctccatggagggcacgagaatcagcccggcgagtgcaagcgccaaccgcgaacggacgaaagtggaaggaaacttcggcgtgaactgcatcatgcgcatgggtgtttctccttga

SEQ ID NO: 500252 - DNA, 915 bp, Stenotrophomonas maltophilia; identical to SEQ ID NO: 498397

SEQ ID NO: 500253 - DNA, 288 bp, Stenotrophomonas maltophilia; identical to SEQ ID NO: 351542

SEQ ID NO: 500254 - DNA, 861 bp, Stenotrophomonas maltophilia; identical to SEQ ID NO: 351541

SEQ ID NO: 500255 - DNA, 435 bp, Stenotrophomonas maltophilia
atggcaatggcctggccggcattggcgccgacctggaacagctggctggagaacgagccgtccagcagcttggtgccgttgaagtccgactgcttggcgacgcggtcgatttcgctgaccagctgggtcacttcggcctgcagggccttgcggtcgctggccgagttggtggcgttggacgcctgcaccgacagctcgcggacgcgctgcaggttgttgccgatttcggtcagcgaaccttcggcgacctgggccagcgagatgccgtcgttggcattgcggatggcgacgtcggtaccgcggatctgcgtgccgaagcgctcggagatcgccagaccggcggcgtcgtccttggcgctgttgatgcgcgaaccggaggacaggcgctggatggtggtggccagcgagctgccgctggtgctcaggttacgctga

SEQ ID NO: 500256 - DNA, 1278 bp, Stenotrophomonas maltophilia; identical to SEQ ID NO: 498369

SEQ ID NO: 500257 - DNA, 2994 bp, Stenotrophomonas maltophilia
atggctacccttcacgagaccgcctacccgcgactgaagcctgatcccaccgccaaggaactggaggagatctataccccgaccgccgctgagattgcattcgccaagcagctgaccacccagccgggtccgcagctggcggtactgattcatctcaagctcttccaacgcttgggctacttcacgctgttggccgacgtacccgagcggatccggaagcacatcgccaaggccgcccgactcgggcgcgtattggacaccgaccagctcgaacgctacgacgcttccggtagccagcgccggcatatgccgcagcttcggcaattcatcggggtacgtcccctggataaatcgggcttggcttggctggacacagtggccaccggagcagcccagaccaagcacaccatcccggacatcgtgaacgtcctgctcgaagagctggtgcaccatcgctacgaactgcccggtttccgcactctggagctggccgccatcggcgcccgtgagcgggtcaatctgggctactaccgcagcatcagccacgcgctgacgcctgccacgcgcacgctcatcgacgaactgctgcgcgcaccggaagggtccaggttcaccggctggcaatcactcaagcgcgagcccggccggcccaccaacaaggaagttcggttctacctgcagcacatccgcatgctgcagcagttggccgaccagctgcctcccatcgatgtgccggtgcccaagctcaagcagttccgtgcaatggctcgggcctatgacgccagcgagctggccgaactggctccggacaagcgctatgcgctggccaccatcttcattcgcgcccagcatgccaagacactggatgatgcagccgagttgttcatcaagcaggtgcgcgggctggagaacacggcccagcagaaattgctggcctaccagctcgaacatgccaaacgggccgacttcctcatcggccagctcaaggaaatcctgcaggcctatcagctagacggcagcgatagtcagcgcgtggatgccatcgacaacagcctggaagcggaagtgtcgaccttgctggccgaatgcgaagaacatatggcctacgccgggaagaactacctgcctttcatgctgcagccctatggcgcggtcaggccgctgctgttcaatgggctggagctgatgaaacttcgggcgaccagccacgacgccggcatggagccgctgatcgcagcggtgctctcgctgcgcaaccagcgccgtgagctgatcgaggtcgcctccctcggtttggacccggaaaaggactttgactggatgtccaagctctggtgtcagcacgtgttcggcaagcgggccagtgcagccggcgccggctggatgcaccgtaagtacttcgagctggccgtgctggtgcaggtcaaggacgaactgaagtccggagatctcttcattcccagcagcgaacggtttgatgactaccgtgagcagctggtcgatgaagccaccttggcccaggaactggaagcctacggccaggtgtcaggcctgcccaccgacgccgagtctttcgtggcgggattacgtgcacaactgacctccctggccgatgaggtcgacgcgcgtttcccggagaacgtacatgcggacatcctggatgggcgcctggtgctgcggaaggggcaacgcgccgaagtctccagcgcgattaccacggtggatcgcctcatcgccgaacggcttccagaatccagcatcgtcgatgtcctgatcgatgccagccaatggctggatctgcaccgtttcttccgcccgatcgccggcaccgagagccaggtcgaagatctgccccgacgtgtgatcaccacgctattctgctatggctgcaacctggggccgacgcagacggcgcggtcgatcaagggcttcagccggcgccaagtcgcttggctcaacctgaaatacgtgaccgaggatgtgcttgagaaggccatcgtggaggtcatcaatacctacaacagattcgacctgcctggctattggggcagcggcaagagcgcatcagctgatggcacgaagtggagcgtctacgaggacaacctgctgtcggagtatcacatccgctacggcggctacggtggcatcggctactgccacgtgtccgacaaatacgtagcgccgttcagccacttcattccctgtggcgtgcacgagggcatctacatcctcgacggtctgttggccaacacttccgacatccagcctgagatcgtccatggcgacacgcaggcccaaagctatccggtcttcggcctggcccacatgctgggcatccagctgatgccccggatccggaacatcaaggacctgacattctttcggcccgaaccgggtagggcttataagaacatccaggcactgttcggggacagcatcgactggcaactgatcgccacccatctccacgacatgctgcgggtggtgatctcaatccgattgggcaagatcaccgcgtcctcgatcctgcgccggctgggcacctacagccggaagaacaagctgtacttcgccttccgggaacttggcaaggccgttcgaacgctgttcttgctgcgctacattgatgacaatgagatccgcaaaacgatccatgctgccaccaacaagagcgaggaatacaacggcttcgtgaaatgggtgttctttggcagccaggggatcattgctgagaacgtccaacacgagcagcgcaagatcatcaagtacagccagctggtggccaacatgatcatcctccacaacgtggaaggcatgagccggaccttggccgagatgaggaaggaggggattgaactgacgcccgagatcctggccggcctgtcgccttatcggaccagccacatcaatcgcttcggcgactaccacctggatcttgaaagggaagtggcgccgctgagctacacagccaaggtgcttgaacagaccccatag

SEQ ID NO: 500258 - DNA, 3084 bp, Stenotrophomonas maltophilia
gtgctggcagtcgaggaaagccacatcaatcgccgcctccagactctgctgaaggacgagaacaacagcctgcgcgtggacgatgccgccaagatcgtcggctgctggaaggcgctggccaagctcggcatccacgagggtgccggcgaaagcgcagaaccgatgaagcgcgcggtcgcgttctgccaggtcatcgagcccagccggggtggcaagacccacaaggtcagctcgaaggaaatcgccgacatgttcaaggcggtcgtggacgcctaccaggacgccgaggacatcgaagacgccgcgcgcatgacctgcgaggccaagcacgtcgacggcagcatgaacgccggcgagaaggaagcgaagcttgactggctcaaggcacccacgccaccggacacctgtcgcgtgctgagcaacgtgcgctgcctttccgaaggcgtggacgtgccggcgctggacgcggtgctgttcctcactccgcgcaactcgcaggtggacgtggtgcagtcggtcggccgggtgatgcgcaatgccccgggcaagcagcgcggctacgtggtgctgccggtggtgatccctgccggcatcgagccgcacgaagcgctgaacgataaccgcacctatgcagtggtctggcaggtgctgcaggcgttgcgcagccatgacgaccgcttcgacgcgatggtcaacaagctcgacctcgtcggcccggaccgcagccggatggaagtcgtcgccgtcgccgacacggtgcagcgcaagaccgcgcggctgctggacggcaatgcccgcaaggcggccaaagccaagagcaggcacagtatcggtgaagcccagcccggctacgaagccgaagtgcaaagcgaattcgagttcgagatcggcgaagtcgagcgcgcgctctacgccaaagtggtcgagaagtgcggcaaccgccaccattgggaggactgggccaacgacatcgccaaaatcgcgcagacccacatcgaccgtatcaaggcgctgctggaagaccccagtcaggccaaggcccgcgaagccttcagcgccttcgccaacgaactgcgcgacgacctcaacgacaaggtctcggacgccgagatcatcgagatgctggcccagcacctgatcaccaagccggtgttcgacgcgctgttcgccgactacagcttcgccagccacaacccgatgtccaaggcgatgcaggccgtgctcgacgtactcgacgaactgcacctggagaaggaagccgacaccctgcaggcgttctacgacagcgtgaagctgcgcgccgaaggcatcaacagcgccgccggcaagcagaagatcgtggtcgagctgtacgacaagttcttccgcaacgccttcccgaagatgaccgagcgcctgggtatcgtctacaccccggtggaagtggtggacttcatcctgcacagcgtgaatcacttgctggagcaggagttcgggcagaccctcggcagcaatggcgtgcacatcctcgaccccttcaccggcaccggcaccttcatcacccgtctgctgcagtccggcctgatcaagccggaagagctggatcacaagtaccggcacgagatccacgccaacgaacttgtgctgctggcctactacatcgccgcgatcaatatcgaggccacgtatcacggcatcgccggcggcgactacgtgcccttcgagggtatctgcctgaccgacaccttccagatgtacgagaaggaggatctggtcgatgcgctgctggtggacaacagccagcggcgcaggcggcagaagacgctcgacattcgcgtgattgtaggcaatccgccgtattcgatcggacaaggcagccaaaacgacaacaatcagaacatcggctatccggcgttggatgcacgcatcgcggaaacctatgccgcacgctcaggcgcggcgttgtccaaggggctttacgacagctacgtccgtgccatccgctgggccagcgaccgcatcggcaatgccggcatcatcggtttcgtcaccaatggtggctatctagagaaggccgccatggacggggtgcggcgctgcttagtggccgagttctccagcctgcatgtattcaatctccgcggcgatatccgcaagaacatgctgagcaaaggacaagcgaaggaaggtcagaacattttcggaagcggcagcatggcgggcattgccatctcacttctgatcagaaatcctgaagccaatcagcgtggtcacgtctactaccacgatattggtgacgatctaagccgcgatgagaagctgggcaggatagaagcctatgccagcgtcgacggtattcccgaacaggaatggcagcacatcatcccggatgcgcatggcgactggctgaagcagcgcgatgacagcttcgggcgtttcatctcgctgggcgacaagaagggcgacgcgtccaagatgttcgacaacttctcgctaggcgtggccaccaaccgagatgcctgggcctacagccatagcaaggccaagcttgcggaaaacatgcgcaacatgatcggcttctacaacgccgaagtggcgcgcttcgatgccgcgcatattggactggacaccaaggcgcggcaggagcgcgtggacggattcattgacagcgacccactccgcatcagttggactcgcgcgctcaagcagaacttgaccaagaatcgcacctacacattcgatgccgagtgcatcgttcccagcctgtatcgcccgttcaccaaacaatggctgtacttcaatcggactttcaacgagatggtgctgcagatgccgcgcatcttcccagatgctgctgcaaaaaacgtagtaattcagctaagcggagctggagcacgatctggattttccgcgattatttctggccatataccgtcccttgacaccattgagaagggccagtgttttccgctctatctctacgatgaagccgcccaacaatccgatgacggcctgttcgcgagcattcccaatgatggcccacgccgacgcgaggccatcaccgatgccggcctcgcgcatttccagtccgcctatccgggctag

SEQ ID NO: 500259 - DNA, 1776 bp, Stenotrophomonas maltophilia
atgtacaggagcagtggaaacttcgaggcgttctcgcgcccccccaagcccgaaggcgtggagggccgccgtgcctacttcgtcggttccggcctggcctcgctggcgggtgcggtgttcctgatccgcgacgcgcggatgcccggcagtgcgatcacgatcttcgaggagcttgcgctgcccggcggcagcatggacgggatcctcgaccggcacaagggattcatcatccgcggcggtcgcgagatggaagcgcacttcgagacactgtgggacctgttccgctcgatcccctcgctcgatacgcccgatgcctcggtactcgacgagatgtactggctgcacaagaccgacccatcccgcaacccctgccgcgcgatccacaaccgcggcgagccgatcgaacggatgcccgacctcacgctcactccaggagcggtggaggaactgatcgcgctggcgctgacccgcgaaagcgagctggacgacaagcgcatcgacgaagtgttcggcgaggaattcttcgcttcgaacttctggctgtactgggccaccatgttcgcgttcgagccatgggccagcgcggtggagatgcggcgctacatcctgcgtttcgtccatcacatttcgaccctgtcggacctgacttcgctgcgcttcacccactacaaccagtacgagtcgctgatccgtccgctggtggcctatctggaaggacagggcgtcaccttccgctacaacacgcaggtcgacgacgtgctggtcaccgcgagcggcaatggcaagttcgcgaccgcgatccggctcaccagcgacggcgtcgccgagaagatcgccgtgggtccgaaggacctggtgctggtcaccaacggttcgatcaccgaaagctccacgttcggtgacaacgatacgccggcgtccatcgtgaccgaccgcggcggcgcatggtcgctgtggaagcgaatggccgagcgtgaccccgccttcggccgtccggagaagttctgcgagaacattccggaggcgaactggacggtctccgcgacggtcacgctgaccgacgatcgcatcgtgccgtatctcgaacggatcacgggccgcgacccgcgatcgggcgtgatcgtcaccggtggcccctgcagcatccaggattcaagctggctgtacggtttcagcatgagccggcagccccacttcgccgaacaggatccgcagaaggaactggtggtctggctgtatgggctgttttccgacaagcccggcgactacgtgccgaagacgatccgcgagtgcaccggcgcggaactgtgtgccgaatggctgtaccacatcggcgtgccggtggaccagatcgatgagctggcgcacaacgcggccagcaccgtgccgtgcaacatgccctacatcacgtcctatttcatgccgcgcgcggccggcgaccggccgctggtggtgccggagggctcgcagaacctggcgttcatcggcaatttcgccgagaccgagcacgacacggtgttcaccaccgaatactcggtgcgtacggcgatggaagctgtgtacacgttgctgggggtggatcgcggcgtgcccgaggtctttgcgtcgatgttcgacgtgcgcgtgctgctcagcgcgctgtactacctcaacgatcgcaagccgctggacgaggtgaagctgccttggcttgcgcgcatcgccagcagtgcggccatcgccaagacccggggcacctatctggaggatctcctgcgggaggcgaagctggtctga

SEQ ID NO: 500260 - DNA, 387 bp, Stenotrophomonas maltophilia
atgcactggctgcagcgcagcggcctgaagacggcgcgtgcctggcacttgaaacaggcactgcgacgcctgtacgcagcggggctgtcgccggaagaagccgaccaccagctggaccgttggatcagctgggcacgccgcagccgcctgccgccgttcaagcgtcttggcgcgaccctgcgcgagcacaaggccgggatcatcgagcacttccggagtggcctcaccaacgccagcgtggagacgatgaacgcccagatccaggcggccaaggcgcgggcgaagggctatgccacccacgagaacctgatcgcgatcgcctacctgttgtgcgccaagctcaagcacttgccgcgcaatccatggttggcgccggcggcggcatga

SEQ ID NO: 500261 - DNA, 816 bp, Stenotrophomonas maltophilia
atgtctgcaggcaagatcaccagcaagacccggcaagcctacaaatttatcgatgcgcatcgggacgagttcagtatccagatgatgtgtcgtctgcttggggttgctcgagccggctactacgcatggcgtgaacatccgatttccgatcgagcgcaagaagatgcgcggttgcttcgcttgatacgtgcgtcgtttgccgccagccacggaatttatggcgcccccagggtgtttctcgacctgagggagcacggggaggcatgcagcaaacatcgggttgctcgcttgatgcgggtgaacggattgcacgcgctgcatggctaccgcatacggcacatccctgttccaaaacctcatgtcttaatccctaatttgctccagcgtcagttcagcgtatcgcgcccgaacgaggcatgggtgacggatatcacttacatccgcacgtggcagggttggctgtacctggcggttgttttggatcttttctcacgcagggttgttggttgggctgtcagaccaacgattcatcgagaacttgttctggatgccgtgatgaaagccgtgcgcagccgacgtcctcgcaaaacccttatccactcggatcaaggctcacagtacggaagtgatgcatggcggcgtttctgcaaagacaaccacctcgagccaagcatgagcagacgtgccaactgctgggacaacgcggtcgctgagtccttcttcagcagtttgaaaaaggaacggatcaagaagcgcatctatgcgaatcgtgacgtggcgacctcggacatatccgactacatcgatgggttttaa

SEQ ID NO: 500262 - DNA, 564 bp, Stenotrophomonas maltophilia
atgcgttcgccattacgcaagcaggatttccccgtggaaaaagtgcgtcagtaccttgagcccggccccatcgtgctggtgacgtcgcaatggcagcagcagcggaacatcatgacgctgggctggcacaccgtgctggagttctcaccgtcgctggtcggtctgatgatctccagcgccacccacagtttcgatctgatccgccgtagtggggagtgtgtgatcaacctgccgacggtcccgttggcggatacggtggtgcgcatcggcaactgcagtggtgtgtcggtggacaagtacgcgctgttcgatcttgcgccggtgcgggcatcccgggtgcgtgcgccgctgctggggcggtgtcatgccaacctcgaatgccgtctgcacgacgatgcgctggtggagcgctacaacttcttcgtcttcgaggtggtgaaggcgcatgtggcagtgtcgcccaggcatccgcgtacgctgcattacaccggcgatggagtgttcatgacggcaggcaggatgatcagccgccgttcgttgttccggccggacatgctggggtga

SEQ ID NO: 500263 - DNA, 330 bp, Stenotrophomonas maltophilia
atgaccgctgtcagttccctccacgcccaaggtgacaagctgccgccctcccgactttggcgcgtgttctggctgcagggggtgatccccagcaatctgttatgggccgccgccctctgggcgttggcgcaggggcgcaccccgttgttgctggcgttgttcgcggcgctgctgctgtatacgggctggatcatcccggcggtatggcgggcggcgccgagcgcgcaaaatcccaattacggtgttgccgcgcgcggcctgaccgtggcctggggcttgaatacggtgctggtggtgttcttcctgatgctgcagctgctggctcagtag

SEQ ID NO: 500264 - DNA, 405 bp, Stenotrophomonas maltophilia
atgatgctgaacgatttcaatggcctgctgcaggcagcaggacagcaaaccgagccccaacgcctgttgtttgtgttcgtcaaagccgacctgcccgaatcacccaccgccgatcagcatgcccgccacagcaacggcgaaggtggcacgttgagcccggtgctgtgtgtggacaaggccccgcaggaaatcgcgtccttccagaccctggccgccgaatccgcccagaccgggctggtctgggacctggtgtttgttgcctcactggatggccgtggcggcattgccccgtccagcgatgaagcaacgcaaccactgcgcctgatggtcaacgcggtcaacgacggccagatcagccgttttgccgccttcgatcgcgatggcacaccggtgcagttctactga

SEQ ID NO: 500265 - DNA, 981 bp, Stenotrophomonas maltophilia
atgagccaactcaccgatggcttcgggcgcagctttccatacctgcgtctgtcgctgaccgaagcctgcaacttccgttgcagctattgcctgcccgacggctaccaggccgacggccggccgcgctttcttgcggtggatgaaatcgcaaggctggtacgggcgtttgccacgctgggcatgcacaagatccgcctgaccggtggcgagccgagcctgcgcaaggacctggaccagatcatcgccaccgtggcgcaggtgccgggcgtgcgcaaggttgccatcaccaccaacggctgcctgctgcccaggcgcctgccaggctggcatcgtgcgggcctgactgcgctcaacgtgagtatggacagcctgcgtcgcgagcgtttccatgccatcaccggacatgaccgcctgcccgaggtgatggaaggcatcgccctggcccaggcgttgggcctgcaatcggtcaagctcaatgccgtgctgctgcgcggcctcaatgacgacgaactgccgcaatggatggccttcctgcgcgaccggccagtgagcgtgcgtttcatcgaactgatgcgcaccggtgacaaccgcgattactttgaacgtcaccatctgtgcgccgatgtgatcgtcgggcagttgctggctgctggctggagcgagcgcagacgcgctgccgatgcgggccccgcacgtgagttcagtcatcccgaccatcgcggcagcatcggcatcatcgctccttactcaaaggatttctgcaaaggttgcaaccgcctgcgggttaccgcgcgcggcgatctgcggttgtgcctgttcggtgacttcggcatcgcactgcggccgctgctgcagtcagatgaggaccagggcgcgctgctggcgcgcatcaccacccagcttgggctgaaggcagccgggcatggactgcatttcggccagaccgggttgaccccgcatctggcctcgattggaggatga

SEQ ID NO: 500266 - DNA, 999 bp, Stenotrophomonas maltophilia
atgagtgggcagatgagtgcggcattccatatggccgatgtacgtgacaagcgcattacccgtcgccgcgcggtggcggtgggtgagcttgtcgccgggcctgttgcctatcccctgatcgtcgagcgacgtctgcccaagggggacgcactggtgatggccgagattgctggcctgcagggggccaaaatggcctcggcgttgatgccgctgtgccatccgctgccactggaactggtgagggtttactgcgcgccggcgccggagcggcttgccatccgggtgtggtgcgaatgcgccagtgaagcgcgtaccggggtggagatggaagcgctggcaggggtcaacgcggccctgctgaccttgtatgacctcagcaagccggtcgagcccgcattggagatcggcggtgtccggctgctgttcaaggaaggcggcaagagcggcgtgtggttgcacccacagggtatggatgcggaggagcgtgagcgcttccgcccgcgtccgccaagacagctgcaaggtgcgagctgtgtggtgatcacgctcagcgatcgtgccagccggggcgactatgtggatgaatccgggccagtgctggccgaggggctgcgtgcactgggcggcgaagtggtcagcacggaagtactggccgatggcatcgagccgctggccgggcgtctgcacgcgttcgccgccagcggcatccgcatctgcctgtgcactggcggcacgggcctgggacagcgcgatctcactccagaggcgttgcagtcgctgggtgggcgcagcgtgcccgggctggcgcagatgctccgtggccttggcgcgcagcacacgccgttggcatggctgagccgtgccgaggtggtgcaactggggggcatgctggtcatcgccctgccgggtagcccgcgtgccgcggcacagtgcatgagcattctcacgccggtgctgggccatgcattggcgatgatcgacggggccagccacgcatga

SEQ ID NO: 500267 - DNA, 1260 bp, Stenotrophomonas maltophilia
atgatcacttacgcgcaggccctgcagatcctgttggccgaggcgccggcgccaaagaccgagcaggtggtggttgccgaggcagcagaccgggtgctggctgcgccagtggtaagtgcccagcacctgccaccgttcgacaatgctgcgatggacggcttcgccctgtgcgcggacggccagcccttgcctgccggtgccgtattgcaggttgccggctggcaggccgcaggcgatgccgcagcacagggggaggcagcacaggcctgggaaatcatgacgggtgcgcgcatgccggccggcctggacagcgtggtgccggtcgagcaggtggaggtgctggatgccgtggagggtcgtcctgcgcgcgtgcgtctgcaggcgatggtcacgcccgggcaacacgtgcggctgcgcggccaggacgtggagttgggcgaaaccgtgcttgccgctggcacgtcgctggatgtgaacgccatgaccttgctgcatgccctcgggacagcccgggtgcaggtgcagcagcggccgcaggtggcggtcatcagcaccggcaaggagctgatcagtgatgcggcccagccgttgcagtccgggcagatacgcgacagcaaccgccccttcctggtcagccgcctgcacgccgcgggtgctgatgtggtctggaacggtgtcgttggcgatgacgtggctgcttttgatgctgcgctggacgcggccttggccgccggcgcgcgcgtggtgctgagtacgggggcggtgtcgcagggccgctatgacttcatccctgatgccctgcgtgcccgtggtgccaccgtgctgttccacaaggtcgccatccgcccgggcaagccgctgctgttcgcccgcctggccgatggttgcctgtacttcggcctgccgggcaatccgatatccgcggcagtggggttgcgcttcttcgtggagccggtgttgcgccgcatgctgggtttggaagaagaggcgcagttgcagttgccgttgcagggcgatgtgcgcaagccaccggggctgcgcatgcacgcacgggcacgggtggaactggatgcgggggggcggctgagcgtgcgggtgttgtccgggcaggaatcgttccggctcaagaccatgctgcaggccaacgcctgggcgattctggaaggtgacgatgcgttggccccggccggcacattggctcgcgtgcagggttgggggcatcgcgagccgctgcaactggcccggcaggaggaagcatga

SEQ ID NO: 500268 - DNA, 261 bp, Stenotrophomonas maltophilia
atgagagaggtcgttgtgcagttgtttggtgtgttttccgagctggatcatcgtcgcgagctaagcgtgcgggtgaacggtgaacacatcgtggacctgcgccgggcattgcgcgagttgctgctggaacggttcccccggttccgtgccgggctggtggactattcggtatttgccgatgaaaagcgcgtgctgcgcgacagcgagccgctgcctgcggacggtcgtgtggccatcctgccaccggtgagcggaggttga

SEQ ID NO: 500269 - DNA, 498 bp, Stenotrophomonas maltophilia
atgagcgcggaaaatctatggaaagtggtcgagcgcagcgccgccgcgattgatccgggcgagggcatcgcttttgtgtccgaccccggctttggcggcatcgatgtattcatcggcaaggtgcgcgacctgaaccaagggcgcgcggtgcagggcatcacctatgacatgttcgagccgctggtactcaacgagttccagcgcctggtggccgaggtggaggccgagttcggcccgcgcatcaagctgtacgtggcccacgccaggggccgcctggcggtgggtgaggtggcggtggttgttgccgccggcagtccccaccgtgacgaggctttccgtgcctgccggcagctgatcgaggcggtcaaacaccgctcgccgatctggaagcaggagcattaccaggatggcgacagcgagtggagcgaaggctgcagcctgtgccaacccagcgccgagcacgccgacgacggacatgtccacgatcacgcccactga

SEQ ID NO: 500270 - DNA, 618 bp, Stenotrophomonas maltophilia
atgtccacgatcacgcccactgacctgccggccatggccggcatcgtgctggccggtggcctgtccagccgcatgggccaggacaaggccttgctgcgttggcagggcaggtccctgctggcgcacatgtgcgcgctgctgcaggccgcgggtgcgcagacgctacgggtcagcggcagctacccggtgctgccgggggtcgagtcggtccccgacctggtgccgcgctgcggtccgttgggggggctctacagcgtggtgaagacgctgccggatggccctgtctgggtggtggcggtggacatgccgctgctcgaccggcaacttctttggcggttgcgtgacgcaggtgacgctcgctgcgtgcatttccgcgggcaaccgctgccaatgcggttgaacattgaccgcagctgtcgcaccctgttgcagtcgatggtgatggacgtgaacgggccgcgctcgttgtaccgcctgcagcgacagctgggcagcatcgagctgcgcctgcccgacgatggcgatgcccgtctgctgaactgcaatacccccatccaatgggaggctctgcctcatgaaagtgcagatccagtcgcagtccgtacgactgcgcattga

SEQ ID NO: 500271 - DNA, 372 bp, Stenotrophomonas maltophilia
atgaaagtgcagatccagtcgcagtccgtacgactgcgcattgacgaaaacgagctggccgagttgttggcggggcagtgggtgaccagccggaccgacctgggggcactgggcagcttttcctgcgcgctgcagctgcatgcaggcgaacaggcgcggctggatggcagcgtcacggcgctgcggttcgcgctgcctcaggaggatgtgctggcgttgcagcagcgcctgccgtgccgtgatagactctcttacgaactccccctgcaaccgcaaccgctgcatcttcagtttgatgtcgatgtacgtgacagcgtgcgccagcgtggcgtgcagcgccgtgcaagcgacgtcagcgtcgccgcagattga

SEQ ID NO: 500272 - DNA, 1419 bp, Stenotrophomonas maltophilia
atgagtgccagtcgcgatgccgtaaaaaacagcaggcccggtcccggcggtgtcatcaccgattggcggccggaagatccggtttactgggagcagaccggtaaacgcgttgccacccgcaacctggtcatatccatccccgcgctgctgctggcgttctcggtgtgggtgctgttttcggcggtgaccatcagcctgccgaaaatcgggtttgccttcagtaccgatcagttgttctggctggtggccttgcccagtctttccggcgcgacgctgcgcatcttctactccttcgtgatcccgatcttcggtggccgccgttggacggccttgtctaccgcctcgctgttgctgcccaccttgtggctgggcttcgcggtgcagaaccccgccacgccgtattgggtattcgtgctgatcgccatcctgtgtggcttcggtggcgcgaacttctcgtcctccatgtccaatatctccttcttctatcccaagcagcgccagggcatggcactgggcctgaatgccggcctgggcaacgtaggggtgtcggtatcgcaggcggtggtaccgctggtgatcacggtaggcgtgtttggtgccctgggcggcgctccgcaggctgtggtggacggcggcgcgcccttgttcctgcagaacgccggcttcatctgggtgccgttcatcgccttcttcgcgctggctgcctggttcggcatgaacgacctgaccagtgcccgctcatcgttctccgagcaggcggtgatcttccgccgcaagcacaactggctgatgtgctggttgtacatcggcaccttcggctcctatatcggcttttctgctggtttcccgatgctggtcaagagccagttcccggacgtgaatccactggcctatgccttcattggcccgctgctgggtgcgctgatgcgctcggtgggtggcagcatggccgaccgctggggcggcgcacggctgaccttctgggtattcgcgctgatgatcgcagccgtgttcggcgtactgcacttcctgcccaataaaggccagggcggcaacttctacggtttcctgctctcgttcatggccttgttcgtgctcagcggcatcggcaacggcaccacgttccggatgatcccggtgatcttccgcaccctgcacgagcgcctgtcggccaatgaaggcgctgaaggcaagaaggccgctgcgcatcaggccagcatcgaatcggcagccgtggtcggcttctccggcgccatcggtgcctatggcggcttcttcatcccgaagagctacggcacttcgatcagcttgaccggcggcccggacatggcgctgtacggcttcatcgcgttctacgccacctgcctggccgtgacctggtggtggtactaccggcggggcgccgaaacaccctgctga

SEQ ID NO: 500273 - DNA, 3756 bp, Stenotrophomonas maltophilia
atgagctatttccttgatcgcttgcagttcttcaagcgtgatccacaacccttcgccgatggccatgggttcagcaagagcgaagggcgggactgggaaaacagttatcgcgcccgctggcaatacgacaagatcgtacgttccacccacggtgtgaactgcacgggctcctgcagctggaagatctacgtcaagaacggcctggtcacctgggaaacccagcagaccgactacccgcgcacccgcccggacctgcccaatcacgaaccacgcggctgcccacgcggcgccagctattcctggtacctgtacagcgccaaccggctcaagtacccgctgatccgcggcaccttgctgcgcatgtggcggcaggcccgcaagaccctgtcgccggtcgaagcctgggccagcatcgtgcaggacccggccaagtcgcgtgagtacaagcgtcgccgcggcatgggtggctttgtgcgcctgaactgggacgaggccaacgagatcatcgccgcctccaacctctacaccaccaaggaatacggccccgaccgcatcgtcggcttctcgccgattccggcgatgtcgatggtgtcctacgcggctggagcgcgctatctgtcgctgctcggcggtgcctgtctgtccttctacgattggtattgcgatctgccgccggcctcgccgcaggtgtggggcgagcagaccgacgtgccggaatcggccgactggtacaacagccgctacatcatcgcctggggctcgaacgtgccgcagacgcgcaccccggatgcgcacttcttcaccgaggcgcgttacaacggcaccaagacggtggcgatctgccccgactactcggagctggccaagctcaccgaccattggctgcatcccaagcagggcaccgatgccgcgctggcattcgccttcggccacgtgatcctgcgcgagttccacgtcgacacgccctcgcaatacttccaggactactgccgccagtactcggacatgccgatgctggtgcgcatcgagcgccgtgccgatggtcgcctggtgccaggccacttcctgcgcgccagtgagctgggcgggctgggcgaaagcaacaatccggaatggaagacgctggcgttcgacgagaacagcggcgagatcaccgtgccgaatggctcggtcggcttccgctggggcgagaagggcaagtggaacatcgaggaaaaggccagcgatggccatgacacgcgcctgcgcctgagcctggccgacatccacgacggtatcgaggcggtgagcttcccgtatttcggcggcatcgagagcgacggctggaccgccgcaccggccgaggacgtactggagcgcaacatcccgctgcgccgcctgcagctggctgatggcggtgaagcgctggtggcgacggtctacgacctgctgctggcgcagtacggcgttgatcgcggcttcggcggcggcaatgtcgccaagagcttcgatgacaacgtgccgggtacgcccgcctggcaggagcgcatcaccggcgtgtcacgcgccgaggtgatcgagattgcccgtgagttcgcccgcaccgccgacaagacccatggtcgcagcatgatcatcgtcggcgccggcatgaaccactggttccacaacgacatgaactaccgcggcctgatcaacatgctggtcatgtgtggctgcgtgggccagaccggtggtggctgggcgcattacgtgggccaggaaaagctgcgcccgcagaccggctggcagccgctggccttcggcctggactggagccgcccgccgcggcagatgaacggtacctcgttcttctacttcaacaccgggcagtggcgttacgagaagctgcaggtggacgaactgctgtcgccgctggccgatgcctccaagtacagcggcagcctggccgacctcaacctgcgcgcggtgcgcatgggctggttgccgagcgcgccgcagctggaccgcaatccgctgcagctggtgcgcgaggccgaacaggccggcatcgcaccggccgactacgcgctgtccaagttcaaggacggttcgctggacttcgccttcgccgatccggatgccgcgcagaaccacccgcggatgatgttcatctggcgctccaacctgctcggttcctccggcaagggccacgagtacatgctgcggcatctgctcggcacgcgtcacggcctgcagggcaaggacctgggcgagatgggcgcgctcaagcccgaggacgtgaagtggcgtgacgaagcaccggaaggcaagctcgacctgctggtgacgctggacttccgcatgtgcaccaccgcgctgtactcggacatcgtgctgccgaccgccacctggtacgagaaggacgacctcaacacctcggacatgcatcccttcatccaccccctgtccaaggcggtggatccggcctgggaatcgcgcagcgactgggaaatcttcaagggcgtcgcacgcacgctcagcgacatggcaccgggcgtgctcggtgtcgagaaggacctggtgctggtgccgaccctgcacgacacgcccaacgaactgggcatgccgttcggcgtgactgactggaagaagggccagtgcgaggccatcccgggcaagaccatgccgagcatggcggtggtcgagcgcgactatcccaacctctaccgcaagttcacctcgctgggcccgctgctggacaagctcggcaatggtggcaagggcatgagctgggataccaagcacgaggtggaattccttggcaagctcaaccacaccgtgctgggcgaaggcatcagccagggtcggccggcgattgataccgccatcgatgcctgcgaggtgatcctgcacctggccccggaaaccaatggccatgtcgcagtcaaggcctgggagtcgctgggcaccttcaccggccgcgagcacacccatctggcggtgggcaaggagcacgaggcgatccgcttccgtgacatccaggcacagccgcgcaagatcatctcctcgccgatctggtccggactggaagacgacaacgtcagctacaacgccggctacaccaatgtgcacgagctgattccgtggcgcacggtgaccggccgccagcagttctaccaggaccacgagtggatgatcgacttcggtgaggccttcatgagctaccgtccgccggtcaatacacgcacggtggagccgctgctcaacaagcgccagaacggcaacaaggagatcgtgctgaactggatcaccccgcaccagaagtggggcatccacagcacctacagcgacaacctgatcatgcagaccttgtcgcgtggcggccccatcgtctggttgagcgaggacgatgcacgcaatgccggcatcgaggacaacgactggatcgagctgttcaacgtcaacggtgcgattgctgcacgtgcggtggtcagccagcgggtgatgccgggcatggcgatgatgtaccacgcccaggaacgcatcatcaacgtgccgggttcggagatctccggcacccgtggcggcatccacaactcggtgacccgcatcgtgctcaagcccacccacatgatcggcggctacgcgcagctggcctggggcttcaattactacggtacctgcggtaccaaccgcgatgagttcgtgatcgtgcgcaagatggacaagatcgattggctggacggtgaggacgcaaattcgagtgcaaccgacgccgcacgggaggtggtgtga

SEQ ID NO: 500274 - DNA, 1545 bp, Stenotrophomonas maltophilia
atgaaagtacgtgcccagattgcgatggtcttgaacctggacaagtgcatcggctgccacacctgctcgatcacctgcaagaacgtgtggacctcgcgcgaaggcgtggagtacgcctggttcaacaacgtcgagaccaagcccggtatcggttatcccaaagaatgggagaaccaggagaagtggaacggcggttgggtgcgcaacggcagcggcaagctggtgccgcgcgccggtggccgctggcgcatgctggccaagatcttctccaaccccgacctgccgcagatcgacgactactacgagccgttcgacttcgattaccagcacctgcacgacgcgcccgagctgaagcatcagccgaccgcacggccgcgctcgctgctgaccggccagcgcatggagaagatcgagtggggcccgaactgggaggaaatccttggttcggagttctccaagcgttcgcgtgactacaacttcgacaaggtgcagaaggagatctacggcgccttcgaaaagaccttcatgatgtatctgccgcggctgtgcgagcactgtctcaacccggcctgcgtctcggcgtgcccgtccggcgcgatctacaagcgcgaggaagacggcatcgtgctgatcgaccaggacaagtgccgtggttggcgcatgtgtgtgtcggcctgcccgtacaagaagatctattacaactggaagagcggcaagtccgagaagtgcatcttctgctacccgcgcatcgagatgggcgagcccaccgtgtgctcggaaacctgcgtgggccgcatccgctacctgggggtgatgctgtacgacgcggatcgtatcgccgaggccgcatcggtggcggcggagaaggacctgtaccagtcgcacctggatatcttcctggacccgttcgacccggcggtgatcgccgctgcgcgtgccgaaggcatccccgacagctggctggaatcggccaagcagtcgccggtctacaagctggccatcgactggaagctggcgctgccgctgcacccggaataccgcaccttgccgatggtctggtacgtgccgccgttgtcgccgatccagtcggcggcggagcgtggccatgtcggcatgagtggcgaactgccggatatcgcctcgctacgcatcccggtgcgttacctggccaacctgctgaccgctggtgacgaagcgccggtgatccgtgccctggagcggctgatggcgatgcgtgcctggcgccgcgccaagaacgtggatggcgtggaagacatgcgcgtgctcgaacaggtggggctgaccccggcgcaggtggaagagatgtaccgctacctggccatcgccaactacgaggaccgtttcgtcattccgagcgcccaccgtgagtacgccaacgatgcgttcggcgaacgtggtggctgcggcttcaccttcggcaatggttgcaacggcgacagcccggctgacctgttcactcagcgcaagaccaccaccttcgcggtgcatcccaaccgccaacatcggcatgaggtggtgaaatga

SEQ ID NO: 500275 - DNA, 681 bp, Stenotrophomonas maltophilia
atgagtgtgctcaagctgattggcgtattgctggactacccgcgtgacgagctctggcagcatggcgaggagctgctcgaggcctgcgatgatccggcactgtcgccggcccgtcgcaggcagttgcagaccttcgtccgtgacctgcttgctaccgacccgctggacgcgcaggaccgctggctggccacgttcgaccgtggccgctcgatgagcctgctggtgttcgaacacatccatggcgagtcgcgtgatcgcggccaggccatggtcgacctgatcgatgcctaccgcaagaacggcttcgagctggatgcgcgcgaattgccggactacctgccgctgctgctggaatacctctcgcatcggccgcaggccgaggcaaaggactggctgcaccacatcggccacatcgccggcatgctcgccgcacgcgccgccgagcggcagctgccgcatgcggtgctgctggagatcctggtcgaggcgggcgagggcaaggtcaacctggccgttctgcgccagcgggccagcgaagaagtgcgcgacgacaccgtcgaagccatggaccgcctgtgggaagaggaagcggtgcgctttggcaccgatgcaccttcgcaggattgcgatccaccccatcgttcaccggcacgcgcgcagccgcgggagatccagccatga

SEQ ID NO: 500276 - DNA, 705 bp, Stenotrophomonas maltophilia
atgaattacctcaatcagttcgccttccagttctatccctacatcgcggtggcggtgctgttgatcggcagctgggcgcgctatgacaaggccatgtacagctggcgtaccggctccacccagttgctgtccgaccgcggcatgcgctttggcagcaactgcttccacatcggcatcatcgccatcctcggcggccacttcgtcggcctgttgaccccgcatgcgctgtacgagcccttcatcacctcctcgcagaagcagttgctggcgatggtggtgggtggcttcttcggcgcactgtgcttcgtcggcatcaccatcctgctggtgcggcggctgaccaatgcgcgggtgcgtgcaatcggcagcttcggtgacacgctggtgctggtgctgctgttcgcccagctctgtcttggcctgtacagcatcaaggtctccgccgggcacctggacggcggggtgatggtgatgctggccgagtgggcacagcacatcgtcaccttccgtgccggcgcggccgattatgtcgaaggcgtgcattgggtctacaaggcgcacatcttcctcggcctgacgctggtgttgatcgcacccttcacccgcctggtgcatgtgtggagcgtgccgatcagttacctgtggcggccatatcaagtggtacgtcgtcgccaggccacgctgcgctacggtccgcgggagtaa

SEQ ID NO: 500277 - DNA, 891 bp, Stenotrophomonas maltophilia
atgggcagcctgccacgcattctccccatcaccgtcatcgactcgcaaacaccggtgccggccgaggccggccaccatcacgatgccgacgatggcccgcgcagcctcggccaaccggcaccgtgcagcctgtacgtgcaggacacgccgatcagcgaggccgatatcgcccgcgagatgcaataccatcgggcgatgcgcccggagcagtcacgtgccgatgcggcgcgtgcgctggtggtacgcgagctgctgcggctggaagccgagcggcttggtctggctgacgcccccggcgtcggccaggagaccagcgaggaagcacgcatccagcagctgatcgaacaggcgctggtagaccgcgtgcccagcgaagacgactgccagcgttactttgcgcagaaccccgagcgtttccgctcaccggaccgcatccgcgtacgccacatcctgctggcggcaccggccgacgatatcgccggccggctgaaagcccgcaccctggccgagaagctgatcgccgaactgctggaacagccgcacctgtttgccgatctggccgcgcgtcactcgcaatgcccgtccagcagcgaaggcggcgatctgggctggctgcaacgcggccagaccacgccggaattcgatcgccaggtattccgcctgcgacaaggcttggccgggttcccggtggaatcgcgctggggctaccacgtggtcagcatcgatgcgctggaagccggtacggcgctcagtttcgagcaggtgcagccgcagatcagcgactacctggagctacaggtgcgccagcgcgacgtgcagcagttcctgctggaactgcgcgaacgttacccggtgcgtgggctggaagacatcgaagcacaggctgagtaa

SEQ ID NO: 500278 - DNA, 1332 bp, Stenotrophomonas maltophilia
atgagccagaatctacagaacatcagcaacggcgaacaacaacgtgcgctatggctgagcaccttcgccttcaccgtgtgtttcgcggtgtggatgatcttcgccatcataggcatccagatcagcgagcagctgggtttgaacgacacccagttcggcctgttgatcgccaccccggtgttgaccggctcggtgatccgcgtctttctcggcatctggtccgatcagtttggcgggcgcaaggtgatgaccctggtgatgctgtgcggcgcggtcgcgacctggctgctgacctatgcacagacctacccgcagttcctgttggccgcactgttcgtcggcatcgccggcggcaacttctcagtcggcgtcacctatgtgtccaagtggttcccgccggagaagcagggcaccgcgctgggcatcttcggtgccggcaacatcggctcggcggtaaccaagctgctggcgccgctggtgatggtggcctcgggctggatgatggtggccaagctgtgggcggtcgggttggcggtcaccgccatcctgttctacctgttcagcaaggaagatccctcgctggaagatcgtcgtcgcagtggcgtcaagccgatgtccttcgccgagcagatggcaccgctgaagaacctgcaggtgtggcgcttctcgctgtattacttcttcgtgttcggtggcttcgtcgcgctggcactgtggctgccgcattatctggttggcgcctacggcatggacgtcggcacggccggcgtgctggccgcgtgttactcgataccggccagcctgttccgggtggtgggcggctggctgtcggacaaaatcggtgcgcggcgggtgatgtactggacgctgggggtgtcgtcgatctgtaccttcatcctggcctatccggatacgcgttatatcgtgcagggcatacacggcgagatcagcttccacctggcgatcagcgtgaccctgttcaccgtgctggtattcgttctcggcttcttcatgtcgctgggcaaggccgcggtctacaagcacatcccggtctactacccgcagcacgtgggctcggtgggtggtgtggtcggcatgatcggcggcctaggcggcttcatcctgcccatcgtgtttggcgccctgaatgatgcgctcggcatctggagcagctgcttcatgctgttgttcgtgctggtcagcatttccttgacctggatgcacttcgccatccgccggatggagcgtcgcaacttcccgcagctcgatcgcgagaccgacctgcccgaagccatcgatgccggcgcggtggagaaacagcgtcgggcttga

SEQ ID NO: 500279 - DNA, 1212 bp, Stenotrophomonas maltophilia
atgtcagtagagaccgccgggatggatgacgccacattgcatgtcgcactgctgcagcaacccgcgcacgtgttgttcccgacgccggctgagctgagccctggctttgccgaagccggctggcgtgcggccatgcaggccagcaacgagcatctgattccgcgtgcgttgaccctgggtttctgcgcaccggcccatgacccggagccggccgaaaacgtgctggatgcgctgctggtatgcctgcgcctgcatgccaacatgctggccagcgaccgcgaagtggcagccatggtgctgcagccgggtatcgtcgagcacctgccgcccgccctgctgggccgcttgttggatgcggtgccggagcagctgtgcaccattgcgcggccgcaggtcgaagtgcgtctggatgcagccagcgatgtggtaccggcgtcattgcgggaggtcggttgtacccggatgacggtgatcgatcacgccggcgtcgatggcccggcgatgctggctcaggcccagcaggccgcgttcactgcgtgttactaccagctgcgcgtgccgtgctacgccgatgtgtccttcctgcagcggctgcagcgggtgctggagctggcacccgaacgcatcatcctgccatcgcctgccttgctgcccgaatacccgttgccggcggactggctgcaggcgtggcggctgctgcgggcagccagctaccgcccgttgggtggcgaccactaccagcggccggacctgcccatgccgctgcgcaacggtgacggccagcgccattgcgacctgctcggggtcccccgccgcgagcgccatgacctgctcggtattggtgtgggcgcctgcagccagatcggcgatgtgatctgtcgcatcgcaccggagccgcgcaactggcgcgcctgcctggtggttggccagcctggcatatcgtccgggcttattctttccgagcatgaacgtatgaccgatgaggtggtgcagagcctggcctgcgaccacgcgctggacatgcgcgccttcgaatggcgcaacgcgcagccgttcgatgcctgtttcgagcacgcctggagccgcgtcgccatgttcatcgaacgcggctggctgcgtcgtgacggcgacatgttgttgatccagaacgaaggtgagctgctgtggcgtatgatcgcagcgtgcttccgccccttggccgctgttgcttga

SEQ ID NO: 500280 - DNA, 612 bp, Stenotrophomonas maltophilia
atggtcgaccacgtcgggccctaccacgcgggtgattacatcttccgcgcgggtgagccctttgatgcaatcgccgcggtgcgtgcgggcatggtcaagacctttgtcgacgacagcctgggcaatgaacaggtgctgggtttttcgctgccgggcgaagtgatcggtctgaatgccatccacggttcgcgctatccctgcaatgcggtggcgctggataccgtgcatctgtgccgcatctcgtttccgcgcatcagcatgctggccagtcgcatgcctggcttgcaggccaagctgttcagcctgctcagcgccgagatcggcaaggccgccttgctggcggccaactaccgcaccgaggagcgcatggccgcgttcctgctggatatctccaaccgctacgcgcggcgtggattttccgcacaccgcttcaacctgaccatgacccgcaccgagatcgccaactacctgcgcatggccccggaaaccgccagccgggtgctgcgccgcttgagcgacgaagaagtcatcgcggtgaagcagcgcgagatcatcctgctgcaaccggagcgcctggcgctgatggcggccaccgatgacgcaagcgaatga

SEQ ID NO: 500281 - DNA, 741 bp, Stenotrophomonas maltophilia
atgaacaagctgtgggcgttgttgttgctggctgccgcactgccggcaggcgctgctgatctgacggtatcggcggcttccagcctgaccgaaagcttccgcgagatatccagcgcgtatgagaaggccaacccgggcacgaagatcgacctgaacttcgcggcctcaggcaccttgctgcagcagatcgcgcgtggcgcaccggtcgatgtgctggcctcggccgaccaggccacgatggcacaggccagcacagaagggctgatcgatccggcaacccagcacgtgttcgcgcagaacagcctgtgggtggtggtgccgccgcaggccagcaacaagccgaccacgttggcggcactggccagggccgatgtgaagcgcgttgccatcggcaaccccgacagcgtgccggtcgggcgctatgcacgcggcgcgctgcagcaggccggtttgtggccggcgatgcaggccaagatgatcagcacccagaacgtgcgccagtcattggactatgtggcgcgcggtgaagtggatgctggtttcgtctacgccaccgacgtgcaggcgatgagcgagcgcgtgcagcgtgcattccaggtgccggttgctggtggcatcgcgtatccgctggcgatggtcaagaccagccgcaatgccgccgaagccaagcgcttcatcgccttcgtgcgctcggcgcagggccaggccatcctgcacaggcacggcttcggcagtccttga

SEQ ID NO: 500282 - DNA, 687 bp, Stenotrophomonas maltophilia
atggtggatctggactggagcgcgttgtggttgtcgctgaaggtggccggctgggcgaccgcgatcaaccttgtgctcggtgttggatttggcgccttgctggcgcggcggcgctttcctggccgggagttgctggacacgatactcaccttgccgatggtgttgccgccaacggtgctgggctattacctgctggtgctgattggcagcaaggggccgctgggagcgtggctggagagcagcttcggaatcaacctggtgttcacctggcaggcggcggtgattgctgctgcggtggcgtcgtttccgctggtgttcaagccggcgcgtgccgcgttcgaggatgtcgacggccagctggaacaggccgcgcgtaccctgggcgtgtccgagctggcgctgttcttccgggtgaccttgccgctggcatggcgcggcattcttgccggcctgctgctggcgttcgcccgcgcgatgggtgagttcggcgccaccatcatggtcgccggcagtattcccggccgcacccagaccttgtccattgccatctatgaggcggtgcaggccggcaatgacggtcgcgccaacgccttggtgctgctgtcctctctggtctgcatcagcgtgctgctgcttgccgcacgactggtcgggcggcggcaggaaggagcgcgcaatgtggcttga

SEQ ID NO: 500283 - DNA, 666 bp, Stenotrophomonas maltophilia
atgtggcttgagcttgatgttcagcgccaactgagtgcggctggacagcagttccagctgcaggcgaccttgcgttgcacacagccgaacgttgtgttgttcggcccgtccggcgctggcaagagtctgacgctgaaagccattgccgggttgctgcagccggatgcaggagtgatccgcatgcacgcgcaggcactgtttgatgcggcggcaggtatcaatctgtcgccgcagcggcgccgtatcggctatgtgttccaggactacgccttgttcccgcaccttacggtgcggcagaacgtcggcttcggcctgcagcagggtctgttgaatccgtcgcgcgcccgccgcgttgatgcagtggaacaatggctgcaggctttccgcatcgatcacctcggtgacctgctgccgtcgcagatctccggcggccaacgtcagcgcaccgccttggcgcgggcgctggtgaccaagccgcaggcactgctgctggatgagccgttcgccgcactcgaccacgccctgcgtgcgcatctgcgccaggagcttgaaacggtgctggaccagaccggcatcccgctgctgctgatcagccatgatccggaggacgtggacatgttcggccagcaggtggtgcatctggctgatggccgcgtgcaggcctga

SEQ ID NO: 500284 - DNA, 1269 bp, Stenotrophomonas maltophilia
atggcgccggccttgatattggtcagtcccggcggcgacgaaggggcggatactcgctgcgtggacactttcacgacccgcgtgcagctattcaatgcgccacaccggctgctgttcttcatcggtgtctgcaatctcggcttggcgatggcttggtgggcgctctggctggccgggttgcagctgggcagccccctgcccgtgcccgccgtgccgccggcctggctgcatgggctgtggatgcagtacctagtgctgcccagtttcatcttcggcttcctgttgaccgtattcccacgctggatgggattgccggcactgccgcggtggcaatacgcaggcgttggtagcggactgttcggcgcgcagatcgcgctgctgaccgccagcagcggttggcaacccgggatgtggttggccctgttgctggcggcgctgggatgggcattcgggctggtcgtactcggccgcctgctgttgcaggagaaaggccgcacctggcatgcgtggtcatgctggtccggcttgctggtgggctggatcggcctgctcggtttcgccgccgctgccacaggcgctgatatccgctggcaggcactgagcgtgtcgcttggcaccttcgggctgttgctgccgatctacgcaagcgtcgcccaccgcatgtttccgttcttcgccggcaacgtggtgccgggctaccaggcatggcggccaccacaatggttggcgatcctgtggggactgtgcctgctgcatctggccggggaacagctgcagcagccactggcgacgctgctggccgatgcgggcctgctgctgttgtcgctgtactcgctgtggcgttggtggccgcgcggacccaagccgccgctgttgagcgtgcttttttacggactggcgtggtggccgctggcgatgctgctgtatctgctgcaggacatcgccgcgcttgccggccataccggctggctggaacgcgcgccactacatgccttggcgatcggcctgttcggcagcctgttggtggccatggtcacgcgtgtgacccaaggccattccgggcgtgcactggtgatgccggtggtcgcatgggtcgccctgctcggcctgcaactggttgcggtgctgcgcatcctcgcaccgttgctggacgatccttggcattggcatgccgtcgccgccgccggctggctgctggtgcttgcaccgtggttgctgcggttggggtggatctactggcgcccacgtgcggacggcaagccggactaa

SEQ ID NO: 500285 - DNA, 1455 bp, Stenotrophomonas maltophilia
atggcatggctgctgcttgtgctgtgcgcctcgctgctgcttgcacctgcgccgctgctggctgcgaccgaagaaagcaccgctcaggcgcaggccccagcgacggtgcgctattacaaccgtgacatcctgaccttccgcagtgcgttcatggggcgctcgcccttgcagcgggcgcaggttgccgaattcaacatcaagcgcatcgtcgacgagccgggaacgcccggcgtcaccttcaacgataccgccgccggtgtgatcctgctgctcggcggggaagtcgtcaccctcatcacgcctgccgatgtggataccgcgcagggccagagtctggcccaggtacgcgaggaggtgcgcagccggcttggcgaggcggtcgccgccgccgagcgcgagcgtgcgccgggacgggtgcttcgcggtgtgctgcacagccttgtcgccaccgcactggccgccgccttggcctgggtgatggcctggctggcacgtcagctgcgggcggcgatgctggcctgggtgggtaaaaaagccgggacgttgcgtagcgtgccggtacggcagatgctgcatggggccaatgcgctggccgactggttgtcgcgcgccttgctgctggtggcggtgctggtgctggccgaggaatggctgcgctatgtattccatcagttcgactacacccagccgtgggcaacgacgatgacgttgtggctcgctgcccaggccaaagcctggttgtgggcgggggtggcggccatcccggggctggtgacggcgctgatcattttcctgctggcacgcctggccagccagatcatcggcatcctgttccgcggcgtgcagcatgggcgtttccagttgttcggcatcgaccgccagttggccgaacccagccgcaaactgatcgtcgcgggcatctggctgtttgcgctggtgatggcctatccctatctgcccggctcgggcagtgatgcgttcaagggcctgacggtgctgctgggcgtgatgatctcgctgggcggatcgagcatcgtcggccaggcggcggcgggtttcaccctgctgtattcaaggacgatgtcggtcggcgatctggtcaaagtggcggaggtggaagggcaggtgatacagatcggtttgttcaccacccgcatccgcacccttaccggggtggaggtcagcctgcccaacatgcatgtgctcagcggcaagctgctgaactattcgcgtgatccgcaggcggctggcatgtggctggaaaccggcgtgaccatcggctatgacacgccgtggcggcaggtgcatcggctgctgctggacgcggctggcaggaccgggcatgtgcagcacgcaccgcctgcctacgtgttgcagaccgcgctcaacgacttctacgtaggggttcacccccgttttcacggacacttacaagaaggccgatcgaggccatga

SEQ ID NO: 500286 - DNA, 288 bp, Stenotrophomonas maltophilia
atgtcaaagcgtcgcaagttcagtgccgagttcaagcgtggcgcggtggagcaagccagtcggcccggtgtcagctgcgcccaggtggcccgtgagctgggcatccgcgacagtctgctgacccgctggaagcgggaggcggagacgttggggaaagccgcctttgcgggtaccgggagcccgcgtgacgaggaggttgcccggctcaagcgcgagttggccaggatcaccaaggagcgggattttttgcgcgcagcggcgacgttctttgccaagggatcatcctga

SEQ ID NO: 500287 - DNA, 861 bp, Stenotrophomonas maltophilia
gtgatcgaacgttgccgcgatgagtttccgattcgcctgatgtgccgctgcctgcgggtatcgaccagtggctactacgactggagcaagcgcctgcccagccctcgtcaatgcgataacgagcgcttgctgggccgtatccatgcgctgcatcaggacagccggggcacgctgggtgccggccgcatgcaggaagatctggtcgaggaagggctgacggccagtcggaaccgggttgcccggctgatggcgttggcaggccttcaaggctggccgcgcccgaaacggcgtggtcagtgcgcccaaccggcactgacgccgccgtgcgtgcgcaacctgctggagcgtgatttcagcgccctggagccggaaaccaagtgggtgactgacattaccgagatcaagacccagcaggccaaactgtatctgtgtgtcgtgctggatctgtttgatcagcgcattgtgggctggtcaatgcatcatcggcaggaccggcagatggtgatcagagcggtacagatgacggtttggcaacggcaggagcggcatccgctgatcctgcactccgatcgcggcagccaatttcgtagcggtgattaccaggattacctggccgccaatggcctgctctgctcgatgagtgcggtggggcattgtggtgacaacgccgcctgcgaaggcttctttggcctgctcaaacgcgagcggatatatcgcacaacgtatccaacactcgatgccgccaggtccgatgtgttcgaatacatcgagcgccgccacaatcccaggatgcgacggcgccgggtcaaacaggatcagaagttttcagccttttccaaacagtccgtgatttcggggtag

SEQ ID NO: 500288 - DNA, 675 bp, Stenotrophomonas maltophilia
atggcaattcttcacacatatcagcaccacgagccctggaacaagggcaagctgatcgggcagaaggcaccgctcaagctgaaagacatctgggctattcgcattcgccttcagctcggccacaaggtccgtgacctcgccctcttcaacctggcgatcgattccaagctacgcgcctgcgacttggtgaagctgcgggtatcggatgtttcccatagcggtcaaatggcatcccgcgccatcgtgatgcagcagaagaccggccgacccgtccagttcgagatcacccaatcgactcgcgaggccgtgcaggcttggatcacccacgctgagctcaagcagtcggattttctatttagaagccgtatttcggactcgccccacctgtcgacgaggcagtacgcccgcatcgtccatcgctgggtagaagatgctggcctcgagtcgggttcctacggcacgcacacgatgcgcaggaccaaagcttcgttgatctaccgccggacgcgaaacctcagggcggttcagctattgcttgggcatacgaagctagagagcaccgtgcgttacctaggtatagaggtcgatgacgccctggagatcgccgagcagatgggttctaccccgaaatcacggactgtttggaaaaggctgaaaacttctgatcctgtttga

SEQ ID NO: 500289 - DNA, 888 bp, Stenotrophomonas maltophilia
atggccaggagcaacctcaacgatttgcttgccttcgtcaccgtcgcgcgcgagggcagcttcacgcgtgctgccgcccaattgggggtcacccaatcggccgttagccaggcgatcagcggcctggaggcgcggatgcagatccgcctgcttacccgcaccacgcgcagcgtggcaccaacgcctgccggcgagcgcctgatgcgggcgattggacatcgcttcgacgaaatcgaggccgagctcgatgccattaccgaactgcgcgagaaacccgccgggacggtacgcatcacctgcggcgaccacgtgctgcgcaccacgttgctgccgaagctcgcgccgctgatgcatcagtaccccgacatccacatcgagttcgatgtctcctatggcttacgggacatcgtggcggatcgtttcgatgccggcgtgcggatgggcgaggagatcgacaaggacatgatcgccgtgccgatcgggcccaggttacgcatggcggcagtcgcatcgcccgcatactgggaaaagcatcctccgccgaagacgccacgggacctggtcgcgcatcgctgcatcaatatccggttcccgacgcatggcgggctctacgtgtgggagttcgagcgggctggtcggcagcagaacgtgcgcgtggaagggcaagtcatcttcaacgccagccaccacatcgtcgcggccgcgctgggtggcttgggcatcgcctacctgcccgaagacgagttcgcgccgcacctcgaatcgggcgaactcgtacgggtgcttgcgcggtggtgcccgccattccctggataccacctgtattaccccagtcggaggcagccatcacctgcgttccggttggtggtcgatgcgctgcgtgcctga

SEQ ID NO: 500290 - DNA, 1056 bp, Stenotrophomonas maltophilia
atgaaagcattcgcactgtccgccgcgctgatgttggccttgtcaccccttgccgccggcgcccaagacgtcccgacctcaggaggaaagacgatggcgctgacccaggactgggacaaggtgttcccaaagagcgaccgggtcgagcaccggaaggtaacgttcaagaaccgctacggcatcacgctggcggccgacctgtaccagccgaagaacgccagcggcaagctggcggcgatcgcggtgggtggccccttcggcgcggtgaaggaacagtcgtccggcctgtatgcgcaaacgatggccgaacgcggtttcgtcaccctggcgttcgatccgtcctacaccggcgaaagcggcggtgagccgcgcaatgtcgcctctcccgacatcaataccgaagatttcagcgccgccatcgatttcctcggactgcaagccaacgtcgaccgcgagcgcatcggcatcctcggcatctgcggctggggcggcatggcgctcaatgccgccgccgtggacaagcgcgtcaaggccgtcgcgaccagcaccatgtacgacatgacgcgcgtcatgtccaagggctacaacgacagcgtgaccctcgagcagcgcacgcaaaccctggagcagctgagccggcagcgttggcaggacgcggagaaaggcgctcccgcgcatggtccggccatgaacgagctgaaaggcggcgaagcgcaatttctggtggactaccacgactactacaagacgccgcgcggcttccatccgcggtccgtcaattcgaacggctcgtggaccgtcaccaacccgctgtcgttcatgaacatgccgctgctgacttacatcaacgagatcgcgccgcgcccgatcctattcatccatggcgaaaaggcccactctcgctacttcagcgataccgcctacgcggccgcggcgcagccgaaggagctgatgatcatcccggacgcgaaccacacggacctgtacgaccgcgtggacgtgattccgtttgacaagctgacggccttcttccggcagaacctggccgcgcaatga

SEQ ID NO: 500291 - DNA, 1215 bp, Stenotrophomonas maltophilia
atgaccacgttgatggacgttccggcagtcaccggccaatacgaggccacggcgcgccccgcccactggggcggtgtgctcgccatgacgctgtgcgtgttcgcgctgatcgcgtcggagttcatgcccgtgagcctgctgacgccgatggccgccgacctgcacgtcagcgaagggctggcgggctatggcatcgccatctccggcgcgttcgcagtgatcaccagcctgtcgatttccacgctggccggcagcatgaaccgcaaaaccctgctgctggcgctgaccggactgatggccgtgtccggtgcggtggtcgcgctggcgccgaactatgtcgtctacctggcgggacgcgcactgatcggcgtggtgatcggcggtttctggtcgatgtcggccgccaccgcgatacgtctggtgccgaccgcgcaggtgccgcgcgcgttggcagtcttcaatggcggcaacgcgttggcgaccgtgatcgcggcgccgctgggcagtcacttgggttcggtggtcggctggcgcggcgccttcttctgcctgatcccggtggctgccgtcgccttcatctggcagtggatcagcttgccgtccatggccgccgagcgcgccgacggctccggcaatgtattccgtctgttcaagcgtcgcaccgtggtgcttgggatggccgcctgcggtgcgttcttcatggggcagttcacgctgttcacgtatgtgcggcccttcctggaaacggtgactcgcgtggatgtgtccacgctgtccctgatcctgctcgcgatcgggatcgccggcttcatcggtacggcgatgattggcaccttcctcaaggggggcctgtatcgcatcctgatcgtcattcctgttctgatggcggcaatcgcgctcgcgttgatccccttgggtgcttggatgtggccagttgcagttctcttcgcgttgtggggacttctggccactgcggcacccgtcggctggtggagctggatcgcggatgcgatgccggaggaggatgccgaagccggtggcggcctgatggtcgccgtgatccagttggcgatcgcattgggctccaccgtgggcgggatgttgttcgacggcagcggctaccgaagcacgttcgtggcgagcgcagtggttcttctgctcggtgccttcctgacgttgctgacgtcgcgcgcgtcggccggacgggccgcttga

SEQ ID NO: 500292 - DNA, 339 bp, Stenotrophomonas maltophilia
atgtggatgaccatcggcgaacatcgcttctctatcacgttggcggataccgatgccgcgcgggcattcgcggcccggctccccttgacatttgagatggccgagctcaacggcaacgagaaacacgtcgacttgccgcaagcattgcccaccgatgcaagccatcccggcacgatccggaacggcgatctgatgctctatggctcgaagaccgtggtcctcttctacgagaccttccgttcatcctattcctataccccgctgggacacgtgaacgatccccatgatctaggacgggtgcttggccatcgtagtagtcgagtggccttttcagaatga

SEQ ID NO: 500293 - DNA, 468 bp, Stenotrophomonas maltophilia
atgactgagcttcactattgcgacttctggttttctgcgaagaagtccgcgcgaaacataatcagtgaatccgaggctaaatcgagacatgagagccaggctcgctacacggttctcgttggctcccccaccacgccatcagcgatcgtcgatgtgctgttggacaaagacatgattggcgtcgactttctggatgaacacctaaggaagcgcctgtcgtatcagtttcagcaggtggcaccggacaagctgttcctgagcatggtggtttacacggagttcgctggacagagcgacaacgttgctgaaggaacctgctatatcttcaacgaagatggtcggctcatcatagagaaattctcgccccatcatctggaagagtgttcaactacgcacgacccaataggcaactacgagcctgttcctgtcttcggccattactccggtctaattgcagaagaaagatag

SEQ ID NO: 500294 - DNA, 897 bp, Stenotrophomonas maltophilia
atggctgcgcagcagacctaccgcctgttcgaggtggcgctgaaggagcgccgcgttctttccccttcccttgaccgcatggtgttcaccggtgccgacgtggcgcggatgaagaccgaaggccctgaccagcgcatcaaggtgttcttccccttgcccggccaggaggtgccgcaggtccccagcggtgaagactggtacccacgctaccgggccctgccggacgacaagcgcccgccgatgcgtacctacaccatccgccagttgcgcgccgagcagggcgaggtcgacgtcgatttcgtcatccatggcgaaaccggccccgcctcgcgctgggccatgcacgcccgccctggcgaccgcgtggtgctgctggccccggacgccgactgtgccgggagcagcgagggctgggagtggaagccaccggccggtgtcggccaggtgctgctggtggccgatgaaaccgcgttgcctgcggtggccggcatcctcgaggaactggcggccatggtcgacccaccgcgcacgctggcgctgctggaggtggcgcaggccggtgatgcggtgcacctgaaggcgccctccagcaccgagctggtctggctgccgcgcgggcaggccgcctacggacagcggttgctgcaggcggtccaggcgcggttggcagcgacctcgggcgtggctgccggcgatgcgctggaggagatcgacgtcgatacgcagatcctctgggagcaggccgaaaccggtgtggccgggccgctgtatgcctgggtggcgggcgaggcggcggcggtgatggcgatccgtcgccatctggtgcgcgactgcgggctggaccgccgcgcgatcaccttcatgggctactggcggcacggcaaagtgctggactga

SEQ ID NO: 500295 - DNA, 561 bp, Stenotrophomonas maltophilia
atgcagcccaagtccaacgttctgccgttcaacgcagcaacccgctccaagcgcctcgtagcggctaaacccacccggctcacctccgtttgctacaaggcaagcgacaaggcccacacgagcgtcgattggtataccccgcctgccatcgtcagggcgctggggggaaggcgcggctttgacctcgatccttgcacgcccgaagacccgtcgcggctgcccgcacccacggccagccggatgatcccgccgagccaggacggcttggctacgccgtggcccaagcaggcattcgtgtggatgaatccgccttacggaaaagggattgagaagtggttgagcaagctggccaaccaccccggcggcggtatcgccctggtgccggtcaacatggagacgggatggatgcacgactgcgtgctttcccaccccaacgcgacggcgatcctgttcacccgtgggaggctgaggtttgtgcgtcccgacggaaccaccggcacggcagcgccgtcgggatcgttggtggtgacttacggcaagcgcgacgtccccccggcttga

SEQ ID NO: 500296 - DNA, 780 bp, Stenotrophomonas maltophilia
atgcaacctattcaagccttcaacgacacacacagccgcgcggtacggctactccgctatcacgacggtcttgtcaacacacggcaaaggtcgatccggtcggattggaaggcgaacttttgccgcctcatgcattggccgcagacacacgcaattgagcgcgttgactctactgatgctgtattagtgcttcgggaccaggcctccctgaagccagacgacttctctgcggacgctttggaagatcttctcaggtccgcaatcacgttcggagtaagcgcaattgacaggtacgtccacgaacgaatcgtcaaggcgtttgttaatgcattcaggtcgccggaacttacaaagaatcaacgcgagttccaagttccagccaccctcgctatcgacatcgttaaccgagtgcatagtgcacgccacgcgtcgcagacgatcagaccagccaacgaaatacgaaaggtagtgcagcagacgttgcataagcgcccattccagagctggcgagaaatcgaatacggattctcgctgatcggcatcaaggatcttggtaagacactaaaaacaacccacaccctgtcaaacgatgacctagaggcgctcaagaaccaactgaacaagatcgtcgctcgacgcaatcagattgtccatgagggcgatctccctcgccaccagcgtggaggccaagtttatgttcaggagataaggcgcttgtgggtacaggaaagcctggatttcctagcgggcttcgcttccaagctggagggtgtcgcctga

SEQ ID NO: 500297 - DNA, 309 bp, Stenotrophomonas maltophilia
atgagcaatttctctacgcaaattcgcgatttcgcagatgatgccattgaaagaattaattctgtactgagccttgagcctcgaaatgatttcgtcaaggagcataccggattcccgtcaatagacgagctacttgcgtcggcgggtgttgatgcgagtcaggatcaagctctagccgaattctgcagttccgcagatgcggatactttgattcaaaaattatctaaatttgaatcctggcaagatttccttggctcggcgcttcaagacgcattggaacataacggcctgagcaacaagggcttctag

SEQ ID NO: 500298 - DNA, 1035 bp, Stenotrophomonas maltophilia
atggattgccataccgatgccgctatcggtgaggttgtgcccgcgcatggcgcgggcacggcaggagcagtgacggccttttcctttggcgatccaacccccgtgttggactcgcgtgggttgttcgactacctggagtgctggcgcaacggtcgctactacgaacccccgatcaccctcagtggcctgtcgcgcaccacgcgctccaacccgttcctgcacagcggcctgatcttcaagcgcaacatgttggtgcgcacatttgtgccacatcgcctgctggatcgcaccgcgttttcgcagttggcgctggattacctggtgttcggcatggcttacctggagcggcaactctcgcactccggacgcctgctgcagctgcagcctctcatggcgcagtacatacgccgtggcgtgcaacccgctgagttctttcagatgcgagccggaaggatcgagcatgaattttcgcccggttctgtgcttcagctacgtgaggcggaccccgatcaggaaatctacgggatgccggaatggctggcggtcgtgcagtcggcactgctcaacgaatcggcgacgttgtttcgccgcaggtactacaccaacggctcccatgccgggttcattctctacatgaccgacccgcagccggagggtatggacgtggacgcattgcgccaggcgctgcgagactcgcgtgggccgggcaacttccgcaacctgttcgtgcattcgcccaatggcaagaaggatggattgcagttgatccccatcagcgaagtggccgccaaggatgagttcacgggcatcaagcgcgtgacccgtgatgacattctggctgcgctgcgtgtccccccgcagctgctgggcatcgtgccgcagaatgcgggcggattcggatcgattcgggatgcggccacggtgtgggcgtcgatggaactggcacccctgcaatcgcgcctggccatcgtaaacaagtggatcggtgaggaggtcattaccttcgccccgtttgacctaggcagtgcctcctga

SEQ ID NO: 500299 - DNA, 750 bp, Stenotrophomonas maltophilia
atgagcgagatccagacgactaacaccaccacctctgaactggccattcagctcggcgaaggggccgaggcagcgccggtgtcgacgagcaggcagcggatgaacgagctggcccagcagttgtccagcgcagtgcagcgcaagcacgccctggtggccaaggtcgatacgatgcagcgtgccaaacaggctgcgcagggcgatgcagccgcagcgcgccaaaagtggagtgccaagcttcgcgaagccgatggcaacctcacccgcgatgttcagaagttgcgcaccaacgagagttcggcactgtcgctggctgaggaatatggggcgatggcggatgaaatcgcggctgaactgccgcgcgtggagctcgaactggccgagatggcggacagttgcctcagcgcggcgagcggcgtcattgacgaagctgccagtgaggcctatgggcagctgctcgagcaagcgggcgaccgcttggcggtggccttcgcgctgttcgcgaaggcggagaatgcgggcgtccactatcggcagtcggccagtaccggcgaattggccagcacgttcttcggtcgtctcggcgaagcagttcgccatcgcctaaacgattccgcagtgaccgatcaggtggcgcaacagttggcattgccgccgatggatatgagtgcagtggacatggagctggtgcgtagcccggcgcgccgttcacagttgcgtgcacagatcagtgccgggagcacggtgtga

SEQ ID NO: 500300 - DNA, 1863 bp, Stenotrophomonas maltophilia
atgagcaacgtcacctctgtcgatttcaatgatgccgccaaggacgccggtaccggcgccgtacgcggctcgattcagcgcgccgtgcgcaagggcgccaagggcaagaccaagagcaacaaggacgccgctgactgcaccagtggcagtgccagtggcggtgcggcgcgagcgcactaccagctcaacgagagcggcgtgtactacgtcggcgtcaccgaggatggtgacctggccgagccagtgtttgtctgctcgccgttgaaggtcgaggccaagactcgtaacagccagagcgaggaatgggggaggttgctgacctggaccgacgccgatggccagcctcaccagtgggcggcacctgcggaaatgttggtgggcgatccgcgcgagttcgtgcgccagctggccgcaggtggtgtggaaatgtcagcccaccgcaacacgatgcagcggctgctggcctacatcattcaggagcgcatcgacacccgcgcgcgcaacgtcgccgtgccgggctggcatgagggccgctacgtactgcccaatggcgaaagctacggcaatggcgtggagcggctggtctatcagcacagcggtggattgcagcatcactatgcggccgttggctcgctggatgactggcgacgcgacgtggcccgacgttgtcaggacaactcgcgtctggtgctggcggtgtcggccatgttcgccgggccgctgttgcacttcaccggcgctacgggcggtggtttccacctggtcggcggcagcagtagcggcaagagcaccgcgctgcgcgtggcggccagtgtggtcggtcccccggagtatgcccgcgagtggcgcagcacggccaacggtctggaaggggtagcggtcctgcataacgatgcgacgctgattctggatgaactggcgcagatcgatcctaagcaggccggtgatgcggcctacctcttggccaacggcaatggcaagagccgcgccaaccgggccggtgaggcccgcgcggctgctcgctggcgggtgctgatcctgtcggccggcgaggtcgggttggcccagcacatggccgaggcgggcaaacaggcacgggcgggccaagcggtgcgcttggctgacgtaccggcagaggctgagagtggatacggcgtgtttgagcgcctgcacgatgccagcgacggcgcggcactgtcggcactgctcaaagacggcgccgcgcgcacctacggcgcaccgtggccgctgtggatgggttacctgacccagcaggacagccccacgctgaccgcccaactgcgcgaatccactgaccgcttcctagccacctacgtacccgaagatgcctccggggaggtgcgtcgggtggccgaacgctttgctgttgtcgcctttgccggtgaactggccagtagctgccgcattaccggctggcccaagggtgaagctacccagggcgtggcgacgtgcttcaaggcttggctgcagcgtcggggtggctcaggcagcgctgacaccgacgaattgctgtcgcgcgtgcgtgcgttcttcgaagcgcatggcgagagccgcttggagccgctgcgcagccctgaaggcactgtgccggtgcgcgaacgcgtgggtttccgccgcttcgatgaagtcggattgacggaatacctggtactgcaagaggcgttcagacgagagctgtgtgcgggcttcgatgttcgcttggctgcacgcacgttggccgaagccggctggcttaagcgcagtgccgacggcaggccctcccaagccgtacgtatccccggcttgggcgccatccgcgtcttcgtcttcgacccgcgcaaggttcacgacagcggcctgtaa

SEQ ID NO: 500301 - DNA, 843 bp, Stenotrophomonas maltophilia
atgatgcggcctgacggtttcctggccatcctgcgcgcggcagggctgatgctggatacggcggcgccagatggccgtctgcggcgtgtacgcgccgagggcgatggcagcggtcagcgcagcggctggtatgtgctgcacgcaggcccgccgcaggccggtgcttacggcaactggaagaccggactcaatgagtcctggtgcgaagttggaagcgaggcgctgagcgaggccgaccgcgcgatgctgcgcgaggccatggtgcgcgcacagcggcagcagcaggccgagcgtgcccagcgccaggctgtggcccggcagcaggcgcgagagcgctggcagcgcgccagcgccgctgcctccgatcacccctacctgatggccaagggcgtgggcgttcacggtctgcggcagctggatggcctgctcttggtgccattgcgcgatgcacaggggcggctgtggagcctgcaaaccatcgccgccgatggcagcaagcgcttcctggccggtggccgtaagcgtggcttgtactacgccgtgggccgcacgatcagcgacgtggtgtgtatcgccgaaggctatgccactgccgccagcatccatgaggccactggccatcccaccgccgtcgccttcgatgcagggaatctggagccggtggcctgtgcgctgcgcgccaaattccccacggcagtaatcgtggtgtgcgccgatgacgacgcggccaccgccgcgcggctgggcatcaatccgggcgtagccaacgcccagcgcgccgccgatgccgtgggcggggtcgtggccatgccgccgcggccacgccatgaggctacttcctga

SEQ ID NO: 500302 - DNA, 639 bp, Stenotrophomonas maltophilia
atgaacgttgataccgtgagtgtttcccgcgtgccgggcgtggccgatggcgcgctaagcgccactatcaccgatagctggttcgataccgagcgtaccgccactattgtcgaggtagcccgtcgcattgagcggctccacagcaaggcgtcgcgtcgtcttgccgctctcagtgacgaactggatcaagcgctggaaggccatccgttggaggaccgcttgcgcgagcgtctgctgtggccgctggagcgcgattgcgtggagctggctaccgttgcggcgcgggtgcgcgtgcgcctgtcgttgtttgcacctgcgcagtcgcaggcgcaatttgatagaggcatggccttgcagctggaagacctgcaagcaaagcaggccgctgccgagccgccgcaagcgcccgcgcccagggccgcacgcatgccctttggctactggatcagcgaggacagcttcaatcgcctggagcgcgcgcgttcggccgcgctgctgctggcaagcgttgatgagcgcatggcggtgccgtttgacgctgtagcgttcagcgccgcctatgtgcatgaggatctggccactgtggtggccagcgccaagcaccgcagccagctggaggccgacgatgatgcggcctga

SEQ ID NO: 500303 - DNA, 216 bp, Stenotrophomonas maltophilia
atgaacgctctctccctgaatgccgctgccatcaatgacgatgcggccacgcatgacctgttcagcgccgcgcgccagttgcagcgcattcacacgatgccgatggctgcgctgtcgcaactggtcaccgcgctggaacgccgccctggtgcactggaatccctgcccgtggggcagctgctggccatggtccgtgatgcggaggtggctgcatga

SEQ ID NO: 500304 - DNA, 210 bp, Stenotrophomonas maltophilia
atgtctcacgacaccctggccgcgccttcgcgcttcgccgttcgcattgcccatcactttggcgacatcgccgacaccctcgattgggaccattcccgctggctggcgctctccgtgcgcctggacgccaccggcaaggttcccgaagcgctgacgctgggcgaggtgcagcacgccatcgcggccaccgtgcaggaggctgcgcgatga

SEQ ID NO: 500305 - DNA, 285 bp, Stenotrophomonas maltophilia
atgaccagttcaagagccttcctgcgctgcccgcattgcgatacgcctgccatcgtgcgcaccagcgtgctgcattccaaactgctgcgcgaatccgtgctccagtgccgcaatgcgctgtgcggtcacacgttctcggcctacaccgagatcgtgcgcacgcatgtgccaagcgtctgcccgagtgccgagatttgcctgcccctcagcgattcggcagaacgccgcgcgctcagtgagaacgccactgaagcaccgcgcgccaagcgcagcacgcggcgatga

SEQ ID NO: 500306 - DNA, 204 bp, Stenotrophomonas maltophilia
atgaaagacaccatcgtcctgaccatctccgatcagaagttcaccctgagcccggcagaagccaagttcctggctgagcatctgcgaacggctgtggcacagccgaatctcgcgctgaacttctcccagagccggactgcgcaaggcggccgcattgcactctcgcgcggtgtcgcgggtagccgttccaccactgactgctga

SEQ ID NO: 500307 - DNA, 273 bp, Stenotrophomonas maltophilia
atgcttggttccccagcccctcaggcgaccgcacctggtcagcctgccgatcattcccggcctgacgccgcacgcggtgaacgcttcctgcgcaagcccgaagtgctcagtcgcaccggcatttcccgctcgcacctgtactggctgatgaagcgcggccggttccccgcatcgatccccctttccccgcgcgtaactgtctggttggagtcggacgtggacgcgtggattgccacccacattcccgatacccacctgcgagcgcagccatga

SEQ ID NO: 500308 - DNA, 1191 bp, Stenotrophomonas maltophilia
atgtcattgaccgataccgccattcgcaggaccaagcccaccgctgccgtgcagaagctgcgagacggtggaggcctgtacctcctgctgaaacctgatggcgccagatggtggcgctgggactatcggcgtcctgtgaccggcaagcgcaacacgctgtcgcttggcacctatccagaggtgagcctggcctctgtgcgcgagcggcatgctgctgcgcgaaagctgttggccgaaggtgttgatccgggcgagcagcgcaaggcgcagaaagtggccagcttggaactggccaccaacacatttgaggcgctggcgcgcgaacacttggcgatgagagccaagaagctgtctgccgggtcggtgaaacgagagacacgcttgatcgaaaaagatctgacgccgtacatcgggcaacgacccattgcagcgatcacggcgcgtgaactgttggaggcgctgcgcaagatcgaagggcggggcgctgtcgaaactgcacatcgggcgcggatgctggtcagccaggttcttcgatacgcgatagcgacaggacgtgcagacaggaacgtggcagaggatctgaaaggagcgctcacttcgcccgaaggtcgtcacttcgccagcatgactgagcccaagcagatcgcagaactgctgcgctcaatacacggctatcaaggatcaccgattgtcatggcggccctgtgcctagcgccgctggtattcgttcgtcctggtgagcttcgtcgtgcacgatggtctgacatcgacctggacaatggcgaatggcggttcacggcaagcaagaccggccaatcgcacgttgttccattggcttcgcagtctgtggcgattcttaggtctgtgcacccgctgactggacggaaagagttcgtgttccccagtgtgcgtggcaaggggcgccccatgagcgagaacacaatcaacgcagcgctacgtcgcctcggctacgactccgacactatgaccgggcatggcttccgcgcgatggcacgcactgtgctggatgaggtgctgggcttccgtccggactacatcgagcaccagcttgcacacgctgtgcgtgaccccaacggacgggcatacaaccgtacggctcacctggttgagcgggcaaaaatgatgcaggcgtggggggactatctggacggcctgagagcctcccgctga

SEQ ID NO: 500309 - DNA, 10098 bp, Stenotrophomonas maltophilia
atgaagaacgtattccgcagtctgtccctgtccgcttcgggcgccggttgggccacgcgcctgcgcaccgcgatggcgagcgccaccctggcattggcgttcctggccccgggcagctcgtttgcccaggtgcaggtacaggccggcgagcaggcgcgggccgaccaggcggcgaacggcgtgccggtcatccagatcaaccggcccaacgcgggcggcgtatcgcacaaccgcttccaggactacaacgtcgggcgcgaggggcagatcctcaacaacagcgcgagcaccgtgcagacccaactgggtggctacatccagggtaacggcaacctgcagccgggccagtcggcacgattgatcctcaatgaggtgacatccaccaacgcatcgcgcctgcagggccacatcgaggtggcggggcgctcggcggcggtgatcgtcgccaaccccaatggcatcacctgcgatggctgcggcttcatcaataccacccgtggcacgctgaccaccggcagcccggtgttcggcaacgatggcagcctgtctgcgttccgggtgtcgcgcggaacgatccgcctggaaggcaacggcctggatgccggcaacctggaaggcgtcgacctgctggcccgcgcggtgcagctcaacgcgggcctttgggcgcgccaggtgaacgtggtcaccggcgccaaccagatcgatgcccagaccctggcgacgcaggcgatcaccggagaaggcgaacgcccgcagttcggcctggatgttgccgccctcgggggcatgtatgcaggcaagatccggttggtcggtaccgaggccggcgtgggcgtgcgcagcacgggccagatggtggccgacgcaggcgacttcatcctgacccaggccggcgatgtccgcctgagcggacgcacggcggccgcaggccgcctgcagatcgaaaccgacggtgacctgaaggccgacggtacccagtacgcgcagggagatcttcagatccgtgcccggcaggcgtcgcttgccggttccacgtcggcgggcgctgcgttggccgtacgcgccaaccagaatctggacctggccggcagcgcgcaggccgcacagatgcagctggacgccggtggcacgctgaccctggctgacacggtgaagagcgcgggcagcatcgcgctggctgccgcacaggtgcagaaccatgcacaggtgaccgcaggcgccgggcttgccgtgcgcgccgacacgctggcacaggacaagggcgcgcgcctgggcgcgcaggcgctggacgtgcaggcccgccaagtggacaacgccggcctgctgctgggcaaccagggcgtacggatgcaggccgcgcagctgcacaacgccggccaggtgtacagcgacgccgacgtcgaactcgatgcggccagtatcgacaacgagggcatcatcggtgccggtgccaacctgcgtgcagcggccgaccgcatcacccagctgaagggtgccgagctgtctgcgggcgggctgctgaagatccaggcgcgccagcagctggacaacgccggacgcatcctctccgagcaggcgctggaactgtctgccggcggcgtggacaaccaaggcacccttgaggcccgccaggccacgctgacggtcgaccgtctgcgcaacagcggcacgctgcaggcggtggacctgctggcattgaagtccaacgcacgcatcgacaatgacaccaccggcagcatccaggggggcaagggcctgcaggtcgacgccgatgtgctggacaacgccggcatcatcggcagtgcagccgatgcccgtctgtccgttgccacgctcgacaaccgcaaccggcttgaagccggcggcaccctgaccctgcagggcggcgtcctgcggcagcaggcggccgccacggcgctggcacgcgtgctggccgtggacgtgcagaaggtcatcaacgacggtcgcctgcatggccagcaggcaatggacctgcgcgccactgagctgagcaacagtggcgtgatctacggtcgtgaccgctcacagctgcgcaccaccacattggacaatgccggcgtgatcgccagcgatggcgcgcttgacgtgcgcaccgacgcgctgcacaaccgcgccggcggcaacctgtccagtgcgcagtcgctgcagctggacgcggtgacgctggacaacgccggcaacgtgttcgccaaaggagcactgacggccaaggccgatgtgatcgacaaccgtggcgacctctatggcgccggcgatgtcgatgtcaccgtgcgcgattcgctggacaaccagggcagcctggtggccggccagacgttgcaggtgcggggccggaccctgcgcagcgagggtgaactgggcagcgagcgcggcaacgtgcagctcagcagtgaccaggccctggtgctgggcgggcgcacgttggcggccggcacactgaccgcgcacgcgggcggcagcctggagcagtcgggcaaggtctttgcgcagcacggcgtcgtgctgtccgccgatgccggcgtgacgctgaagggaacgatcgacagcgccgctgatctgcaggtgcgcagcgatggcgacctggacaaccaggcggcgttgttcgccagcggcgcgctgtcgctgcaggctgcgcaggcactgcgcactgcggccgacgttcaggcgcgcacggtcacgctgcaggccgcccaggccagcaatcgcgggcgcgtgctggcctcgggtgacatcgaattgcgggcggggcagatcgacaacagcggcgtgatcgtggcgggcctgctggccgacggcaaggtcggcagcaccggcagcgtcacccttgatgcgcgtcagcagctgcgcaatggcgggcagatcaacgcgggccaccagattcacctgctgggcgacagcctgctgctggagggtggccaggtctggtccggtggcaccctgctggcgcaggcgcgcagcggtgagtggcgcaatatcggcggcagcctgaccgccatcggtctgctcgacctgcgtgccaccgacctgctgcgcaatgcgggcagcctgcagggcacgcgcatcgacctgttggcggccgcgctggacaacagcgccggcgaactgctgcagaccggcaccgatccctttgaacttagcctgacaggtgccctgcgcaacaccggcgggcgcatcgccgccaatgctggcagtgtccacctgaaggctgcgcagctgctgaaccagggtggccgcatcgagcatgcgggcacgggtgtgctgaagatcgagaccggcacgctggacaacagcaatgcaggcctgatcgtcggcaacggcgaggcggacgtggccgttgccggtcgcctcgacaacagcggcggtacgctgacagcgggcaccggtgcccgcgtggctggtacggagatcgtcaacaccggtggccggctcgatgctggcggcaaccttaccgtggacgctgccggggcattggacaaccgcactggcaccatcgtgcagcgtggcgccggccagctgcaggtgctggcctcccagctggacaacagcaatggcctgctgggggccgaggacaatgcgcgcgtgaccagccgcacgggcgacctgcgcaacgtggatggcaacctgtatgcccgccaggaactcgcgctcgacgtggccggtgcgctggccaaccagcgtggcctggtccacggcggcaccgcgctggatctgcagatccgccaggcactggacaacagccagggcaacatcgaagcacagggcgctgcgaacatccgcggtgcctcagtgggcaaccgtggcggccgcatcgtggccaacggcaccgggcagctgtcgctggaatcggccgctgcgctggacaaccgtggcggcaccctgggcagcaccggtggtgcgctgacgctgaccgcaggcagcgtggacaaccgcgccgaaggcggccaggccaagctggtggccggaaccgacctgcgcctgcagaccgcatcgctggacaacgcaggcagcatggtccacgccgccaataccctgtacctggagcgcgcaggcgcgcaggtattcaacgttggtggccagctcagcgcaggcaacctgctgcggctggatcttgccgcgctggacaacagcaacggccggctgctcagtcgccagagccagctgacgctgggcagcctggccaatggtggcggcgaaatcagcgcctatgaagcactcggcgcacgcctgcaggccttcagcggcatcggccgcctgttcggcggcagcgagctgcgcctgacgctggcgggcgattacgtgcatggcaatggccagcgcctggagagcaacgggctgctgaagctggacgtggccggcgcactggtcaaccaggggcgcctggagagcaagggcacgcttgaagtctcggcggcgcggatcgagaacaccgctggcgggcagttcaacgccacggcaggcaatggcagtggtcgtgtcgcgctgagtacggccggcgatttcagcaatgccggtcgcgtggatggcgatacggtggaggtgtcggctgccaatatcaccaacaccggcaccgtgatgggcaacgcgctggaactgcgcgcctcgcgcatcaccaacggccgcgacctgggcaacacgctggtcgcacgcgattacaacgaagggctgatggcggccaccggccgcatcaacctgtatgccaactacatcgacaacctcgacggcgagctcttcagcctgggcgacatccgcctgcagggctggaacggcggcaacgcccagcagatccgcaaccgttccgggcgcatccaggccgagaacgacctgatcctggctgcactgggcgtggccaacgagcgtcgtgtgctggtcacccagcacaaggtctacagcggcaacgaaggcgctgccgacccggacagcgggacgttcagggtcgacggcatcgacggcccggcgccgccgggcaagctgtgcccgggcgactgtgccgtgctggaagtctggaccgagcacaaggacctggtgctggaaggcaccaccgtcatcgccgccagcgcggcatcgcagctgatttccggtcgcgacatgcagatgtccggcggctcggtcgacaaccggaactcggccatcgccgccggtagcaacctctcgatcaacggccgcggctcatccaacagcgaagaccccaatgactgggccggcgtggtcaacaacgaagcgctggccggctacaaggtggtccagcgcacgtcgaccatcgactacacctaccgcccttgccccagccgctgcgacttcgagatctatggcggcagccgcgcgctgggcaccagcacggtcaccaagcaggtcacgctggccggcggcaatgccagcatcaccgccggccgcaaggtgcagatcgaagcgcgcgaggtcaacaacgccgtggtcaccgcgcacagcggtggcacaccgctggacgttgccggttggcagggcaacaacgcctacgcacccgaactgggccagcagcagggcgccggcgcggtcggcggcaatgctggcgcaccgggtgcacagcagggcgtggccaccgggcctgccagcgcgcaggcgcagggtgcgggcacggccggtgataccggctccccgggccctggccgtgtcaccacggtgccgccgccgcaggtggtgggcagcccgcagaatccgctgccgggcctgtcgctgcccagtggcggcctgtacacggtcaatccgggcaaccagcgctggctggtggaaaccgatccgcgcttcgccaatttcgggcagtggatcggctcggactacatgttccagcgcctgaacctggaccccgacaagcagctgcgtcggatgggtgacgacttctacgagcagcgcctggtgatggaacagatcaccggcctgaccgggcgtcgctacctggatgccgaccagggcgatggcatgggccagtaccgtgccatgatggatgccggcgtgacagaagcggcgcgccagcagctgagcgtgggcgtggcgctgtcggccgaacaggtggccgcgctcaacgaagacatcgtgtggatggtcgcccaggaagtggacggccagaaggtgctggtgccggtggtgtacctgtcccaggccaccgccaaccgcctgcagctggggggcgccgccatcgctggcgagtcggtggagatccgcgccggcaatgtgtccaaccagggcatgatccgcgccgatgatcgattgaccatcgataccggcagcctgctcaacgatcgcggtggcatttccgcgggcggcaatgcccgcatcaccgccgtggaggacatcctcaacaacagcggcctgatccagggcggcaacgtggccctggtggccggccgtgacctgaagagtgtcagcggcatcgacgtggccagcatccgcagcggcggcagcctggcgctggaagccggacgtgacctggcactggtcggttcgcagacccgtgcccgcggcaacgcggcgctggaggccggccgcgacctcaatctcaccacgcagatgcagggtgatggaagcctgcgtcgcaccacgctggacgtgggcggcggcctgtcgctggacgccggccacgatctgaacctgacggcagtgaccgccaaggccggcggcagcgtccatgccacggccggcaacgacatcaacctcaacgcactgaccaccaccgaacagggcggctggggcagcaaccgctacacgcgcgaaaccctcaacgccagcggcatcgaggccggtggctcgctgggcatgcaggccgggcaggacgtgaacctgcaggccgcgcagctgaaggccggcgacggcctggccgtggtggccgggcgcgatctcaacctgcaggccgaaaccaccaccaacaccagccagcagcagagccgtggcaagcgcttctcgcagaccacgcagagcagggacgagaccgtgcacggcacttcgctgcaggccggcggtgacattgcgctggtggccgggcgcgatgccaacctcactgccacgcaggtgggcagcaccgacggcggcatcagcattgccgctacgcgcgacgtgaacctgctggcggcgcaggaggaccacagctgggagcaggaaaccacgcgcaggaagaagggcctgctgtcgagcaagaccaccaccacttacgacgcgacccgggacagcctggtggtgggcaccacgctcagcggcgagacggtgaccatcggcgccggacgtgacgtcgtcgcgcaggcggcgcaggtggctgccactggtgatgtggtggtggccgccacccgcgacctcaccatcggcacggccacctccacgcacagcgaagagcatgacaagaccgtcaagcgctcgggcgtgttcggcggtggtggcttcaacctgaccatcggccagagcaagctggaaaagggcctggagatcgagcagagcgcgccacagggcagcctgatcggctcaaccgatggccgggtcaacctgagcgccggcaacacgctgcacatcaccggttcggacgtgctgtcgaagaccggtacgcagctggtgggcgggcaggtggtgatcgacgcggcacagggcaccactgacgtacaccagagcaccaagcagaagagtgccggtatcaacgtcggcctgaccggcggtgtggtggatgccgccttggccgcctacggtgcggccaaggcggccggcaatgcgcaggatgatcgcctgaaggcgctgtacgcggtgcaggcggccaatgccgccgctggcgtcggtggcgccatgcagcaaggcgcttccggcgccaccgacggcgtgagcctgcgcatcggcatcggcgcctccagctccagtgccagccagaccagccacgaccagtcggcggtgggcagcaccatccgcagccagggcgacgtcagcatcgtcgccaccgccggtgacctgaacatcatcggcagccaggtgaggggtgacaacgtggcgctggccgcgcgggacaacatcaccctgcgcagcgaagcggaagaccacacgcagtcgtcgaagaacaagagcggcagcggtgagatcggcttcagcatcggcgcgcagaccggttggtacgtgtctgccagcaccgccaagggcaagggcagcggcaacggcaccacgcacgtcgaaaccgtggtggacgccgaccgcaacctgaccgtcatcagcggcaaggacaccacgctgcagggtgcccagctgagcggcgacaaggtggtggccagcatcggcggcaacctgtccatcatcagcgagcaggacaccgacgactacgccagcaagcagacccaggctggcggcaccttcgtgtacggcagcggcggcaccgtcaacatcggccagcagaaggtcgagagccacctgcgcagcgtgcaggaacagagtggcatcgttgccggcaacggtggcttcgacatcaccgtgggtggcaacacgcacctggaaggcggcgtgatcggcagtactgccgatgcgtcgaagaaccgcctggataccggcagcctgaccgttgtcgacatcgagaacgaatcccgcgccaagaccagtggcggtggcatcggcaccggtatgagcagcggcggtggcatcagtaacccgctggggagcgcggccggcgcggggctgagcctgctgggcggcaccaagaagaacgacagcagtaccacgcgctcggacatcgccgccggcaccgtggtggtgcgcgatggcaatgagagcgctttggcaggtcttgatcggaccgcgaccggctttgataccgacagcgcactgtcggccgttgacctgcgcaagatgcaggagcgtgccgaggtgatgcagctgggtgggcagctgctgttcaagggtgtcggcgacctgggcggctacctgagccagaaggcggagaccgaagaaggcaaggcgttctgggccgacggcggcaacggccgcgcactgctgcacggcatggccggtgcggcgatggccgcattgggtggtgcggatgcgctgaagggcgcggtgagtgctgccggtgcggagaaggccaagatcgcgatctcggaattcctcgagaacaacaagggcagcctgagctgggaggactaccagtcgctgatggaagtcggcagcgcgatggtgggtggggccctgggtggcagcacgggcgccaacattgcggtgaccggggatcggttcaatcggcagctgcatccggatgaggtgaagtggatcaacatgaatgctgccgcgttcgccgcccaggaaggcatcagcgaagcagaggcggtacgcaggctgaccacggaaggtgctgcgcttgttgatgcaaaggtcgcccgattggtgggcatcgagaacgttgatttggaagccactgacttcctgagcaagatgggcggggcatacgggttcggcgcgacggaggcggaatacaaaaacttcaacctctatggcaacgatctgctcaacgacgatgcactgtacaggcaggtcatcggatccctgctgtcctccggcgtatccaaggacgacatgcagctcaaattctatgatctgaacaacctgcgcggaacgaagatccggggaggtgacggctggacgatgatggggaccttcagtggcgacattggcgccgctggtaccgtgatcgccagcgtagccaagggcgacggcaacggtgctgccatcggcgcagcgtcgttcctgatcccggtgcggttgcctggagcgaagatcgttggtgaagtgggcgcggagatcgccggggccgcgaccaagcagggtgtgctcaaatctgaggagatcctgaagtcggtgcagaatgcagcggctgagacgactgagcgagcagttaagagtagtccgagctggaagggatctggcccggtagatggtgttctagccttggagccgggctctgtatcgtctacagcaatccaaaactatttccctggcacaagaagtaaggcgatcgagtttgttttcgatccgaaaacaaacaaatttgcagtgggtaagcctaaggcgaatctgggcggctcccctcatgagtag

SEQ ID NO: 500310 - DNA, 147 bp, Stenotrophomonas maltophilia
atgttctccagggggaagaatggcgagataataaccaacgagcatagcgggcactactggatgaactggagtccggaggttcgcgctcagtttgaacaggcaatgaaaaattatgggattgagattaagcatggtgctggaatgtaa

SEQ ID NO: 500311 - DNA, 618 bp, Stenotrophomonas maltophilia; identical to SEQ ID NO: 498995

SEQ ID NO: 500312 - DNA, 1035 bp, Stenotrophomonas maltophilia
ttggcaggacctccccgcgagatgtatcgcgatgatctggagtccgaacgctgggatcgcctggttgctcgcgcagtatggattcgtctagcgaagctggagtcctcgggcctacatcttggtgtgtctgcagcaaggcgcctagcggagatatccatcgcgcatcctgagttgagattggaccctaacgagaaggacgaattctcacactggatgagcggcaccggagatccggatttcgaggacggcagagaggtcgatgtcgcccctcgcactcgcaaggagctagttgaatggcttgaatcgccgaggcctgcccatagaccgttctatgaggacacttggcgggatgtctgccgtactcgcttcttccatagccttgccgcgctctgcgacctcgctcaccaagacgtctggcccgcagttcggtggcgcgaggcgcttcaggtttggtcggacgattcaatggcagcccgctcctggcagtacgcatcgcctttggtactgctaatgcctgatgaagttctgtccgagatcgcacctgcagtagcgtggtggatggaggccacttcaagaagcggcgcgaatcgcgagaacctcctattgactctcgccggtcgagtgcttgcgcttccgatccccttgagtagtggcatgacaaggaacggcgagccaatcgataaccctgtctcggaggcgattaatcaccccattgggcatgccacgcgcgccttgctcaatctatggttcaagagggcgcccaacgatggagacctacttccccctgaacttaaggcggcattttccgccatatgcgatgttgaagtagatcgattccgccatggcagggtgttgctcgcatctagactcatcgccctgtatcgcgtagaccgggcgtggaccgaagcgacgctactaccgctcttcgattggtccaaccctgtcgaagcgaaagcagcctgggaaggatttctttggtcaccgcgactgtaccagccattgatggtggcatcgacgtccccccggcttgagtag

SEQ ID NO: 500313 - DNA, 627 bp, Stenotrophomonas maltophilia
gtgcctcaatcggctgaccaggatcgggcgtctgtgctggagggctccttagagctcttgggtgaaattcgagccgcttggatggagatagagcatggacgtgaccgaagatcgacggcggtggcggcactttgccagatgtcccttgatcacgccgtggcagtacagtccctgatcgctactctgccccagtcagcaatctcgctggtccggccccagtatgaggccctcgtgcgtgcaacctgggcatgttatgcagctaccgacaccgacatcgagaagcttcttgcgcccctgactctggagagtcagcaagcggcaaagaggctccctggcgttcaggacatgctcgtaaagcttgagtcctctgggccccgaggagcatcacagttgttgggcagagccagacaatgcctttatgtcggcttgaactcctatctccatgccgggattcaccccttggcaaggcagttaaatggctacccgggcgcgcttctggcgggggtggccatgaacagcaatgcgcttgccatgctaacccttctgaatctggcgcacctgtggccaggcgaaccagttctggcatggatgaatgcactgcatccgacgtccccccggcttgagtag

SEQ ID NO: 500314 - DNA, 2967 bp, Stenotrophomonas maltophilia; identical to SEQ ID NO: 498051

SEQ ID NO: 500315 - DNA, 543 bp, Stenotrophomonas maltophilia
gtggactggctgatctacgagcaggtcatcgcggggctggcacggggaggcgaaggctacgtctcggtgaacgtatcgccccggcatttccgctcggcagagttcagtgatcgcctgttcggcctgctcgacagctgtggtgccgatccgcgccggctgcgcctggaaatcaccgaggtggcgttgctggacgacggcccgcacacgctgcgcatcctgcagggcctgcgcgagcgcggcatccaggtgcagctggacgatttcggtaccgggttctccgcgctgtcctacctccaccgtttcccgatcagcacgctgaagatcgaccagagcttcatcgccggcctgcacggtccggaagtgcagagtacgcgggcgctggtggaaggcgtgctgtcgctggcgcgcacgctgggcattgagaccattggcgaaggcatcgagaccgacgcgcagcggcagaccctgcgtgaactgggctgcgactacggccagggctacctgctggggcggcccgcgccgtgggcgcacgcggcggcctga

SEQ ID NO: 500316 - DNA, 297 bp, Stenotrophomonas maltophilia; identical to SEQ ID NO: 499481

SEQ ID NO: 500317 - DNA, 183 bp, Stenotrophomonas maltophilia
gtgaacgccgccacccatccctcgtcgccgccgacttacagcatccgcgccagcgtgaaaaagcacgttcggatcaaacgccccttggccgaacgccttcgtctcgccgcggccgaaaacgagatgacagagagcgagttcattcgccgcgccttggaaaccgctctcccgcgcgctgcctga

SEQ ID NO: 500318 - DNA, 1932 bp, Stenotrophomonas maltophilia
atgtctacaaccaatgtgtccccaaaagggaaggctgtcaacccgacgacggaagagccaagcaacatcgtgccattcgaagcgtcgcgtttcctgggtgcggaagcctccgcccgcaaggtcaacctggaggcagaggagcacaagcagctctaccgccactcggttgatcgagagggccagcgcaagccaccgtcgctccccatcctgtttgcccgccgcaccaccgaatgcgtcgatcgcttgtgggcgtgccaagccaccagcggcaccggcgagatcgtacaccattggaacggtacctactggcaagcgatcagcgacgcggaaggtgtgggtgtggcatccgattggatcgaccgcaacgccgatttcgcgggcagccccaagctcgccaaggactgctgggacatggcttcccttcggctgcgccagaaaaaccccatgccagcccaagccaagcgggccatcgtgccggtggcagacggctacgtggaaatccttcccggcggtttccatgtgctcgctcctgatcccgccttgggcatgacccacgcggtcagggtggcctgtggtggcaggcagggccatgcatacaagccccagcctttgccggctgactcgcgattcgccaagttcctccgccaagcccacgacgacccgcgcgtcatcgacctgctccaggagcagtgcggcatgaccctgttgccgggtgtctacagccaggccgcctggtggcacggcgtcgcaggttctggcaaatccaccctggcggaaatcgtggaagcgatgcaccgtcaggtggcccgctgcaaccttgaaactttgggcgaccgcttcagcctggaacccatgattggcgccagcctgatcctggtggacgaagtggagtgcgagaagtgggccgaaggtcggttcaagacgatggtctctggcaatggcattggcatcgaccggaagaaccagaagcagctggcgagctaccattccacggccaagtggatcatcacgtccaattcggcccccttcatccgcgacaagagcaacggggtgtggcgccgcctcaccgtcgtgcactggaagaaggcggtaccggtcaaccagcacgaccctgatctggtcaagaacatcctggcagaggaaggccagcttgtgctggactggatgctcgaaggcgcccgacgcatcgtggcccgtggtagggcgttgtccgacaccgacgccgacatgcccgaagccgtgcgcgcagcgaagctggccgcccgccatggcagcgaccaggtcatggcttgggctcaagccgagcgcgtggtgcgcattgagacggatgagtgcacgctttccatgcggcaggtctacgagaactacaaaaactggggctaccgacaagggctggcggacatcgatctcctcaccggtcgccagttctggcgaggcttgaaagagatgggcctggacgacggcgcccgctcgaaccgtcgcatcaatggcaaacaggaagaatgcgtgcgcctgcgaatcaacggagcagccaccgtcggcgaggcctgtggcgatctgccgttgagatcatcggcgaccgtgacagcactgcgcgtggcgcaggagcgctctcagtctttggagccttgggaaaccgatgtgacgcccaccctcgaacagcaaggggctcggcaggaagagatggagcgtcgattcgaccgcttgagcgctcagcagcaggcggctgagatgggagctctccatgccgatgcgttgagggaggaggcagggcgcaccagagccaaggcaatccaactccagctgcaggaacgtatcaatgaactggagattcgtgcgctgttcggtgagccgttggcgggccgagaaagcagcgaaacccaaggtggcggaaaggtgggagatggggatgcgcgccaacggcggtcgtaa

SEQ ID NO: 500319 - DNA, 480 bp, Stenotrophomonas maltophilia
gtgaagcgagccaacgacattcgggcccaataccagctggccatggacgatgagggcatcctcttggccgcctcgcacatcttggagcgtcgcctgcagcgccacgaggccatcaccgacccctccagtgccagcaactacctcactgcccgctgcgcgcacctggatcacgaagtgtttggcacggtgttcctggacgcccgccaccgcatccttgccaccgagcacctctttcaaggcaccatcgatgggtgcgaagtccatccccgcatcgtcgccaagaaggcgttggaccacaacgccgccgcggtcatcttctttcacaaccaccccagcggaaaccccgagcccagcgttgccgaccgcgccatcaccgaccgcctcaagcaggcccttgcccttttcgacattcgagtgctggatcaccttgtgatcgcgggcacctcgcacgtgtcgatggcttcacgagggtgggtgtga

SEQ ID NO: 500320 - DNA, 339 bp, Stenotrophomonas maltophilia
atgagcacgaccgtcgcatccaacgaattcacgatgatccaactagggatgaacccagatttgttggaagactatgcagaggtttcactggagcccgtgagctttgaagaagaaggcagcctcggatgggcgaccacgtggagcgcagttcatgccgtgaagctgcacaacggcgggaagatccacgtcaatggccgatccttccaagtcacgcgagccaagcctagttacaagcatttgctcaagtgctggcaagaagagcagcggaggcgaaacgaaattgctcaatggagagcagcaagggcggaaaaatatcgctcgttgggatatttagagtga

SEQ ID NO: 500321 - DNA, 387 bp, Stenotrophomonas maltophilia
gtgcttcatggcatccatttcatcagtccctcggtgggtggcccgctgttcaatacggtgtggcttcccacgcttgccgacttgcgggcgctgctcgctgacgccgagctctgcaaggcagccgaaatcgaggtgaacgcgtatattgagacgtgcgttgatccgttgccccctgagctcgacgaggtcatttaccagccatcgataagagagatttcgagcctgccggatgattgcgggatcggcgtgggcgtttttgttactggcgcttttgcgttcgtccttcagcgcatgattcaggaggcaatggctcagcaccgggcgcgtgagctggatcgggtatgggaacagtcagccaccgcaggtggcaaacgtcccaggctctga

SEQ ID NO: 500322 - DNA, 501 bp, Stenotrophomonas maltophilia
atgacacgcaagaccttccttcgcgcccttctgcccatcgccctggcttcgctggcagtgcccgcgttcgccgccgacaccaccgcggatctgacgattcagggcaccttgaccaacacctgccagctgtccgtgacctccatcgaaggcatggactggtcgggcatctctgaagctgccgcccgcacctccgggctgagcatcgtgtgcaacgcgggcacgacttactccatttcgccgggccaggggcagaacttcggcctgctgtccgggtatgagacctaccgggctgtgaccaacggcgccggggcttacatcccctacggcttcttcaaggacccgcagggaagccaagtctggggggatgacaccgacgcgttcaccggcgttggcgacggcaccgtccaaagttacaactacgcggtgcgcttcctggccctcaagcaggccgtgggcggcaactacaccgacacggtcaccgtcaccgctacttacaactga

SEQ ID NO: 500323 - DNA, 660 bp, Stenotrophomonas maltophilia
atgacccattcccaacgttttttggccgtggccgccgcgtccttgctgtccttttcggcgtccgccggttccatctccgttggccccaccaccctgatggccgatacctcggccaagcacgtcgccgtgacgctgcacaacagcggggacacctcggtgcgttaccaggtgaaagccgtggggtggaatcaggccacggggcagaacgtgttttcacccaccactgagatcgtgggggcgcctaccttcgtggacgtcccgccccaatccaagcgcaccgcccggttgatgcgggtgggcgcgctgggcgagcggcgctactaccgcgtgctgctgatgcagctcaaagaccccaacgcccagggcgtccagttgctggtcaaccaggacttgcccgtggcctttgaagccgccaacgcgcccgtcccccaggtgaccgtccaagcggtgcccaatggataccgcttgacgaatcacgggcagaccgcggcccgcgtgtcgtccattggcccggccggtgggaagccgtggcgcgacggtgcattgggttggacgctaccgggggcctcgatgacttacgagacccagcctggccagcgtgccgaagtgctttcgatcaccgtcaacggccagcccgtcacggtccccgtggggcggtga

SEQ ID NO: 500324 - DNA, 2196 bp, Stenotrophomonas maltophilia
atgcgtggccaagccttggcgttgttgttgctggctgcatcgtcggccagcgcagcggtgcccgacggcgtggcacccgcgttcctggtgccggtcatcggcggcaaggccaaggcggatccgctcacgttctggcagcaaggcggtcagtggttcgccgagccggccacgtggcgtgaggtcgggctccaacttcccgcgggtcaaacggagccgatgagtgcccaagcgttgggtgtgggctttgttgtggacgaggccaccgcgacggtcgccctggatctgccggccgatcggctcaaggcccaacgcgtggcccgtgatcgcaccgagcgcgggcccatcgcgccgcccgctcccggggtgctggtgaactacagcgtggcaggcatggtgtccgagcaacagcaggcgctctcgctgggccacgaggtccgcaaggcggggcgttggggcgtgatcagcaccagcgggcaggtcaacaccgacacggccggcaccggctacgttcgcggcgtgacgcgctggcagaaagatgatcccaaccgcttggtgacttaccaggcaggcgatgtgttcgctggtccgtcgtcctcgctggtcaacttgggcggggtgcgcgtggccaaggacccgcgggcgttggacccgttgacgcccacgtatccggtcccggtgctcggcggcgtggcgctcgatccggcgacggtcgaagtcctggccaaccgcgcccgcgtgctgcaaggccgggtggggaaagggccgttcaccgccgatggcggcgccttgggcaccggagcacagcaaacccaagtggtcgtgcgagacccttacggccgcgaaacggtggtgagcgatcagcgcttctacgtcgcccccacgttgctccgcaaagggctcaccacctgggaggtcgcggcaggccgggtgcgccaaggagagagcgattacgggacgttgggcgcgaccgggtcggtggcttggggcctcaacgaccggtggaccctgcgcggcaacgcccaaacctcatcggacgggaaggccaacgtggcggtgggggccacgacggtgcttggcacctacggcacgttggatctggaattgggcacttccacgcgaggcggccaacggcaggccgtggcctacgactaccgcggcccgaggtttggcgtgcgcctggagcacgagcgccagcaggactattggcgcctgcgcgcccccggtgcggtggaggtggagcagcgcacccggggttcggtgttctggcggcccacgccccagtggtcccttcgggccagctattcggacgtgcgcacgccgcgctttcgcaccgcttacgccgacgccggactgacctggcgtggcaacgggcacaccgtggccgtctccgccttgcgggatctggagcgcaaggaaacccgggtggaggtgggctacagctacgatttcggccggggcaagggcgtgagcgttagggcccggcaagccccggatgccacggcctgggccgtccaaggacgcgcccgccccacggtctttggaaccccggtgggcttgtccttgtcggtagacgagggagcggctggccagacggcccgggccaacgccaactggaccacccgggcagggtgggctcagatcaacgccgagcacgggcccagcagcacttggacttccggttcgatggccggtgccgtccacctggatcgccagggcgtgacgttcctgggtccggccgaatccttcgccgtggtggacgtgcccggccaagccggggtgccggtgagggtgggtggccgcttggtggggaagaccaacgcccagggccgcctggtggtgggcgaggtgaccccgatggtccccaccgaagtccgagtggacgatcgggccttgccgctgggcacccagttggccgagatcgagcaaaccgccaccgcgggccgccaagctggcatgcacctcaccttcccagtcctgaccgagaccgcacgaaccttccgcctcacgggctcggccatcgaagcgggcacggtggccaagacagcgaacgagaccacccaggtgggctacgacggcgtgctctacctggagcagccgcgctccggcctgacggtggaggtggaaggggtctgcaaggcccagctgcctgcggaccttggggctgcgcaaacggtggctgaggtggcttgccggtga

SEQ ID NO: 500325 - DNA, 1932 bp, Stenotrophomonas maltophilia
atgaaatacgaagagctgtccagggcagcgctcatcaagctgctgcaagagcacgatgccgaacgcgctgaagcagggagagatggcatcgtcttgaactacagtgggcgcacagctccttggcagatcgttcgtcaggtcaagcctcggatgtttgacttcaacaagcgcgcttccgtgggcagcgctgaggaggagtgcgttaacgaactctgggatggcgagaatctcgccaccatggtcacgctttacaagtatcgtggccaagtagatctggtgctgacggacccgccatacaacaccggcgaggacttccgttacaacgacaagtgggacaaagatcccaacgacccggatatgggcgatttggtggccaaagacgatggttcgcgccacagcaagtggctgcgattcatgacgcctcgtctttggatgatgcgagaaatgctcaagcctggtggcgtcatcgccatctgtatcgatcatcgagaactctacaggctggggatgctgatggatgagattttccacgaggagaatcgcattggcatcatcaattggcagaagagctactctccaaagaataatgttggcaagaagtcccatgtgtccacttccacagagtatgtgttggtgtatgccaaggatattgatcgcgccaagaccaccttgatggagcgcagcgaatcaatgaactcgcgctatggttcccccgacggggaccccgagttgtggacacctggtgacctgacggggcgtggagcggacactcactgggggcaggtgtatgcagttcaatcgccttttacaggcgaattgatgtctccatcggaggggcggtgctgggcgctcgaaaggtcgaagcttaaggcgctgcttgagcaatggggttgtgaataccggaacgaggaccaacacgatggccgagctccagctctggtcatcaaggggtctttgagcgcagcaaagaaagccgctgaaaaagtgctcaaggctgggaactggccccgcggatattggcgcgaccaaggaaagggccatttccgtgcgaaggtctacctcaatgaggtcaagaagggcgttgtgccaatgacctactgggcagatgagtcattcgacgccatcgatgatctgggtagcacgtcttgggaccatgagcagagcgggcatagccagagcgggctgaaggagctcggtgctgtcgttgggaaagatcacggattcacgaccgtaaagccgctcaaactgttcaaaaaaattattcaaatctggtgtcgaaaggatggaatcgtattggatccgttcgctgggtccgggacaacggggcacgcggttttggagctgaataaagaggtggctgccactcgtcgcttcatcatgattgagcaggggaacgacgagaaaggggatcactacgccaagaccttgacggctgaccgcattaagcgcgccatcacggggaagtggaagtcaggtgagcgggagggcttgggcggaggctttcgatacttctctctcaaacgagagaaagtggatgccaacgcagtgaatgctctcgctcgcgaagagatgatggacctgctgttggtcagctactgggatcgcaatgacaaggccaagtcctatcttcggagattggctgccggggatcataagcacctgtttgctgtgaacagccgcaacgagggcttcttcttggtgtggagcgctcctgaccaaccttcggcgctgacgcgggccgtattcaaggaaatcgcgcaggaagcaaagggagctggcttggcggggcgttatcacgtctacgctgcactggcgccttacaccggcagcgacattgagttctatcaaattccggacaaggtgttggagcacattggcttcaacgcccgtgcagacgcttacaacaacgatggtggcatggatgcagattga

SEQ ID NO: 500326 - DNA, 2385 bp, Stenotrophomonas maltophilia
atgcagattgagctcaaacccttccaggtgcgtgcagcccagcagatcgctgggcgatacgctttttttgctggacacccctacaggccgacctacaagggcaagctcccgcgtccgttttatcaggcgctgtccgccatcacgggcgccggtaagacaccggtgctggccgaggccgtcacgttgatgcgcatgcacatgggcgttgagcccatcgtgttctggatgagcaaagccaagtcggttgtccagcagacctatacaaatttttccggtggcggaaagtatgccgagatcgttgacgatttccgtgtcatccgggcggcacagctggaacccaacctgatctcggatgggagttctcccctcatcgtgatggccacgaccgggctgttcaacaacaaagagcaggccgatggcgcgctgaacatctacaagaaggatcaagacctgttcggtgaccaatcgccctgggagcgattgatcgcccgtgatgccggtggggttcggcggccgttgatcatcgtctacgatgaaggtcacaatctgtccgaacagcagacccagatcttggccgaactggagccggaggcctacctcttggccagcgcgacgctcaagctgcccttgaactttgctaaaaccgtgctggctccccaggaaagctgggtcgatgaggcgggcgaggatgaagccagtcttgagcgttttgcgctgttggcagcggttgacgggaagggcgctgccgacgccactgcatttgccatcaccgcggtggacagcaacgcggtcatcaaggctgagctgatcaagacttccattcagttcgacggcaccaccgcgccgatggaacgttgcttggacgatctccatgatcggctccaactgattgagcaggaaattcagggtcgggcgctggggttcacaccgaaggccatctatgtgtgcaagaccaacatcaccgacgacggtgataaggacgatcacaccaagccctttgaacaccgcaatgctccgccgatccgcatctggcgctatctggttgagcagaagaaggtggacccggccaaggtggccatttacgccgacctgaaattcgccgatggcaacaagcccgacgcagtgaatttgttctcgaagggcgagagcgattttgacgaatttcaggccggcgactttcagcacatcattttcaaccaaggtttgcaggaaggttgggacgatcctgcttgctaccttggctacatcgataagtcgatgggttctcagatcaaggttgagcagatcattggccgcgttctgcgccaattcgacgccaagcattacgattcaccgttgctcaacagcgcccatttcttcttgcgtgtggacaagaagaacgtgttcaccgaatcgatcgaggccgtgcgggccaagctccaagaatctggagcagccattgagatcgttcatacctatggcggtggggagggcggttcagaagatctcggccccaaagagggggtttcagtgctccttcatcaggtccatgcggacgccgacgacgcagtgggtgccattgcccagttggtagcgcagttccccacctttaaggaaggagagatcgatactcagggcgacgcacacagcaagaccgagacggtggacatctctgacttggccaaggagatcggccacgactggacggccagtgggcacgcgaaccgggtgcgcctgcgttggctggtgagcaacgccatccgtgggcgctctagggccgcattggccgtggtagacctaaaggcttccaagtttgacgtgagggtggaagccggtagcaacgccgcagctgcagctgacaccctggctagggagatcgtgtccacctactaccagctgacctcgctggtgtatgaatctgagctggagttcacgttctcgaccatgcgcgtgccgaagaaggcgcaggccttcgagaacggcctctatccgcgatacgcaggcctcaacaagtttgaagccccgttcgccgccgccttggacaaggccggacacacatggcaccggaacccgagcaatgggggcttccgtattccgctgttgtcggagggggacagtgcctccttctcaccggacttcctagtctggaagggcaagtatgtgttctgcctggacaccaagggctcgcacctgctcaccgatgccgtggctcgcaagctgttcgatatccaagatgagggggcgaccaaactgttgacccgctttatttccgagggcaagcaaaccgcgatcggtggcaaggcaacaaaggatggctacaccgtatggaagatgaagaacgggtcgcccactccgatccatgtgtctaatctcgatcaagccgtgaaggaatgtttgaaggcttga

SEQ ID NO: 500327 - DNA, 282 bp, Stenotrophomonas maltophilia
atgagtgaagcggatctcgtatgcgaaagcgtcgagtgggtgaggtgcgaactgcgtgacctcatgggtaagcaaaagaaggaacgtccgtggctaaagtgccccaatgagcgggagtgggccattgccaagctctgggacccggacatgtctgacacggagtgggcatacgttcttaagctcctgcgcccgatcattgccgaacgacagcgccggcgcatcttggaggtgatcggcggtgccgcagcgaatccaaaaaagaagcctcgtcggaaaatgtag

SEQ ID NO: 500328 - DNA, 813 bp, Stenotrophomonas maltophilia
atgaagatggcagccaaattcaaccaaattctcatcgtggattccctcccggaaggccaactcaacaccgcagcccgcctgttcgcggatgcccaagactgggcgcgggtgatcggcgacgttcctcacatcgccagcgttcgtgttccttccagcggggcttttctcgatctgttggcccagcttgctcagcaagcatccagggagccctacgtgccgttgcttcacatcgagtgccacggtggagagggcgggctggagttcgctgacgggtcttggttgacgtgggatgacatgaagccggcgttcgtaaacctcaacgtggccacgcgcttgaacctcatcacggtggtggccgcatgccatgggggcgccatcgccaattttgttcgtgctgagcatcgggcgccgttctgggcattcttggcccccaaacggcagctatcggcaggagatctggaaacagcgctgtctgcgttctatcaagccctgctgatgacccggtcctcggagcgggccatgagtgcccttcgggcaacgcaagctggcgacgagttctggcagttgagcgcgcagaccatctaccgcttgattgtcgaaggctacgcggaacaccaccttacggacgaggccgtgggacagcaggccgagcgtctccgggcccacgctgcggaacatggcgctgtttggacgcaggcgcaaatcgaggccatgatccgtgacccaggaatctttgaagggttccgccgggagttcttcatgatcgacctgtatccggaacacgaagagcgttttccgcccgtcgcgctctag

SEQ ID NO: 500329 - DNA, 477 bp, Stenotrophomonas maltophilia
atgcccgtctctgatcccctcgcgttcgacctgctgcgggcgttcgcgcagttggagtttcgcctcaagaacgatccaggctttcttcgcgccggtccctaccgaatggcccaggtgaactggcccgcggtggatgaagcggtgtcacggctggacgattcactcttcttcgatcgggtgtcggacagcacgcacgagcaaatcctcacacctccacgtgatcgcccgatggtccaggaggtggcggtgatcaacggcctcaaccacgctgtcttccagcgcctgccccttcagcaatccaatgccggtgcattgctcgaagcggcacgccgcgtgcgcaacaacctcttccacggggggaaggaagagccgcatttgggcgatgatgacgagtgggccgccgccgcactggacgtggccgagtgcctgcttcgcctgctgaaccatgggacgctcaggtcgggattgggcccgtga

SEQ ID NO: 500330 - DNA, 597 bp, Stenotrophomonas maltophilia
atgggggagaaggaatacaaacgtattccatgggagatgggtatgggattcgaaggaagcgggcttctttctcgaaaggacgtcctcctctacaccctaacggcccctatctggcttcctcgaaattgggttgtgggcaaggtccggcgatggcgggacgacttgcggacgccgccgatcattaggttgcttgaaagctgggaacgcgaacctgctctggatgccttgaggcatttgatcgcagaaggcgccgacgtgaacgctcggcgcaaggaagatcaggagactccgctgctcatggctgcgaggcgtggatgggtcgaggcctgccgcgtgctgtgtgcagcgggggctgatccgaattctcaacggcacgatgggtgggtggctctctactcggctgatctctacagacatgttccattgctcactgtgttgctcgaagctggggcagacccggatgccttggcaagcactgggtcgccagagatcagaaatggcatcgacgaatggaaggcgaagcgggccgccgcacatttgaaagtatccctccctggcactgaggagcccgttcggacgagcaagccgcggctatga

SEQ ID NO: 500331 - DNA, 315 bp, Stenotrophomonas maltophilia
gtgacgctgacgtccaagcctcccttgacggccgtgctgccgaaagtgtccctttcttcaaccttgcgccaggcattggccgcacgcgctagagcagccggggtgagcgagagcgaagccgtgcgccaatggctcaccgcctacctggcgcgcccccagctgctgcgctctcccgttgccggccccagggacgaccgcctgccgcctatccgggcttcccgagacctggccgaccgcgtccgccgcgaggcgcagcggcagcacgtgagcgtggcggaactcatccgtcgggtggttgcgttccacgcgttctga

SEQ ID NO: 500332 - DNA, 735 bp, Stenotrophomonas maltophilia
atgcctgagggcggagcagcaccggacgcatggcccgtttggttgaaagagccgcgcgtgcagcgggcaatggagtgggccgaccacgtgcggcgttggaacgaggagcaactctatggattggtcctacatgggccggagccagaccacatggcggtcgtggctttcgcggtggtgcacgagcaccaatcgtcagccatgctcctggtcaaacatgggctgttgggctctgcgacggcattgatgcggcctgcctttgaggcgttcgtgcgcgggctgtggctgcaatgggccgatgaccaagagctggcgcggttccagaagggccatgacactgcaaccccagagaagatgatccgcagggtggcccagcgttccggtgaaaagcgttacgcggatttgttggatacctgggagcagtctcaaaagacgatgcacggctacgtccaccatggctaccagtccctgatccgtcgttccggcgtcatcgacacgtcccctgacgaggtggtggacctgttgggattcagcgcgtccatggcgctccatgcttctctcgaaaccgtggaactcgccggaaagcgggtgccagaggaagaagtggctacccggccgcagtgggttgcggagaagcaactcgagatcgtcaccatgctgcgcgacatgggcctggttcaggtgttgggtgacgcggcgcctgccccaccgacctttgactgtggcgggaaggcgtag

SEQ ID NO: 500333 - DNA, 558 bp, Stenotrophomonas maltophilia
atgggctataaccgttggattcccgaacggagcgctcctttggccctgaccaccctgaaatccctcaacgccgaaatcaaacagctcgaagcccagaagaagctggtcgagaagcgcgacggtgaggttcccaaagccctggcggtcctccagaagtatgcgaaggtcttgagtctggcccagcggcggcaggtggccaagctcatcggagaaacgatcgacgccaagccggcgcgtgccgccaaggctgccgcaggtcccctcaaggggcgcaagcttggcaaggtggcgccgaagtatcgcctcccaaccggtgagacgtgggctggtcggggtttggcccccaaggccttcaccgcatgggccaagtccgccgagggcaaggcgtgggctcaggccaaccccggagcgaagttccccccggctggtggcacggtgaggaaggcacgcgctaaggttgccaagaaggcgggcaagccggtgacgaaggtcgcccagaaggccgtcaagaaacttgcgaagaaagccgtcgtcaagaagggcagcaagaaggcctga

SEQ ID NO: 500334 - DNA, 420 bp, Stenotrophomonas maltophilia
atgcgcggcctgttccccaagaagaagagccggctctcgccccaaggcaaggccattgcggccgcccacgcactcctggacaccatggagggtcgtcttgacgaaaaggcggccgggcgctggttgcgagacgaggtcgggcttcagtggtcaatgctgacctgcgtgcaatacctctcgggaaaggaagccctcggggcgctaaaggcgctgccgaacgactggtcggagcgcggtcgcaccaagcagcacctccaagccgcttccatcctggccgcccatgccgtcgcaaacatgaggcaagacgggagaatgctgtgcgccagcgactttgctcacgaattcaaaggaaagtcagtcgagcagtggttggctgcagcttccaacagtgcggagagcggcgcgggtccaagcgtctga

SEQ ID NO: 500335 - DNA, 420 bp, Stenotrophomonas maltophilia
atggcattggatatttcggccgcccaggcgcgcgacaacatggccgcggtgcgcgaacagtgggtgacggcacacttggagcagatcactgcggtgatttcggccgcctccgatagcggcgagatggcagcttcgtatgagctccaggtgggcgtgagcgaggaggctgggcttgagcgagtcatggaagccttgacggtccaaggattctctgtagttcggcgtggtaagcgcactgttgttaagaagtcggctgtgcgacgcagccttgctgacctcgctgccggcaatccggcgccggagggcgagacgggtcacaaggaagatgtggtgttggatatcagctgggctgagggagtagaagaatccgaggaggcgagtggcatcagcctgccgctaacccctgcgcccttgatctga

SEQ ID NO: 500336 - DNA, 1743 bp, Stenotrophomonas maltophilia
ttgaacacgattgtttcggcagcagatcttcgccggacggcgcagcagcgttccgatgcctgggcgaacaaggttctgtccacgttgaccacccacatcgatgcagcgtcccgcggcgggcatggcgcgctgcgctttgtgatggatacccaagcgatcgctggcgggctggagcgggtgttgaaatcactcgatgctcagggttttgtggtcaccaacgtcgcgggggagggtgaatccccgattctgatgatccgttgggatgagactgctgcgtccgtggtcatgggcacggtggcgttgtccgatccgcccggtatcggcaacctctatgaaatgctgtcaacgtcggcggtagccgtcgccttggaaaggacccagatcaacaagttccacacgaaaggtggaacgggcttcgccgccgaagaggcaaacgcgtttgccgacacccttgctggccgtaaggttgagcaggttggcgcggacaattcgctcaatggccccgatcgaatcgtcgatggcgttcggattcagaccaagtatttcgcgacggcgagagaaacggttggatcggcgtttggaacggatgggtatcgatacgaagggcagttgctcgaagtgccctccgatcagtatgaggacgcaatcgagctgatgcgcaagcgcatcagcagcggtcaggtgccgggtgtcagcgatccggcggaagccgagcgcatcatcaagaaaggcagcacgacttaccgccaggcgaggaacatcgcccgagccggcaacatcgatagcctgacttacgacatgaagacgcagagcatcgcctccagctatgcgtttgcgatctccttctccatcaacttcgctcggcaaaagtgggatgggcgaaccaacatggaggcgctcaatggtgcgctgaccatggcactggaatccggtgcaacttcctttgtttctgggattgccaccgcccagatcctgcgaaccaaggccgcggccatcggagtggtggcggcccgtgatggggtcaagttcgtgtcccagagcgcccttggccgcagtgcaattcagaaggtcgctcaggtgtccttgggcaaggctgtctacggggccgctgcggtcaaccacgtcgccaagctgttgcggaccaacgccgtcacaggggctgtgaccactgccgtgatttctggcccagacttctaccgggctgcgttcagtcgcaacatttcttgggcgcagttcggtaagaacctggcggtcaacggcgcaagcgtagccggtggtgctggcggctggatggctggcgctgcgggtggggctgccgttggttcggtggttccggtcattggcaccgctgctggtggggtgatcggtggcattctgggagcgctggcgggtggcactgcttccagtgtggcgtccaaatacctgcttgatgggctggtggaggacgacgccaaggagatgctacgcctgcttcctggctatgtagaagccgtggcgaacgactacttgctgtccgaatcggagaccaacgcgttggttgagatcatcaagtctcggctcaatgcggcattcttgagggacatgtatgcgagcaaggacagggctcggtttgtctaccaagccttcgaaccggattgcgagaagatggccaaggcccgcccaacgatcacgctgccgaaggagaccgtcgttcaggcttccctcgacgagatcgaggaagaggtgctgaaccaggttgagtga

SEQ ID NO: 500337 - DNA, 315 bp, Stenotrophomonas maltophilia
atgaagctctcttatcgcacctccaccctcgctctcgccgccgccctggccctgccagcgcttgcccatgcggaaatcctgaagggtgagcgcatcgtcggccactatggatgcgggacgatgatctgcaactttgaaacgccggatgcaggcaccttcgatttcgagatggaagacaagaacgttgcacccaagatctttgctgcttgcaagatcgacgacatttgcgccatcaccggagactttgacatcgacaatgcgaccatcgtcaaagtgaccaaggtggagaacagcggccagaagcaccaggactga

SEQ ID NO: 500338 - DNA, 1233 bp, Stenotrophomonas maltophilia
atgcgaatcacggaggccttccgccagtatggcgtggaactgaagaaccctcagttcacttcttctgccgttgggggtgatccacgccaagtggtggtaagcctctgggcgcacaacttccagccggaccgatcgcgctacgttggtgatacgtctcagtggaaggggcagggaaagcatttcttccgacgccatctccaacaagccctggatgaggggctgcccatccgcgtcgtggtggccacgtctgaaaggcccgatgaagtcaccgcgggcaatgcagcgcgtgtgcgcaacgattttgagcccgacttcagcttggtaggccaggtggcctcactaaactccgacggatttgaattgacgttcgaccgggtgggcgtggcgcccaatagcgacggaaaaagaagtgaccgagcaccggtcaaatactggcacgtggccgaggccgtcacagcgcttggaggcccgtcctcgatcgcggacatccgcgcttggttgaaagagcgctaccccgccgaaaaccactctgacgccggcgataacctcacgctactgacggtgaacgatgccaatcgcaggcatcacaacaaggctcgaacagactggcgctccacttcaagccatccccaggatctggtgttccgccaaggacggttacgtgaggtgacgtatgaacccttcaacgccaacgtgcatggtcattggagcctgcagcagaacggtgacggcacatgggttgcggtcaagattgcatcgactcccgagttgatggtcgaggcgcaggcgctacaagaagcctttgaacatcagcccccccttgactcagaacacgatgcacgcgtctggagcatgagggccgtggcccagcgtcgcggccagccgcttttccgcgcccgactgctcgatgcctacggaagccgttgcgccatcactggctgctcggccgtggaggtgttggaagcagcccatgtgctgccctatcgcggtgaccacactgaccgaatcgacaacggcttactgctgcgtgcagaccttcacacgctattcgattgcgggttgctttgggttaccgaggaacaaaccgttgctttggctccatcgctgttgcagacggactacgcccacctgcagggcgttcccttgcggctcccccagctggccacgaatcgacctaaccctgcacatctgaaggaacatggcgaccgctgtcgggctcgtttggcgaactaa

SEQ ID NO: 500339 - DNA, 3378 bp, Stenotrophomonas maltophilia
atggcgaaggaatggaccccgtcgtggatgggccagcgcctcacaggatcatcggattggcgcttgcgcttggacggcctggagctcgccttgacgctggacgggcgcacccatcgggtcaacgtcgaagacgaggcggcttaccgcgtcaacgccggcaccttttggaccgacattacgttccacccggggcagcaccgggaagtgacggccgacgggttgcccaacgtccaaggcgccgatttgattcaagcgttgaacgtcgcattgaaggaaaagcgcctgcgcgaggaggtggcattcctcaaggaccagcagggcacgatcgactcctggctggaccacaaggcagaacaagagcggacctgcttcgagcagcgccgctggttcacccacgagcagcaggaagatgtcttggcggcccgccccacggttgacccggacgccctccgatcgcgcctgaagaaaccaggcgtggcgatccggttgggaccggctgcccatgcgatcgagcgctcgctggccgcttgggaagccgaccaccgccctgcttgggccgcgctcaacgccgcccacgtggaacgcgagctggtggcctgcaaagacttgctggaccgggtggagagcaaaccgctcaccccggaacaggcaagggccgtggtgtgcttcgacaaccgcgtgcaggtggtggcctcggccggctcgggcaagacttccacgatggtggccaaggcggcctacgccatccgacgcgggttcgtggatcccaaacggatcgtcctgctggcgttcaacaaacaggccgccgaagagctcaaggagcgcgcggccttggcgtttgagcgcttgggtatgccggaggtgaccgtggaggcgtccaccttccacgcactgggtttgcgccttatcggcaaggccaccggggaaaagccagacattcccgattgggccaccgacgcggccggaggggtgcgaaagctcaccgacatcgtggaccagctcaaagaccggtcgcccgcgttccgccgccagtgggacctgttccgcttcgtctttggcaaggaccttccggcgtttggtgcaccggagccgtcggacgtgtgggacgcccagggcaagggcgcgctggtcaccaaccgcggcgagcgggtgaagagcgtggaagaggcgatgatcgccaacttgctcttcttgaacggggtcaactaccgctacgaggccccctacccccaccgaaccgccgacgaaacgcaccggcaatacaagcccgatttctactaccccgacttgaacctgttccacgagcacttcgcactcgacgccaacggcgtgccaccagcgcacttcgaaggttacttggaaggcgtgatctggaagcgacagcttcacgcagagaaaggcaccgagctgtttgaaaccaccagccacgggttgcgccacagcgacgattttgatcggctagagcgcgaactgaccgcccgtgggttggtgctcgatcccaaccctgaccggaagattccgaaggacggccagcagccgatggcctcggtcgagctcattgggctgttgcgcacgttcatgagccacgccaagagcaacggcttgagcacgtcggatctgcagcagcggctggccgcgatgccggccgacaccttcaagctgcgctaccagatgttcctggacattgcggctccggtgatggcggcgtgggacgaagccttggcagcagaggatggcatcgactttgaggacatgctcaacctcgccgctggccacctggaaagcggacgcgtggaatcgccttacaacctagtgatggccgacgagttccaggacgcctcgcgcgcccgggcccggttgtgccgcgccctggtccaagaaaagggccgtttcttcttcgccgtgggcgacgattggcagtcgatcaaccgctttgccggcgcggacgtctcggtgatgaccggctttcgccagtggtttggccacggccaggtgctcaagctggagcaaacgttccgctgcccccaggcgctgtgcgacgtctccagtgcgtttgtctccaagaacccggggcagatcgccaagcgcgtgcattcggccacccccgcccacggcccagtgctccaagcgttccaggtggacagcaaggacaaactggccgatgcaatcgaccaattcgtggtgaagctggccgaaggcgtgcgcgatggcacgatcccaccggggcgcaacggcagggtgtcggtttacgtcttgggccgctacaacgctgatcggcagtatgtgcccacgaagcagagccggttcaaccgctgggtggaggtgtcgttcctgaccatccaccgctccaaaggcagcgaggcagactacgtcatccttccggaaatgatcagcgccccgcgtcggcgcagtttccccaacacccgcaccgatgatccagtgttggccttggccatgcccgaaggagacacgttcccgctgggcgaagagcgccgcctgttctacgtggccctgacccgggctcggcgcaccgtggccatgttcaccgcccaggggcaatgctcgacgttccttcgcgaactggaagaagacggggccgtggtgctcaccaacaccgatggcgaggccgtcgaggaaacgccctgcccggcctgcaagcaaggagttttggtggtgcgcacgggcccttacggcgagtttagcgcctgttccaacttccccgtttgcagctacaagccgaggcggcgcggcacagcacgctccctccccacgactccaccgtcgccccccaatcgcgcgtcggtggtgcctccgagccagcccgtccggccctcctccgttccccagcctgcatctcccaggcgaacgcttttctccgtgctcgaatccttcaacaatgggctggcagagatcaaccgcaacgtttcccgcgccagcgctgtgcaaagcgcgacgtccgacttgaagcaccggatcttcgttgaaagaagcacgatagaaagtgcattggaactggcgagatccgaaatctcgttggaagaaaaactgaaagaccttcgcttcaaggaagcctacgaatcgctgtccgaagcactggaagcaaaccgccacgagcccgaggacgcgcagccgcgggtggaaaccccgctaccaacgttctcccgcagccagcagcatccagaagaagactttgaagccgcgatccagcggttgtttgacgggctgagggaggaccgcgaagcattcctttctgcaatccatggtcagctcgcgacggaccccgttctgcgccggcactttctgacttcgatcgaaaagctgtccgcaggccactacctcgcagccctagaccctacatcctcttggcaacgaatctaa

SEQ ID NO: 500340 - DNA, 285 bp, Stenotrophomonas maltophilia
atgtggctgtgctcgcccgacgagttgggcctgagccgccgttcggcagcgcccttccaatgcacggccgaacacctgctggcccgtcaggacggcgggaaggacgtggcgggcaatgtcgttgccgcgtgccacctgtgcaacctgcggcgccacaagcgccccaccccagctccctcacccggtgcatatcgcgcccgcgtccagcagcgcatggccaaggggacttggcacccggggttagccaaggtggccgcccgcacaggcattcacgctttatcatga

SEQ ID NO: 500341 - DNA, 210 bp, Stenotrophomonas maltophilia
atggccaagaagaaccctcagcccgccaccgaccgcctcgacgcctttctggtggaggaatacgaagtccagggcgagaagcgcagcaactggtcgaagatcggcgctgcctggccgcaccaggacggcaagggttaccgcctcgtcctcaacgcggtgccggtgaacggtgtggtggtcctgcgtctgcccgagccgaaggaagattga

SEQ ID NO: 500342 - DNA, 195 bp, Stenotrophomonas maltophilia
atgacgaccatcaacgcccagtggtgcaccgccttcaacgccgctctgcaagcgcacttcgccctcaccatccaagacgccgggttgaccgataccgagctggcccgctacgccgacttggggcccaaagaggctgccctcacgttcggcgaagaccacgatctggaccgcgtcgatcgcgggtggttcacctga

SEQ ID NO: 500343 - DNA, 198 bp, Stenotrophomonas maltophilia
atgaccaccgtgggcgcggtgctggccgccatgctggctgcagcgttcctggccaccgtgttgggcctggctggcatcttctgggtcaatgcacggcacgcaagcggggcgcttcgtgtgcgttaccgtttgcgtgcccaaatcctggccggtttggcgttggcgtgggtgctcaccctggcgaggctgtccacgtga

SEQ ID NO: 500344 - DNA, 708 bp, Stenotrophomonas maltophilia
atggtccgacgttatccctatgaacgcctgggagatcaggtcttttccgacggcatgatcggttgccggtttcagcgtgtggacctcaacgcacgttttgggatcagcgacgagctgaggcagttttttacccagcatgggcgatgcgcacgctgcaacggaacgctggaggattggagcattcacgaggcgtgcaaagcaggtgctcgccgtttcttccagtcctccgatctggaggtgctcttgcccttggatacctttcatgcacattggaaagtccgcgtccgagagacacgtcgacgaacatcgtttcaccgggccctgaagtcgaaggcggcgccgggctcgcgcaccgctgagcagattaggacgctgctggcactccaggagcgtcgctgctactactgctacagatccctcgagggaccgggtggtgctgtaaacggcccaggcgagcccaccagttgccacgaggatcactacgtgtctttgcatcacggggggagccacttcatctccaacatcgtgttggcatgtgtgagttgcaactcgcgcaaatcggatctgcatggggacgatttcgttcgggaggcgctcgagcaagcaacgctggcgagacgccgtcaattgttgcgtatccaccggaaccgagcagcgcacgcttttcgcttggtggttgaggtagtggtggatgctggcgacgattga

SEQ ID NO: 500345 - DNA, 1383 bp, Stenotrophomonas maltophilia
atggaaggccgggattacggagaggtcgtccgggatgggcggctggcggccgaactggaggtgctcgacggcgcacctcggttcaagtgcccctattgcaaggacgccatgggcgtgaggtccaaagccatccgcgcccgaaccgagttccgcttctacttcgatcacctcacggctcgccaccgcgaaacctgcacagggcgcaagggacattcgccccaagccatcctggcgcgtcggtttgggctgtgtaaggagggcgcgctccacaaggcgttcaaggggtgggtgagggacagcctggacgctgatccgtctttccaggagaccaagctggaagaacggtggtgggacatcgagggcgtgaagtggcgccagcccgacgtgcagacgcagcggaacggccagcggtgggccatcgagatccaactctccactaccttcgttcacgtcatcgccgaacggatgcggcattaccgaaagaacggggggcgcatgctgtggctcttcaaggagctggatctggatcagttccgactgtccgaagacgacctgtttttcgccaacaaccgcaacgcgtttcgcgtcacccccgccaccgtggcccgctcccagcgcgagggccgcttctgcttggaaggcgtttggctggagccgcgccgggagggcggcacgatccgcgacgtagaggtgcggcgggaggtttgcttcgacgatctcacgttcgacacgtgtagccggggcatccctcgggcctacgccttcgactatgaagggcacaaagcccaagcagaaaaggaccgaatggcttggcaggaggagcaggtctggagccatcggcgagaggctttcgaaaccttctacgtggccctgctgcggggagagatcaccgactacaaggagcgcgatcgccgttgggaagacttgcgccgcttgttctccccggtggggatcacgctgccggcctatgccaaggaagcccccgatttggaccgactgctggtgattggctattcgatcaagcacggcgaagggcgcccgatgggcatcggctttgaaacgctggccgagctgggccaccacgcccacaaaatctggcccaagagcttgtggttctaccgttgcatgctccgtgcacaccaccaattgaagacggtcgtgtcccaagatcgcaccggaaagctccaggcaaagatgaaaggggtgctcaccagtttggcccggggggagaccacctttgcgccgcaccggtcctgggatcccctcatgctccgactgttccccgaggtggcgcctttgtggttggcggatctcaggcacgtggcgacagatgccttgaagccgcatcagcaggcaaagaaaccccaagaggtggtggcatga

SEQ ID NO: 500346 - DNA, 789 bp, Stenotrophomonas maltophilia
atgaaggaagaccggttgagccacgggatccaatcggcgctggacgctcgtgctgccaagcgccagcccacggcgttggacatcgcacaggaggccagagaggccaaggccagcctggaatcgaacatgtcctgcatggcccgcatcactgtccccgccggcagtgagcgccaccgggtgaccttccagctgttgagggcatcgatggactacggccgtgcgttgctgttcctcctggagacccatcccattgatcttccagcggtggccttggcgatgcaccgctcccagattgagcaattcctgcgggcggtgtttgtccagttccttgccgacgacgaacagctggaggactttctccaggaagatcgcggcccccgaaagaagaacgagaaaggaaagtgggtggctattgccctcaaagacctggccgcggacgtggagcaggccattgcacgcatcgggcaggacgatgagcctcagaagctggctcggacggtgaccaattcgtgggaccctctgtgcggactggtccatggcgggaaggccattcgggtgatgtatcaagatcccaatgggcagatcggggcgcacgtgccggcagccattctttttcagaccaccgtcaacgcggtggccaccaccaacttgtgcgtcattgcagcactgacggcggttggggttggggcctttgaggaaagccccgttgttgagcagtgcgccagcgggatgttgcactacatgcaacggaggaaagcccgcatggaagagctggcctggccgccttaa

SEQ ID NO: 500347 - DNA, 873 bp, Stenotrophomonas maltophilia
atgaagggagttagaagggccgtgctgaccggggcgtttgccctgactgcggcggctggagcgcaggcgcaatcgggggctggatcggatctgcttcgccagatcggccgagccatccaaggcacgcccaaggtggtcagcgataggtcgcggagcccttaccttgagccggcagggacctattgggacctggatcaggacgtcttggaaggggctcagcacctgcgggccggggtgacggctgtgggtggtggcggcgtggacacttgcgacatgcagctgctcgccatggcccattcgacctatcgcatcgacgccgacaaacgccaatggtgcctgaggcagtggtggctgatggacacgaaggcccagggcgccaacggcatctcaggcgatgatccggctgccatcgagcgccgttatggcccggctttcgacgcgcgcctgcagcgcttcaaggccatccgacggtttgccgttcgtcccacgttccaagccctgggcgatgtcgcctatcgggccgaccgtggcgtgctggaaggattcatcccgatgcctcaggtgtccgcggcgggacaaagcgtcaccggcaagggctttgtgccgtgggttcaccgcacctccacgggggtgtccagcccacccaacgccggccgcttccacctgctcatccgaatgggcgcccaagaggccgccaacttggcgcgacaaggtcgcagctaccgagacgatctggtgatgttctccgtcaaccgggtctgggtggagggcacggtgccgaagatggacgtgacgatagagagggttcggctcggataccgcgacgaaaccatcgacgttgatttaacccatacgcaaggagctccggcatga

SEQ ID NO: 500348 - DNA, 399 bp, Stenotrophomonas maltophilia
atgaaccacacgatgcttatcacaaacgacaccatcaccgtcaaggaagcccacgaagctgcgcatgccgctgccagcactttgtttgaccagttgtctgggtatacctattcgaccggcgcggcgggctatcccgcgttccagtcttccgctgaggacgcattgctggctttcctgctgaaccgcaattcggcagagctgggatgcgaagacgacgagctgttggctgaccaaaccgtctccgtcaacgtggagcgccaagaggacgggcagctcctttatgaggtggtgttcgacatggaagggtcggattacggcaccaattgcaaggtcaaggacctggcgacgctggacgaatggttcgatgaagaatggatcggcgtggagtgcgcggagtaa

SEQ ID NO: 500349 - DNA, 504 bp, Stenotrophomonas maltophilia
atgaaaattcatcacctcgtcagcgacggaaaccaagcggtcgccatcacgcaatcggcatcgagtggcggtggctacgcgcacccggtgaagctctccgccattcgcttcaacgtgaaagacgccgaagcggtgctccaagaactcaacaagtctggccatcgcagcgagaagtcgtttgaagtgatcgagcgctgggacgctgacgctcgcaaccagggaccaaagtcgaagttcggtcgaacccttgccgcccttgtggacgaagcgagggatcacctggaggggcaggtgatctacgaagccaaaggcatggaagagggcaccgtgcgtgcgatcaacgccgcggcgaagcaagccaggctttcgcaggtccttcctgccgcaggcggtccgagcatggtcatcggtgggcaggtctggaacccacggcaagaggcgcagagccaagctccagctccggcggctgacctagaggctccccgtcagcgcgtgcgcctgtaa

SEQ ID NO: 500350 - DNA, 264 bp, Stenotrophomonas maltophilia
atgtgtatggccggcccatgtgtacgggtgctgctggcgcaggagtcgggcatcagggtgagcgccgcgaagctcgtcaggatcgacctttacaacatcatcggaaagctcaatctcaacagcggtgaccagtccgcctttacccgcgccgggttgtcccgccagaacgatggctcgaggcatcggctggcttgtgacttggtccaaacgagattccggaaggatgacatccctgaggcgggcagcatgttcctctggacttaa

SEQ ID NO: 500351 - DNA, 732 bp, Stenotrophomonas maltophilia
atgcgaacgtcttttttcattctctccgccctgtgccttggcttgctgtccggctgtgccagtggcccggaggaacacgcctcaagccgcgagatcaccggcgcattcgtggccgacgacggccagctgtacctgttgccgcgctatgacgagccgatgcgcttcaatgccgcgccgttccgcgagtaccgcgcgctgatggacagcccgctgcgcgaggcggtggcctgcgcgcagatgtacttccatgaagactggcgcgacccggccaacaaggccaaggtgcacggcagctatgcgctgctgctgcggccggagcaggtgacggcggaacaggccgcgcagttcaagctggagcggattgaggtgctcccgcgtgaggccaaggccgtggaggagcgggcgcgctactacctgccgatggaccggacccgttacgcgctggcgtttgaccgcgcctgcaatctttcaaggaagggcggcagctattacagcgcgctgttcgagggcgacggcgagcgggtgcagttgccggatgctgcggcactggcggagaaggggaagctggcacagccgatcaatgcgcgggcgcagcggatcctgccggagagggaggacaagccgggtgcgggttcggcggcgggcaaggtgctcggcgcggcgctgatccctgtggccgtgccggtgtttgtgctaagcctgccgttcctggggccggatcattggaagtga

SEQ ID NO: 500352 - DNA, 681 bp, Stenotrophomonas maltophilia
atgttctcgccacctagtgaatcgcttgagtatggctggttggctagacaggtggttcgattgttgcgggcggattcgggtagcggaatcaaagtaatagatttttcggaggttcctgctgacgtgttgccagtggtgacgggaacgcttgcacggcttctctatgatgtgcagttctggcttaatgcagaggctagaactccggtgacgctattgtgcgacgaggcccatctctatttgcccgttagggatgatgctgacgccgtgcagcggcaggcattgtggtcattcgagcgcatcgccaaagaaggtcgcaagtatggattttccttgcttgtcgttagtcaaaggccttccgatgtgagtcgaaccattctctcgcagtgcaataattttcttgcgctgcgcttgaccaatgacagtgaccaaaatgtaataaggcgtcttatgccggattcattggtcggtttgaccgcgacacttccattgctggacacgggtgaagccttgctattgggggatgctgttctgctgcctgcgcgtatcaagctcgacatcccgcaggttaaaccagatagtgctacaaggaatttttggacggagtggggtgcagtgaagcctagcgaagatagtttggaggctgcagtggaatgtcttcgtagccaaacccgaggcggctga

SEQ ID NO: 500353 - DNA, 858 bp, Stenotrophomonas maltophilia
atgaggttgccggccagtggccggcactacccgtgtggggaattgccgaagccggtggttggtcgtgccggccgctggccggcagatacggaagcgttccgacgtcgtggggttgccggccagcggccggcactaccaggtggggaattgccgaagccggtggttggtagtgctggccgctggccggcagatatggaagcgttccggcgtcatgaggttgccggccagcggccggcactaccgtgtggggattacccaagccggcggttggtagtgccggccgctggccggcagatacggaaacgttccgacgtcatgggggtgccggccagcggccggcactacccgtgcggggaattgccgaagccggtggttggtagtgccggccgctggccggcagatacggaaacgttccgacgtcatggggttgccggccagcggccggcactacccgtgcggggaattgccgaagccggtggttggtcgtgccggccgctggtcggcagatacggaaacgttccgacgtcatggggttgccggccagcggccggcactacccgcgcggggaattgccgaagccggtggttggtagtgccggccgctggccggcagatacggaagcgttccgacgtcatgaggttgccggccagcggccggcactacccgggtcgggaattgccgaagcctgaggttggtcgtgccggccgctggccggcagatacggaaacgttccgacgtcatggagttgccggccagcggccggcactaccggtgcgcggtgtcggtgcgcggcggtgggcgagggggcctgaatcagggacaatagcgtccccgccgccccacgcccgctcccgatga

SEQ ID NO: 500354 - DNA, 1146 bp, Stenotrophomonas maltophilia; identical to SEQ ID NO: 498880

SEQ ID NO: 500355 - DNA, 711 bp, Stenotrophomonas maltophilia
atgcacgagcagggcccggtcgatttcatcgaggtcatccacaacgcggtccccagcgaggtctgcgcggcgatcgtcgagcgcatgcgggcggcgcgtggcctgcagcccggtgccgtgggcagtggcgtgttcccggaactcaagcacagcaaggatctgcgcatcagcggccttgatggctggcaggatgtggaccatcagctgcagcacgcggtgttcaacggcctgctgacttatctacgccgttatccacaggcgttgatcgcgccgctgatgttgcagatccaggacagcaagggccaaccgcgacgcctgtctgccgaggacttccctgacatgccgcagcagcagctggccgacctggcccgcacctgcctgcgcccgggcgccatcaacctgcagtggtatgcggcgggcgagggcggttacccgtactggcactgcgagctgtaccccaaggatgcgcaggccgagaccctgcaccggcacgtgttgtggacgctgtacctcaacgacgagttcgaagagggagaaaccgagttcctgttccagggacggaagatcgcaccacgcaccggcagcctgctgattgcgccgacggcgtttacccatacccatcgcggtaacaggccgcaggggggggacaagttcatcgcgacgagttggatcctgttccagagcgcgcagaagttgtttgggggagggtga

SEQ ID NO: 500356 - DNA, 594 bp, Stenotrophomonas maltophilia
atgcgctcggcggttgcggagctgcgttccagcctagggcgtggagaggcggctgagcacgtctaccagttgtggtgcgaaaagcactgctgggcctttggcaatgcttatgtggttcgggacgaggtgagggcaatcactaccggggataacatcgacctgatgttgcctaacgtcattgcaggttatcgagacatcgttgagctgaagcggcccgacatggaggttctcctctatgacaaagctcacaggaactattacttctcagccgaggtatcgaaagccattggtcagtcccaccgctacctcgacatgctccacgacttcgcagacaagggcttgctcgaccacaaagaagtagtggcttaccacccgcgcgcgaccatcgtcatcggtcgctctcatgactggtcagacgagcagcagcgcgcacttcacggtcttaatcggcgcatgcatggaatcacggtcatgacctacgatcacctgttggcccaaggagagcggctgatagagatgatggcgcctgcttcagatgccggtgcaagacccgcggataccgctccggagttagcagacggcattccttggtag

SEQ ID NO: 500357 - DNA, 774 bp, Stenotrophomonas maltophilia
atgcagctgccgcaccgccggcgagaactgcttgcggtgcgggcacaccagctgcagcggaatgtggctgccgaggccgtcgagcagcagctgcaggcgtccggccagcacgtcttcgcgcaggtccagccaggatttgtaggtgatgccttcgccggccaccgcccagcgccgcaccacgtcggcgtcgtcgcagaccagcgggccgcgcaccgggatcacggtgcggcgcccgtcgacctcgaacgaccagcgatcgtaggcgcggccactgagctggtagaccaggcaatcgtgctcacgcagttcgtccagacgcaccggcgtgccccgtcgctgcaggtaatcgggcgacgccgcgagcacacgacggttgccttcgagcaggggcagggccacgtagttggcgtcatcgaagtggccgatgcggatcgccacatcaaccggatcgcggaacacgtcggccacttcatcggacagccgaaggtgcaggcgcagccgtggatgtgcggctcggaatgcggtcagccacggcagcagcaggttgcgaccaaagtccgacggtgccgacagctgcagcgtgccgtgcagttcggcgtcctcgccctgtacgcgggcccgcccttcgcgcagggtagccagtacctcctgcgcatacggcaggtacagcgcgccctcgccggtcaggcgcaggctgcgggtggtacgcacgaacaggcgcaggtccagttcgcgttccagccgcgccacggcagcagcgacctggccgggtaa

SEQ ID NO: 500358 - DNA, 795 bp, Stenotrophomonas maltophilia
atgtttcaacgcttgttgctcgcgctcgcactggccagcgcacccgtcttggtccacgcgcacgcgccagccaccgattccgttgaggtccacgggaagaagcctgggtttttcaaacgcctgttccaccgccacaaagacgccccgcagtgggacggtgtccagcccgagcttcgctcagcgctggaacgcatcgccttgcagatgaaggacgagggctacgacctgcggctgatggagggctaccgttctaaacagcgccaggccgagctgctcgccagccaaaagggcgtgacccaggtggggccaggcagcagctgccacaaccacggttgggccgcggacatggtcatctacaagcgcgggcgcccttcttgggacctgaaggacgagcaggtgcggcagggctaccaacgcttcggtgagctcgcccagcaggcgggattgaggtggggcggggcttggaagagcttcaaggacatgccccacgtcgagatgcgcagcgagtgcctggtagccattcgtggcggatctgccccccgccgatcgctgcaaacagtgattgccaaggccgagtcagtgtctgacgcaccgaaagcaccccgttgggcctggagcgtcgattccgagctggcgccggactgggcgtgcgaatccgtgctttgcagtgtgtcgtgggcgacggtgagccggccatggagctatggcgtaaggccgccgttgaaaggactccgtccagaaccgtttgctgaggcgtcctgtcccatggccccaattgccctgaggcacacatga

SEQ ID NO: 500359 - DNA, 897 bp, Stenotrophomonas maltophilia
atggatgaaaaggatcaggacaagggaagcgacagtaaggctaaccggaccccgtcgaagcctcagcggcgaaagaagaagtggaaggagcaattcaacaagcccttcagcagcctgttcaccatccgcgctgacgaagatggaaacccgccggagctggaggaatacctggttcgtcaacacctgcaaaaggggctgagccaccttcggatgagcagccgggatattaggtccgcgctgaaggtatacagccttaccgagctgaaccaactctggaacatgcgcgaaaagaagctcaagtatgtggaggacgccgcacttctgttggcgcacatccggcaccggtccgggattgaccttcagctgcgcccggcatccgagcttttcagtcacgacgtgatccaagccctccaaggcgtgcttgaggaaagcgggcgattaagggtggaaaagccattgccccccgctcctgacgctgtcgcagcagagggaaagcgaatggagcaggtcctccgtgtgatccgagagggccaagccgagtttcgcaaacgcctggtcgatcactacggagcggtgtgcatggtcaccggcaccgccctggcaagcgtcatcgacgcggcccacatcgtcccctacaacggggcatctaccaacgccttgagcaacgggctactgctacggaaggacatccacgcgttgttcgatgcgggcctgttgaccatcgggccggacctggtcgtttacgtcactgctggggtggatgatccctactaccgttcgttggacgggaaggatcttacgttaaccgccccaccgaagatgtccaaggaagctttaagaaagaggctggtggggcacgggtcgtccgagttaaacagcaccgccctaccgggatag

SEQ ID NO: 500360 - DNA, 465 bp, Stenotrophomonas maltophilia
atggaaatgaccgtccaccggcttgcagaacgactgttacaggccattgagcactgcaacccttgggcgctgagagaagccatcgctgctgtccgcgaggcgcgcctggaggcttggaggggcctaacggctttcccgtccttggaccacccggtggggcccaacggaataaccgctttccacgtcgcttgcatggcgtggcacgtaaaccaggaccacccacacaaacggcagtgctacgacaagatggccggaatcctggccgaagccggggcggacgtgttcgcggagtttggtccggcaaagcaacgctggacgatcattgaagcactgcatggcgcagcaccaccgtctgtcaaagcatggatggcctcccagccgttcgatttgcattgctcgccttcaagcgtcgcccacacgctgcggtgggactgccgtcgtccagtcgcctcgcgggaagaatag

SEQ ID NO: 500361 - DNA, 639 bp, Stenotrophomonas maltophilia
atgctgctgcagttgatggatggacgggcttacaccgcgatggagctggcgcgcgtggccggggtaacgccgcagacggcgagcacgcacctgcgcaggctggtcgagggtgacctgctggtggcggtggcgcaggggcgtcatcgctaccaccggctggcatcaagcgaggtggcagagatgctcgaaggcatgctgcgcgtggccgaccgtaccccttcctgtaccgctgcggccgcgcgcagcatgcctgcactgcgcgaggcgcgttcctgctatcggcacctggccggcgtgcacgcggtcgccatcaccgatcgcctgctgcaggcggggcatgtactgccatgcgaagggcattggcagatcagcgctggaggcgccgcattccttgccggactgggcctgccgttgcgcgagctcctgcagcagccggtggcggccaagccggcgcgctactgccgtggctgcctggactgcaccgaacggcggccacacctggcagggctggtcggtgaggcgatgctggacagtttcgtgaacaacgattggctgcggcgcgtcgagggccggcgcgaactgcggctgacgccacccgggcgcgaggcgttgtggcggctcttcaacctggcgacctga

SEQ ID NO: 500362 - DNA, 297 bp, Stenotrophomonas maltophilia; identical to SEQ ID NO: 499480

SEQ ID NO: 500363 - DNA, 240 bp, Stenotrophomonas maltophilia
ttgcacgagaccggtgccgtcgtgaactggctggtgaccgcgccgaagtcggaaactgaaggagcggcgaagccggtcgcagtggccgggaagatcaccccgcccactgacgtgctgtccaagcagttcgacggtttcgtccagaacttcgcggtgaccagccaggacaacgacgtctggaaggcgacgatcaccatccgcggctccggcgccgtcaccacgcaccgcccgacgccgtaa

SEQ ID NO: 500364 - DNA, 1974 bp, Stenotrophomonas maltophilia
atgaccatgaccgacactttcgggcggttcgccgccacgcccattggcccggtactcgctgcgcgagatggcgggctcaccctggccaccaccggcgccaccacgctggccagtcacgcacgttccgacttcagccttgatgccgggacggtgggagtggagtttgctgtgtggggtgatgacgccgttgcagcactcgtaggattcgccaccggcccggcagcgctgaacaaggcgctgggtgcagacctcgccagtatcggctgggacctcgccgccgggcggctgctgcaggcaggcggtgcgatcgcgacgggccttccgacagtggcccatggggacattgtcgggctgcaggtggtgttctcgacccctcgccagctgcggctatatctcaacggcgcgcagatcctggtgcgcgagctgcaactgtccggtccgctgttctttgccgcgtcgctgggcgcatcgaaggcgggtggcctctgcctggctgtcaacgccgggcagtggggaccgcgaagcgaggcggcggccgctggctggcgcttgcccactgcatccttcagcccgacccggctggccgatgtggactggctgtcagcgcccggcgacagcccggccaatgcccgttacgaggggttggtggccgagggcgtcaacctgattcaggagcttgcgttctggccgtggggtggtgatccggtgtcccaggcagcggccgccgagtgcgtcgtggtcgacgcggaaggtttgctggacgggatggcgggcactggtgcctctggcagttcggtgcagatcctgctggcacccgagagcggcatgcgggccgacgcggtcccagccttccgttgcgcgatcgagcagatcgagatcaacgacgacggcaccaagacgctgcacctgcgcgatgcgcacgactacctggacgagacgatcaaccggggcgtgtttctgccgaatgtcgcgtcattggcatggaagccacagccggtggtgatcggcgcggtggccagcatccctgccatgggcgccaattcggacgcaacatcgatgttcgtcgctgacagccgggtctacgtcaatgcggtgatggaccgcggcgacctgatggagatcaacacctacaacgaggcgccggacgggcaacagctgctgctgaagtcgccaccggtgacgccggtggtggttgacgcctccagcgtcggcgcgggcatgatgccggcgcggctggagcaggcggtgggtgatgtgatggcccggttgggccgagcggcgtggtcggccagcgactgcgcggtgatcgaccaagccacgggctacatggggatcggctactacgcgggcacagccatcaccggccgcgcggcgctgaattccctcctgcccagctacggcgccggctgctatcaggatcctgctggcgtcttgcgctttgtccgcgtgaccgcgcccgagacacatgccggtgcgttcgccttcgacctgtcggaggatgatctggcggctgatctggtcatggtgcccgacgatgcgccaaacctgacccgacgcatggcctaccggcccaacggccaggcgctgggcgcatcggacctggtcaccgacgttgtcgatgtgccccagtcccgacgcgatgaactgaccggcctctaccgggggcaggtgtatggtgctggtccgctgcacgcccactaccagcgggcagaggcggcggacccggtcatctcgctgttctggcacgcggccgacgcgcagcaggagattgagcgcgtcctggccatgtaccaggtgcagcgccacttctaccagctcgcggtccgtggtgatcaggatctggcgccgctgcccgggcagatcggtcggcttacctacggtcgatacggccttgaagacggcaagccggtgctggtgcgccgggtagagcgcaaccctgccacgggggacgtggtgctgacggtgtggggatga

SEQ ID NO: 500365 - DNA, 4590 bp, Stenotrophomonas maltophilia
atgagcctgtacaccctcactgtcgaccttctgttgaagtccggatcgttcgagcgggacagcggcaaagcggcccgagtagtgcagcgggacatgtcgagcattcagtcggcgatgtctgaggcagcgcgacgtggcgccgatgacgtggcggcagggttccgtcgcgtgacgctggaggcagtcgggatgggctcggctctggccgcagtcaaggcgacaatcggccgggccgatgaatggaccgggatgagcaaccgtatccgcctggtcaccgcctcgcaggccgagtttgttgcggcccagcaggatgtggtccggatcgccaaagcgacgtatcagccgttggacgccacggcgagtctctatcagaacctggcaatggttcaggatcggctcggcgtaacgggcgcgcagacagcgcggatcgtggagacggtgaacaagacgattgccatgtcgggtagtagcgcagctgcgtcggagggcgcgcttactcagtttggccaggccctggcggcaggtacgttgcgcgccgaagagttcaactcgatggtcgatggcgcatccaagctggtgcagaccattgaagacggaatgggcattgcccgcggcagtctccgcaagttcgtggtggatggcggtgtcgcagccgatcagatcgtcaacgctctgctgaaaatgtctgacggcgtagatgactcgttcgggaagatgcaagtccgtgtctcgcagtcgatcaccaacctaaataccaacctgactgagatgatcggcagggcagatgaggcaacgggggcttcccaagcgctttctgcgggcattggggcgcttgccagcaacttggaaatggtagcggttgctggtgctgccgtggcatctggcccactactgaaggccctactggcgcgggtggctgcagctaacgctggaatggcagcagatcgggccgcagctgcgcagaacgtcgctgcggcgcagcagcttgagctacggacccgcgcagctatgcttgatgctcaggcggaggtgcggcgcgcctctgcgatcggcggaagcgtgtctgtcagttccaaggcagctgccgcgaccctggagcatcggcaggccgtcctcctgcttgctcaagcacaaggacaggccgctgccgcgaatgccggatgggtggcgcgcgctggagcttcgacgctcgcgatgcttggaggcccggccggtatcgtcacgatgctggccaccgccgcagccgggtggctgatcttccgcgacaacaccgcgatagcatcggccgcgctgatcgatttcggaggcgcagctgacaccgccatcgagaagttcaagaccctcaacgcccagatgcaggccggtgaaattctgcgcctgcagaaggagatcgatgagaactatcggaccatcacaggttcgatcactgaaatggtggcggctgcgacgaacttcgctacagcgagccaggcatccgagttcattcaagaaacccagcggctcgatgctgccttcaaggatgggaagattggcgcagatgaattttccagcgggttggaggcggcatggcgggcgatgattgctggctcgcccgctgccgctacggtggccaagagcctcacagaagagaccgccgccgctgcaactgctggtagggaggtcgatcgcaagcgggcaatcttggatgcgttcactggcagcagcacccaggcgaagggtgccaccgacgcgctgtcgggctcgttcaatgtcctgggggactcggccggcgctgctgggaagcggatcgcgtcggcgatgcaggcgctgcctggccagctggcgcgcgttggcaagagcgcggcagaggtggcaaaactggacgtgggcgactggttcaaggaggcccaagccagcggcgtcgacttctccaagcgcgacgacccgaaggtcaagcagtaccttgaacagggcgcccagtatatccggctgcagaccgagctggccgcggcgcagaagaacttcaccgaatcgcgcaaggcttcgtcggccgcagagcgtgcgggcgcgaaggaccgcaaagccgacgcggaggcagtcaagcgctacggcgagcaggcggcgatggctgccgcgaccatggctggcccgctggctgaggccaccgagcgccagaagcagctcgaggacaagctgaaggaagcgctcaaggaagggcgcatcgagcgtgccgcgtacaacacgctcgtgctggagtcgcagaaggcgttggagcagtccagcgctgagatcaagaaggccctggccagtccagaatcgctgctggcgaccatggacgccgaggtggccatgctcggcaaggtcgggcgttcgcgagagctatcgcgccggcaaatgttgaacgagcgcgacatgcggcaggagctgcagagggccgtggaggcggcaggcagcaaggaggagctggccaggaggaagggcgttgcctcctatgaggcgtatgagcagtccatgcttgctgcggctcgcgcctcggccgatctgtcgctgcgagtggaagaggctgcagcgaacgtagaagcatgggccaacgtgctggtgtacggcgtcggcgatgccgcagatgccatgtcggactttgttgcgggcggcatgcgcgacttcgacaacctatgggacgacctgaaggacgccgccaagcgcggcctgcgcgatctcgctcgcgagttcctgcagcagaagctggtgatcccgatccagacgcagatcctcaacgggatgagcggtcagggcggtgggctgaatctgcagagcttgatggggttgttcggcggcaacggctcggcggccggcgggcagaacctgagcacggttgccggcctgctttccaaagggcagggcctgttcggcttcgggcgttcggccggggctgcagcgggcaccctgacgggcttcggcgacgtgaccagcatggccggaatgaccggttccagcttctccggattgatcggtggtggcagtgcaggagccggcgcaggtgcggcgggtgcaggcgctgctggctcagcagcggcggcggtccccatcatcggctggatcgtcgccggcatgatgaagaacgcccagttgttcgaccagggctggaacatcgccaatggtgagagctgggccggcaaaatcgccaccgccggggctgtcggcttggccgacaaggggttccgtgccctgggcttcaacgacaaggtcgcgtcgatcctgtctggctccagcatccacgcgaagctgttcggccggcaggctcccaaggtcaccgggcagggcatcacgggtagctatggcttcggcggattcgatggccagagctacgccgatatcaaggccaagggcggtctgttccgcagcgacaagaagtggacgcagttcggcgcgctggatcctggcatcgatcgcacgttcgatatggccgcgcgccaggtgcgtggtgctgcaaccgatctggccaaacagctgggtgtggatctgacccagaagcttggcagcgtgaaggttgacctgggcaagctccagttgtcggccgactccactgaggccaaggcgcagctggaggcatacctcagcgacatgaccaatcggttgtacaccgaggcggtcaaggcggcagggttcggtggccaacttgacggctacttcgaggcgtcggatgtgttcaccgcgctcagtgcgtcgatcgcgctggccgttggcaacgccgatgagttgggccaggcgctcaacggcctggaggtcgacaaggtcaacaaggcagtggactacttccaggacctggccagcgtcgccggcacagacctggccacccaggtcgaaaaggtgaccgggctgctcggcaactacgccagcctcatggccgatgtgagcacccagctgatgacggccaacctgacgcagtaccagtcgcaggcgctgtcgatcgagcgcacgtatcgccagcaggtgaagtcggccaacgactacgccaaggcgctcggcttgtccggcgctcgggcggaggacctggccaagatcgaggcgcttcgtgccaccaacatgggcaagctgcaggcgcagatcgacaaggacaagaaggccatgcagtacggcctgtcgatcagtgacctttcgccgctgacggaccaggagaagctgggcgaggcgatgaaggaactggagcgggcggtgtccggtggcgacaccagcgccgcgcaggcggccgcacaggcagcgctgggctttggtcggaatctctacgccagcgggcaggactacaacagcctgtacggccgcgtgagcggcctgatcgacggcatgaaggtcggcgacctcaaccagacggacggcacgagcatgggggcgctggcggacgcgatcgaggcgctgccggacaacttcagccgggccgtgttcgacctggtcgttaacaacgacgcccagacacaaaccaccgccgccgtgcagcagagcaacgctctgctggcagagcagaaccagctgctccgccaactcgtgtccaccactacccagggcgtacgcaatgccagcagttcagcgctgcgcgaagcactcaacgcgaggtaa

SEQ ID NO: 500366 - DNA, 744 bp, Stenotrophomonas maltophilia; identical to SEQ ID NO: 499352

SEQ ID NO: 500367 - DNA, 1971 bp, Stenotrophomonas maltophilia
atgaccgacactttcgggcgcttcgccgccacgcccattggcccgctgctcgccgcgcgagatggcgggctcaccctggccaccaccggcgccactgccctggccagtcacgcgcgctctgacttcagcctcaacgccggcacggtgggagtggagtttgccgtgtggggtgatgacgctgttaccgccctggtaggcttcgccacagcggcggcagcgctgaacaaggcgctgggtgtcgaccttgccagcatcggatgggatctcgcggccgggcggctcctgcaggcaggcggcgcgatcgccacggatcttcccgcagtggtgcacggtgacattgtcgggctgcaagttgtcctcggggcgcaacgccagattcgcctgtacctcaacggcacgcaggtcctggcgcgcgagctgcagctgtccgggccgctgttcttcgctgcgtcactggccgccaccaaggccggtgggctgtgccttgcggtcaatgcagggcagtgggggccgcgaagcgacgcagccgcatccggttggcggctccccaccttggccgccagtccaatgcgcttggctgatgtagattggctatcggccccgggcgacagcccggccaatctccgctatgaggggttggtggcagaaggggtcagcctgatccaggagctggcattctggccgtggggaggcgatccggtttcccaggcggctgccgcggaatgcgtggtggccgatgcagacggcgtactggacaccttggtgggcgctggcgcgtccggcagttcggtgcagattctgctggcggccgagagcggcatgcgcgtcgacgccgtgccggcattccgttgcgccatcgagcagatcgagatcaacgacgacggcaccaagaccctgcatctgcgcgacgcgcacgactaccttgacgagacgctcaaccggggcgtgttcctgccgaacatcgcctccttggcatggaagccgcagcccgtggtgatcggggcagtggccagcattccggcgatgggggccaactccgacgccacctcaatgttcgtggctgatggacgggtctacgtcgacgccgttatggaccgcggcgacctgatggaggccggcacctacagcgaggcgccagacgggcaacaggtgctgctgaagtcaccaccggtgacgcctgtggtcgtggatgcttccagtgttggcgctggcatgatgcccgcccgtctggagcaggcggtaggcgacgtgatggcgcggctgggccgcgaggcgtggtcggccagcgactgtgtggcgatcgatcaggccacgggctacatgggtatcggctattacgcgggcgcggcgatcaccgggcgcgcggcgttgaacgctctcctgccaagctacggcgcggggtgctaccaagatccggccggcgtgctgcgctttgttcgcgtgatcgcgcccgaatcccacgcagggccgttcgcctttgatctgtccgaggcacacgacctcgcggctgacctggtcatggtgcccgatgatgctccgaacctgacccggcgaatggcctaccgcccgaacgcccaggcgctggccgcatcggatctcgtcaccgacgtggtcgaggtgccgcaggcgcgccgtgatgagctgaccggcctctaccgtgggcaggtgtacggggccggcccgctgcatgcccactaccagcgggcggaagttgctgaccctgtcatctcgttgttctggcacgccagcgacgcgcaggcggagatcgatcgaatcttgggcatgtaccgggtgcaacgctacttctaccagctgacggtgcgtggtgatcaggatctggcgccgctgccaggtcaggtcggccggctcacctacagccggtatgggctggcagacggcaagccggtgctggtgcgccgagttgagcgcaaccctgccacgggggacgtggtgctgacggtgtggggatga

SEQ ID NO: 500368 - DNA, 216 bp, Stenotrophomonas maltophilia; identical to SEQ ID NO: 499437

SEQ ID NO: 500369 - DNA, 375 bp, Stenotrophomonas maltophilia; identical to SEQ ID NO: 499436

SEQ ID NO: 500370 - DNA, 219 bp, Stenotrophomonas maltophilia
gtgaactggctggtgactgcgccgctgtcggaaaccgaaggtgtggccaagccgaccgccgttgccggcaagatcaccccgccggacaccgtgctgtccaagcagttcgacggcttcgtgcagaacttcgcggtgaccagccaggacaacgacgtctggaaggcgacgatcaccatccgcggctccggcgccgtcaccacgcaccgcccgacgccgtaa

SEQ ID NO: 500371 - DNA, 2271 bp, Stenotrophomonas maltophilia
atgtccccgacccgtacttcccgtggccgccttccggtcgcgcgccccctcgttgccgctctttccgccctgctgccgctggtagcagccgctcaggaaacccccgccgccaaggatccggttgccctcgatgccctgcaggtgaccgcgcagcgccgcgtcgagaacgccaaggacgtaccggtcgcgctgagcgcgatccagggcgagaagctggatgtgctcggctcggccggcgatgacatccgcttcctggccgcgcgcgtgcccagcctcaacatcgagtcgtcctacggccgtgccttcccgcgcttctacatccgcggcctgggcaacaccgatttcgacctcaatgcttcgcagccggtgtcgctggtgtatgacgacgtggtgcaggaaagcccgctgctgaagggcttcccgctgttcgacctggccaacgtggaagtgctgcgtggcccgcagggcacgctgttcggccgcaacaccccggccggcgtggtcaagttcgattcggcgcgaccgtcgcaggatgccgacggctacgtgcgcgtgggctacggcagctacaacagctggaacgtgcagggcgcctacggcggcccactgaccgaccgctggtcggcacgtgtctcggcgatctatcagcgccgcgatgactgggtcgacaacacccgcgccggtgcccccaacagtggtttcgaaggctatgacgaagccgccggccgcgtgcagttcctgtacgaaggcgacgacttcgaagcgctgttcaacctgcacaagcgcaagctcaacggtaccgcccgcctgttccgcgccaacatcatccagaagggtggcaattcgctggtcgagaacttcgaccgcgacaaggtggccaacgacggcgtcaacttctccgacctggagacctggggcggcagcgcgcgcctgcagtggaacctcggctcggtgacgttgcattcgatcaccggctacgagaccgccgaatcgctcaaccgtggcgacatcgacggcggctacggtgcggccttcctcggtgccggcaactacggcccgggcctgattccattctcttcggagtcggccgacggcctgccgcaccaccgccagtggacgcaggaagtgcggatcgagtccaacgagtggggccgcttcgactggcaggccggcgtcttctacttcgatgaagacgtgaccatcaacaacttcaactacgactcgctgaccccgggcaatccacagaccggccacgtggtgcagaaccagcgcaacaaggcgtgggcggtgttcgcttcgggcgacttcgatgtcaccgatcgcttcaagctgcgcgccggcgtgcgctacacccaggacaagaaggacttcagcgccagcgtgctgcaggccgttccgttcggcaccccggtcagcggcccgtacctggccaacaccgacgtcaacgacgtcagctgggatgtcagcggcgtctacaagctgaccgacgacatcaacgcctacgcccgcgtggccaagggtttccgcgcaccgtcgatccagggccgcctggccttcgcgccgggcctgtcgcaggccgattcggagaaggtcatctcgtatgaagccggcatcaaggccgacctgttcgagcgccgcgcgcgcctgggcctgagcgtgttccgctacaacgtcgacggccagcagctgatcgcggtgggtggcagcaacaacaccgccaccctgctcaacgccgacaagaccatcggccagggcgtggaactggacctggaagcctacctggccgataacgtcctgctgaccttcggcagcagctacaacgacaccgagatcaaggacaagaacctggcggtggcgatctgtggcggtggctgcaccatcaccgacccgaccacggtgatcaacggccagacctatgcgctggtgaacggcaacccgctgccgcaggcaccgaagtggatccacaacgcgaccctgcgcgtgggcttcccgctcagcgatggcagcgagctgtacgcctacacggactgggcctaccgcagcgcggtgaacttcttcatctacgagtcgccggaattccgcggccgtagttcgctggaaggcggcctgcgcctgggctacaactgggattacggccagtacgacgtggccgtgttcggccgcaacctgaccaaccagacccgcgtggtcggtgcgatcgacttcaacaacctgaccggtttcctcaacgagccgcgtacctggggcgtggagttcaccgcgaagttctga

SEQ ID NO: 500372 - DNA, 738 bp, Stenotrophomonas maltophilia
atgccgattcctaagttgctgcagctggccaagaacaacgccggccagtccaagcccatccgggcggagaccgaaggcaaggaggccacgatctacctgcacggcgtcatcggcgggtggtggggcgacattgacgagacgatgtttgcccaggctatggccggcatcgacgcggacgtgatccatctgcgcatcgattcgcccggcggtgacgtgttcgcggcccgatcgatgatgacggccatcgcacagcacaaggcgaccgtgatcgcccacgtggatggactggcggcctcggctgccaccggcatctgcatggcctgcgatgaggttgagatcagccagggcgccggtttcatgatccacaacgcctggacggtcgctatcggcaacaaggccgatatgaccaagaccggtgagctgctggccaagatcgataccgggctggccggggactacacccgtcgcactggtaaggatgaagcgcagattgtccagtggatggacgaagagacctggttcacggccgacgaagccaaggaacacggtttcgctgatcgcgtggtggaggtcgtcggcaagaagaaggcatccagcacctgggatctgtccgcctacgacaacgcacctgccgcactggccaaccgtacccccgaacccgacgacggcgccgccgccgccgcccacaaggccaatctgtcgcgccgtctggcgctgctggaacgctccgctgcgtaa

SEQ ID NO: 500373 - DNA, 705 bp, Stenotrophomonas maltophilia; identical to SEQ ID NO: 499318

SEQ ID NO: 500374 - DNA, 228 bp, Stenotrophomonas maltophilia
atgggtttggcggacttcggcccgctgagccaggacaagggttgtgtcaggctgatccaagggcggggtgctttggaatcggtcaaggccggccacattcatcacgcgattgcgctgtgttccaaggaatgggcgagcctgcctggcgctggctacggccagcacgaacacaagtttaccgacctgttggccgtgtaccgcaaggccggcgggacggtggcgccgtga

SEQ ID NO: 500375 - DNA, 363 bp, Stenotrophomonas maltophilia; identical to SEQ ID NO: 499401

SEQ ID NO: 500376 - DNA, 291 bp, Stenotrophomonas maltophilia; identical to SEQ ID NO: 499404

SEQ ID NO: 500377 - DNA, 399 bp, Stenotrophomonas maltophilia
atgccaacccggccaccccagcaccgtgcggctggctggcgcccctacaaggagaccagcgcccaggttcgcaagagacaggcgcgccgcgcgctgcccaccaattcctcgttgtggcgccggatccgtgcggtagtgctggctcgtgagccgctgtgcagatgttgtgctgagcagggcagggtgcgggcggccactgaggtcgaccacatcaacggggacgacggcaacaacgccgacaccaacctgcagccgctgtgccgaccgtgccatagcgccaagactgcacgggagaacggcgggttcggcagggatgcccgccagcccggcggagctgaaggagcggcgagttatccacagaatgctgaacggaaagggaggggggagggtcaaagttga

SEQ ID NO: 500378 - DNA, 1062 bp, Stenotrophomonas maltophilia; identical to SEQ ID NO: 499441

SEQ ID NO: 500379 - DNA, 423 bp, Stenotrophomonas maltophilia
atgctgcgcacgttgaccccggcggcagaggaacccgtgtcgctgagcgaagcgaaggcgcacctggtagttatccacgatgcggacgacgcgctgatcggcgccttcatcaccgccgcgcgtgagtcggtggagcgcaccacggggtatgcgttggcagcagcgacctatgagtggaccccggtcggcgagggccgctctccgctgccgatcgagccggccacgctcgacagtgaaccgggcgcctatccggtgaagttcacgacgacgccggggccgcttccggggccgctgcgcgcggccgtgctgctgttgctgggtgacctgtacgccaaccgcgaggcggtcgtggctggctcgcagttggccgagaacccaaccttggatcggctgatgttcccctaccgacgggtgttgccatga

SEQ ID NO: 500380 - DNA, 333 bp, Stenotrophomonas maltophilia
atgaggcgggccggcaaataccggcatcgcatcgagctgcaggactacggcccggtgcgtgatccgctcggcggggacgtgaagcaatggcgtagatggcgggctgacgtgccggcagaggtagttccgctctcgggtcgagagttcactgcggcctcggccgagcatggacaggtgactgcacgcatcgagatcccttacctgcccggggtaaagccgaccatgcgtgcggtgtttgacgggcaggtgtacgcgattcgtgcggtgctgccggatgcgacagcacgcgggcatatcacgctgatggtcgatgccggggtgtccgatggctga

SEQ ID NO: 500381 - DNA, 276 bp, Stenotrophomonas maltophilia; identical to SEQ ID NO: 499485

SEQ ID NO: 500382 - DNA, 195 bp, Stenotrophomonas maltophilia
atgagccccgatcacttcgacgtcgaagtgcgcccggtgagcgagccggtggccgaggcgggctggtatctggcctacggctacgggatcaagccgctggtggtctacgcgacgcgcgggatgactgtctggcgcgatggcatgcggcggatcccgatcacccgctacgccggcccgatcccggagcttcgctga

SEQ ID NO: 500383 - DNA, 363 bp, Stenotrophomonas maltophilia; identical to SEQ ID NO: 499479

SEQ ID NO: 500384 - DNA, 333 bp, Stenotrophomonas maltophilia
atgccaacccggccaccccagcaccgtgcggccggctggcgcccctacaaggagaccaccgcccaggtccgcaagaggcaggcacgccgcgccctgcccaccaactgctcgctgtggcgccggctccgtgcggtggttctggctcgtgagcccctgtgcagatgctgcgccgggcagggcagggtgcggccggccaccgaggtcgaccacatcgacggggacgacagcaacaacgccgacagcaacctgcagccgctgtgccggacgtgccatagcaccaagacggcacgggagaacggcgggttcggcagggatgcccgcccacacggctga

SEQ ID NO: 500385 - DNA, 378 bp, Stenotrophomonas maltophilia; identical to SEQ ID NO: 499459

SEQ ID NO: 500386 - DNA, 513 bp, Stenotrophomonas maltophilia
atgatggaaaggagtaagaccaatgcaggccgagtgcgcgcgctgttcgagcgccagccatccgcggcgctgatggcccgcgagatctaccaaggcgtgggcgcaaccacgccgatcgaccgtgaccggatccgcagcgcgctgcgggacctgaccgaggccaactacctcttgaaggatggcactggccagcgggcgttgttccggctgtcgggcatcggcatgccccgggcgttcgttgtgacggacgagcagcgcgagcgctgccgtctcgacaaggcacacaagcaagcgctacgccgggccgcgaggcgaggtgggacggcaggcgcgcgcacggcggacaagatgacgatcaacagggcgcgggtggagcggctgtctggcctggccccggcgaaagcctggggcaaggaaaaggacggacagcggccggccgagacggtggagcagttccaggcacgcggcgggcaggtgcagcgcctgacggccagctgggagcagcgagcatga

SEQ ID NO: 500387 - DNA, 363 bp, Stenotrophomonas maltophilia
atgtggtcgaacgcaccgccaccaacgagagaggaggcgggccggatcgagctggccaagaccggcccgtgcatggcctgcctggcgctgcggatgcagggcctgctggatccggagttggtggtgtacggctgcgactacaaccacgccaagagcggaaacctgcggcgcggtcacatgttcggctacgccctctgcaagtggcaccacatgcggcatccgatggaggggaacaccttcgcgacgatgcgccagatctacggcccgagcctgatggatggctcgcggaccttccacgagacgtatggctccgatgacgagctgattgccaatcagacctacgtgaacgaattgagggtatga

SEQ ID NO: 500388 - DNA, 195 bp, Stenotrophomonas maltophilia
atgagccccgatcacttcaacctcgaagtgcgcccggtgagcgagcccgtggccgaggcgggctggtatctggcttacggctacgggatcaagccgatggtggtctacgcgacgcgcgggatgactgtctggcgcgatggcatgcggcgcatcccaattacccgctacgccggcccaatcccggagctgcgctga

SEQ ID NO: 500389 - DNA, 276 bp, Stenotrophomonas maltophilia; identical to SEQ ID NO: 499484

SEQ ID NO: 500390 - DNA, 477 bp, Stenotrophomonas maltophilia
atggccgctgaccggtgccggcagcgcttccccgtcgatcagcttgaccagcaccgccgtggcgtcggtgatgccaccggcgtagtcgccgttgcggaagcgcggcaccaggtattcctggatgacccggttggcgatggcatcgggaatcgcgccttccaggccatagcccggctcgatgcgcacgcgccggtcgtccttggccaccaccagcagcacgccgtcatccacgcccttgcggccgatctgccattggtcgaagacccgcgtggtgtactgcgcgatgtcttccggctgggtcgtggctaccaccagcacctgcagctggctgcccttgcgctgctgaaggtccagcgcctgctgtaccagcgcctgcttctgcgcggcatccagcgtgccggtggcgtcgaccaccggcgaatccagcgccggaatcggcgccagctgctgggcgtgcgatgccagcggcagccatag

SEQ ID NO: 500391 - DNA, 522 bp, Stenotrophomonas maltophilia; identical to SEQ ID NO: 499298

SEQ ID NO: 500392 - DNA, 834 bp, Stenotrophomonas maltophilia; identical to SEQ ID NO: 499299

SEQ ID NO: 500393 - DNA, 738 bp, Stenotrophomonas maltophilia
atggaccggcaacggcgccccgacgctcgtggatggctggctgcgacccgccaaccatgccaccgcgccctgggtgcagtcgccggtggccttggccgtcgatggcagcgcctatcgattcgtcaagctgcgcgtgaagcgtgtgggcagcccggcgtggggcggatccctacagtggatcacgaccacggatcaggcatggagcacgcagaagctcgccgtcatcccggagccggcgtgggacgccagcggagtggccaccgtggacgtgcaggacattgcctggtggccggctacggtcgacgctattcgcctgcagctgggcaccgagcaatcggtggccaactacttcctgatcgactacgtcgccgtcggacgcccgcagcccggggcgtccgtggcggtggttcaggccgaaacggaggcccggatctcggccgatgctgccgaggccgcccagcgcaacacgctggcggtgcagatccgaggcaactacaccggctcggacccgctccagttgacctctggcctggcgtacgaggagctgaaggcccgcgttgcggcagatgccgcgcaggtgcggcgcatcagcaccatggaggccaggatgcccgcgggggagggtgcgctggctactgctgcgtcggtcacatcgctcgaggaggccacggcgaccacaaccggtgcgctggcgcagtcgatcacgaccatcaatgcctcgctgccggcgatcattga

SEQ ID NO: 500394 - DNA, 810 bp, Stenotrophomonas maltophilia; identical to SEQ ID NO: 499455

SEQ ID NO: 500395 - DNA, 264 bp, Stenotrophomonas maltophilia; identical to SEQ ID NO: 499456

SEQ ID NO: 500396 - DNA, 636 bp, Stenotrophomonas maltophilia
gtgggtgaccaggtacgcaccggccaggtgctcgcgacagtggagagcaacctcagcctgaccacctacaccgttaccgcgccgatcaatggcgtggtcatggcacgtacggccgccgtgggcatgtcggtgcctgagggcgccccgctgttcgaggtagccgacctgtccacgctgtgggtggacctgcacatcttcggcgccgacgcccagcacatcggtgccggcgtgccagtgacggtcacccgcttgagcgatggcgtcacggcgcagaccacattggagcgcgtcctgcccggcaccgctactgccagccaaagcactattgcccgcgccaccgtagctaacaccgatgggctgtggcggccgggttcagcggtcaaggcgcgggtcaccgtggatcgccaatcggcgtcgctggtggttccgatcaccgccctgcagaccgcacaggaccaggacgttgtctacgtgcagcagggcgagacgtaccacacccggccgatcaagctggggcgccgtgacgccgaacgcgccgaagtgctggaagggctcaaggcgggtgaacgagtggtggtggcccaaagcttcctgatcaaggccgacatcgaaaaatccactgtggaagaggaatga

SEQ ID NO: 500397 - DNA, 123 bp, Stenotrophomonas maltophilia
atgagggccgagccgttcctcacgccggcaggcgaggccaaggggccggaggcggcgcaggtgatcatcaatgaaacctgggcggcgctcgacaagcagctgaagaaggatggctggcgatga

SEQ ID NO: 500398 - DNA, 363 bp, Stenotrophomonas maltophilia
atgatggttcccctgatccagtccctgctgcagggtgatgcagcggttcggcatgtgctgggcgacccgatccggttgtggccgggaaccgcgccgcaggatgcagcactgccctacgcgacgtgggaggtggtcggcggatcgcccaccgcgatgctgtccgatgcgccgccggccgacggctggcgagtccgattgaccgtgtggggcaaagccatgacgcaggccaacggtgcggccgtcgccatccgcgacgcgatcgagcgcgtgggcagcatcgagtcttacaacccgacgcctgacagcgacggcacggacgcctttggcatctccttcgacgccaggctcctgcaactgcgctga

SEQ ID NO: 500399 - DNA, 123 bp, Stenotrophomonas maltophilia; identical to SEQ ID NO: 499492

SEQ ID NO: 500400 - DNA, 363 bp, Stenotrophomonas maltophilia
atgatggttcccctgatccagtccctgctgcagggtgatgcagcggttcggcacgttcttggcgacccgatccggttgtggccgggaaccgcgccacaggatgcagcactgccctacgcgacgtgggaggtcgtcggcggttcgcccaccgcgatgctgtccgaggcgccgccggtcgacggctggcgtgtccgattgaccgtgtggggcaaagccttgacgcaggccaacggcgcggccgttgccatccgcgacgcgatcgagcgcgtaggcagcatcgagtcctacaaccccacgcctgacagcgacggcacggacgcctttggcatttccttcgacgctaggctcctgcaactgcgctga

SEQ ID NO: 500401 - DNA, 177 bp, Stenotrophomonas maltophilia
atgcacgacctgggcgcgctgctggcgaagtgcgaggcataccgcacgcagtgggccaccggccgtcaggtcaccgaagaggccgcgcggcagaccgacaagacgcagaccaacctcggcgccgccgacgcggccaaggctctgctggcgcagcggagggcagcacatgctgggtaa

SEQ ID NO: 500402 - DNA, 462 bp, Stenotrophomonas maltophilia
atggacgaacctgcgctgctgctggccctcgacacctgtgagtttctgtttcttgctgagattggcgagccggaagcgaatcgtctgcgcctggtcgtcgaggagggccgggtggtcggtaagccctcccgcgtggagctcggtcatggacgttcaatcgatgacgtgcgtgcgatagaggtggtaccccactcgcagcggtttgaactgatctgggaccactacatcagctacgccgtgcacaacgagtcctaccagagctgggacgactccgaagcctggagcggcaacctgttccgccgctacagccattcgaagttccttgaatatctgggccgtgccaccttcgctgatacccgttacccgggcccattcacgcattaccaggtgatatgccaggaccacgtcatcgacattgctgcgttgcagtcgccgaaggtgcgcctgctggatccgtcgtag

SEQ ID NO: 500403 - DNA, 894 bp, Stenotrophomonas maltophilia
atggatctggtacatccacaattggccgcattcgctgcggtgctggaagaaggcagcttcgaggccgcggcacgccgcctgtcgatcagcccatcagcactgtcgcaacggatcaaggcgctggaagacaggctcgggcaggtcctggtggtgcgccaggcaccctgccgaccgactgccgcgggggaagcgctgctgcgccgggtacgcccgatgcaggcgctggaagccgaggcgctggccgagctgctacccgagcgtggcaacgacgctgcgcgtacgcccatccccctggcggtcaacgacgactcgcttgatacctggttcgtgcccgccgtcgccgacctgcaccagcgccatggctacctgttcgacctgcgcatggacgaccaggaccacaccctgcagttgctgcgcgatggcagcgtgctcggcgcagtgaccgccgaaagccagccggtgaagggctgcaacgtgtacccgctcggcgccatgcgttaccacgcgatcgcttcgctcggcttcgcccgccagtacttcaacgatggcatgcaggccgcggccctggcgcgcgcaccgatgctggtgttcaaccgcaaggatgaactgcaatggcgcttcgtgcggcgcctgacccgcgcgcgactgcagccgccgctacactacctgccctcttccaccggtttcgtcgaagccgccgcgtgtggactcggttggggcatggccccggaaaccctggtcgcgcccgccgtgcgcgccggccgcgtggtggtactggaaccccgccgctggctggatgtgccgctgtactggcaacatgccgccgtgcgctcaagcacgctgcagcacatcacccaggcgctgcgcactgcagccagcggcacccttcgttga

SEQ ID NO: 500404 - DNA, 1407 bp, Stenotrophomonas maltophilia
atgggcgtgatcggccgacgtacaaggatgcaccgcgcgaaggccgcgctggcgctggtgctggcgacctgcctgccaaccgctgcgtccgcgcagaacagcaacgaagcccccgcattggactgggaacaggcacgccaacgcctggagcaggtctccgatgcgctggcggccgctgatgcagcggtacgcaacaagcaggacctgcaggacgccacgcgcctgctgcgcctgccggagatcaccggcgaagtgcgccgcctgcagttccagaagaccctgaccctgccactgggttcgctggcgcccgtggctgaagccttcggtatcgattcgccgctgtcgttcaccgagcgcgactggcgtacacgcccggtagtgaccgcggtgctgccgctgtacaccggcggcgtgatcccggccgcgcaacgtgcggccagcgccgcccatgagcaggccaacgccgagcgcgaggcgcagcgccaatcattgaccgtgcagctggcccaggcctacttcggccagcgcctggccgagcaggcggtggacgtgcgccgcgacgtgcgcgacggcctcaaccgccacctgtccgatgcagaaaagctggaacgcgagggctttgccacccgcgcccagcgcctgcaggccaccgtggcccgcgacaaggccgagcgcgaataccagaagacggtgaacgatctggctacgctgaaggccgcgctggccacgctgctgcgcagtggtggcgaggtgcaaccggtgtcgccgctgttcgtgcagcgcgtgccgctggaaccggtggccagcttcgagcgcacggcgcaggcgcgccagccgcagatcgcgcgcttgcgggcgatggtggcgcaggccgaacagggcgtgcgcgtgcagcaggccaagctgaagccgcagatcttcgccttcggccagtacgacttccgtcgccgcgacgagatgctgaccgacccggactgggcgttcggcatcggcctgaagtacaccttcctgtcgccgaactcgcggccggcgcagatcagcgccgcgcgtgcgcagcaggagcaggccgaagcaggcctgcgcgaggccgagaaccaggtcgcactgggcgtgcgcaaggcctggaacgaactggaaaccgcgcgccagcagttcgtgctgctcgacagcagcatcgcccaggcgcaggaaaacctgcgcctgcaggagctggcgttccgcgaaggccaggcgacttcgctggatgtgatcgacgcgcggctcggcctgggtggcgcccgcgtcgagcgcgcacaggccgcctaccaatacgatattgcgctggcacagttgctggaggtcagtggacagatggaccgtttcgaagagttccggcggcgtgcggacgaggtgatcgaccatgagtga

SEQ ID NO: 500405 - DNA, 1377 bp, Stenotrophomonas maltophilia
gtgaacgaatcggctccagctccccaaccggcaccgctcgcaaggcacgacccgataccggaagcgactgcccattcccatcgggtgcgtgatcgcaccgatgaactcgagctcttcatttcgggcctgctggcgttcgcgctgctggccgtgccgggttatctgttcgacgcctgggcgcgcagcagcctgcacaccgaaggcatgtacttccagatgctctggttcggtttcagcatcagtgtcggcatgtgctatgtgctggcagtggccttgatcatccatctcacggtgcgcggctactggatcgggctgatcggcctcaggtcgcatttccccgatggcattgactgggggcgcctgccaagaatgggggcggtcacgcgcgccttcctgcaggcccgggacggaggcctagatggcagcatcgaacgtgccgaccggctggcgacgatgctgttctcgaccaccctgcttgccgtacagacattggcgggcacgctggtattggccgtcctgacgcttggtgtgtcgatggtgatcggcgcgctgtccggtggcgccgatcatgtcgccatgctcgccctgtgcaccgtgctggccgcaatgttggcgctggctgttacccccgggatcctggaaaagatcgtggcgcggcggcaggcgcgcgggcagccccatgagcgaccgcagcgactgctgcagggcatgctggcggcactgcaacgggttccgctgttgcgcctgatgcagaccatgcagctgaccatgcagagcaacctgcgctcgcgctcgttcatggcggcctacctgttcgcggtgctggtagcgatgctgctggcggccgtgcaggtgatggcgtcgttgaagttctcgctgttcaaccgttaccagatcgtcacggaagcggcggttgagcacggcatgctgagtgcgcattacgaatcgatgcgttcggcgcatgaccagctgctgccgtacccgatgatcccgtcggacacgatcagcggtgcgcagcttcgtttgttcattccgcatcgcccgcaacgcgacaatccgctggcgcgccagcattgcaccgcacttccggacgcgcgcaatgaggccaccgggcaacaggccgccaatgccgcagtggagtgcctttcccggctctggctggtcaagctggacggcaccccggtcgacctgcatggcttcgtgcccatggagcggcgtgacctggatatgcggggcctggtggggtacctgcctacccggggactcgcacccggacgccatgacctggagctggtgtggaatgctgcaggcggcgagcggggggccggacggcgccgcgcgttccgcatcccgttctggtacgccccggacccctga

SEQ ID NO: 500406 - DNA, 372 bp, Stenotrophomonas maltophilia
atgaaattgagggttagctttccagataatcttgcttctgagggtctgataaatcaggagcgaattccgtgcttgtgtaaagtggctgattgctttgaagttgtcatcttcgacagcagtcctgaagtcacaggtgttatggaggagtgggatcgtcgggagctggcgctgcgggcggttgcgggcgccggcgggaagtactctcattatgcgagagggcttatcacgattcggccggtgagtttgggtctctatgatattattgatctgcagttcttctatgccagcatgggttggtgtccggtgattcgggatggggagtacgccccgccactatcttatgagggtgacggctggggagttagtagctag

SEQ ID NO: 500407 - DNA, 759 bp, Stenotrophomonas maltophilia
atgcaagagctgcatgggaagccgtcgacacttcctgcaagccagtcgccaatcgctatcggctcgccatccagctcggtccgcgagacggaatcagccatgcgaccgatcgattccagcaccgcggacagaacgcatcattcatcaatagctccccctcagatcccgtcagcgaccgaatgggtcaagacccttgtccatgtttcggattcatcctccttcgtccgacgtctccgcccccagcagcacttagatctacggactgaaataactaccatcttccagcttccagacaaaaccgctaggaacccatccatatccaggcttggcaacccagaacatgtccggatcccagtccaactcaggcggccacgccgccatgaaacgctcaatctgctcattaacggtaccaccccaaaaaccattcacatcttcgagcctggccctcccctccctcaaaacagcacccaacccccaccggaagaactgcttcctttcttcaaacgaaagacccggaagatagtcaaaactattccaccagatcacatcaacatcaagaagctccaccctaccaataaattcccttgcatcaagatcacccaaccagttattgatcacttgaacttaatctccactctttttgccctgatcccattcggcgacattatatctatagtccacttcgcaccagtaacattgctcgaactagaaccatttcttaaatttatactcacaccatcctttctggtgagagtatag

SEQ ID NO: 500408 - DNA, 600 bp, Stenotrophomonas maltophilia
atgaacaccgaatcgctcgctgcatccctcttccagcagctgcagcagggccagggcctgcagcaggtgtcccagcaactcggcctggacagcagccagaccgcccaggccgtcggcagcgccctgcccctgctgcttggcgcgatggggcagaacgccagtgagccgcagggcgcgcagtcgctgctcaacgcgttgcagcgcgaccacagcggtggcggcggtttcgacctgagcgggatcctgggcgcggtgatgggcgggggcggcagcggcgccaccgatggcgccggcatcctcggccacgtgttcggtggccagcaaccgcaggcggcacaactgctcgggcagaagaccggtctcgacagcggcacttcgggcaagctgctggcaatcctcgcccccatcgtcatgtccttcctggcccagcgcttcgcccagggtggcaacgcaggccagctgagccaggcattgggccaggaaacgcagcagtccggcggcatcggcaacctgctcggcggcgtcctggaccaggacggcgacggccagttcggagccagtgacttgatgaagctgggcgcgggcctgctgaagcgttga

SEQ ID NO: 500409 - DNA, 2238 bp, Stenotrophomonas maltophilia
atgaaaagcgaagcgaagtgcccgttcaaccatgccgtcgtcggcgacgcgacgaccaaccgcgactggtggccgaaccagttgcgcgtggacctgctcaaccagcattcggcgcgctccaatccgctcgatgccggcttcgattacgccaaggccttcaaggggctggactacgccgcgctgaaggcggacctgaaggcgctgatgaccgattcgcaggactggtggccggccgacttcgggcactacggtggcctgttcatccgcatggcctggcacagtgccggcacctatcgcatcggcgacggccgcggcggcggcggtcgtggccagcagcgcttcgcaccgctcaacagctggccggacaatgtcagcctggacaaggcccggcgcctgctgtggccgatcaagcagaagtacggccaggccatttcctgggccgacctgctcatcctcaccggtaacgtcgctctggaatcgatggggttcaagaccctgggctttgccggcggccgccccgatacctgggagccggaccaggatgtgtactggggccgcgagaccacctggctgggcggtgacgtgcgctacaagcatggctcggaaggcgttgaagagaaccatggcgtgctcgtatccgatgacgatgccgacggcgacgtgcactcgcgcacgctggaaaacccgctggccgcagtgcagatgggcctgatctacgtcaatccggaggggccggatggcaacccggatccggtgctggccgcgcatgacatccgcgatacgttcggccgcatggccatggacgacgaggaaaccgtcgcgcttatcgccggcggccacagcttcggcaaaacccacggtgccggcccggccgacaacgtcggcaaggaaccggaagccgccgggctggaaaaccagggcctgggctgggccagcagcttccgcagcggcaagggcggcgacgccatcaccagcggcctggaagtgacctggacgcgcaccccggcgcagtggagccacgatttcttcgaaatcctgttcggcaacgaatgggagctgagcaagagcccggccggtgcccaccagtgggtggccaagaacgccgaagcggtgattcccgacgcgcacgacccgtcgaagaagcaccgccccaccatgctcaccaccgacctgtcgctgcgcatggatccggcctacgaaaagatctcgcgccggttcctcgccgagccccaggccttcgccgatgccttcgcccgcgcctggttcaagctgacccaccgcgacatgggcccgcgcgcacgttacctcggcccggaaattccggccgaacagttcatctggcaggacccgctgccggaagcacagcacccgctgatcgacgccagggacatcgccgcgctgaagcagcagatcgccgcagcgggcctgagcgtcgccgagctggtgtccaccgcatgggcgtcggcttcgaccttccgtggttcggacaagcgcggcggcgccaacggtgcgcgcatccgcctggcgccgcagaaggactgggaggtgaaccagccgcagcagctggccaaggtgctggccgcgctggaaaaggtgcaggccagcttcaatgccggcggcaagcacgtgtcactggccgacctgatcgtgctggccggtggcgtaggtgtcgagcaggcggccaaggccggtggccatgaggtcagcgtgccgttcaccccgggccgcaccgatgccagccaggaacagaccgacgtcgaatcgttcgcggtgctcgagccggtcgccgatggcttccgcaattacctgaagggcgcctacagcgtgcccggggaggcgctgctgatcgacaaggcgcagctgcttacgctgaccgcgccggagatgaccgtgctggtcggcggcctgcgcgtgctcggtgccaatgccgatggtggcaagcacggcgtgttcaccacgcgcccaggcacgctcagcaacgacttcttcgtcaacctgctggacatgggtacgcagtggaaggccaccggccgcgaaagctacgaaggccgtggccgcaccgacggcgctgtgcgctggaccggtacccgcgccgacctggtgttcggctcaaacgcggtgctgcgcgcattggccgaggtctatgccagcgccgatggcgagaagaagttcgtgcaggatttcatcgccgcctggacgcgggtgatggaactggaccgctacgacctgcacggttga

SEQ ID NO: 500410 - DNA, 240 bp, Stenotrophomonas maltophilia
atgcatcaacgactgcaggtggagcggaggttggcgctggccttgatcagcgctgtattggccgcatgttcgatggacgaccggctgggtgatacccagatccggccaaccgaccgtcccgagtgcctggtcggcagccagcgccaggacctggcctccggggtgcggccattgatcggcggcacaggctgccgcgccgacccggacaacccgcgtcccctcaacaagccactggagtag

SEQ ID NO: 500411 - DNA, 363 bp, Stenotrophomonas maltophilia
atgacggtaaacgcttgggacttcccaatcacgggagacagggtagttgaggcgttaagagataacttcagcacgaatgatatttggctgctatcgcatttggatgtcccttcgggagcggagtcaaaagcgaccttgggtcatcttcgagagcggatggtgaacaggccgttagaggtgtctacgggtgatctgtgcgatgcgcttgccggcgcgccgcaagtatgggtactggacatccggctatcatccgaccacgaagtccagctctacattgaagatggtgaggtatttgaggagagtctggacaggatggtcggaaccggaaatatcgctgggccgacagacccgggactgagatga

SEQ ID NO: 500412 - DNA, 342 bp, Stenotrophomonas maltophilia
atgagaggtttgatcttgctggcggcggggctgttgtccctcattggctgcagttcgccaccgggtctcggggtaagtttgagcaatgaatctggtgaggcgatctatcaggtcagattgcaggccggaggaagcacgtttggcaccgaccagttgccggcgggtgagaaggcgtctggcagtctggacgttgtcacggattcggcggcggaagttgtgtatcggcgatcacctcagtcggaggagatccattgcggcggggatgtttatgttgctgccggtgctcttcagacattggtcgttgtcgtgggcaaggatggatgcgcgttcaggatccagtag

SEQ ID NO: 500413 - DNA, 948 bp, Stenotrophomonas maltophilia
atggacgcaggaatgaggacgctgctgattcggaccgttgccggggccacgctgattctgggtgggctgttcaatcaggctgctgcggagacgattacctatatccacaccgatgcgttagggtcaccggtcgctgagaccgactcggctggcatcgttatccgacgtaccacctatgagccatatggtgctgtggttggtggatccgttgctgatgggcctggttataccgggcatgtgaccgatgcctcgacaggcttgagctacatgcagcaacggtacatggattcacagttgggtgtgtttctaagtgtggatcctgtgacggcctatggggggactatggcgcagttcaacaggtacaggtatggaaatggaagtccgtatcgattcgttgacccagatggacgtatcggatgcactggaaccagaatccaaggcgtctgcgattctggcggtgtcgcgggtttgcgaacgtccgcgcgaagccctgtcgacgataagcgagaaactggcgctccgaggatggcaatatccaatgcatcatccagggagtacaaggaatccgattcaaatggcgagaaaaagcagatcgtgaatgcaatcggtctgctgcccacgtggaaagccaagtctgcagccgacagagcactggctgcggcggtggagtcaggcctcccagggcagcacaatggcaagggagacgcatttcgacattgtctttggtcatgtgacatggcgaacacaattggtcagaacagcgctaagtctgttggcgacatacacgaagcatggagtagcggcccaagacgcgaggtgcttatggaccttttcaataatgaagttggacgaaggtatagtggttctggacgcacgtgcgcggccgcatgcatgtcaggagttggagacgggtcgctcagcaccgacgtagaggagtggggaaaatga

SEQ ID NO: 500414 - DNA, 2991 bp, Stenotrophomonas maltophilia
atggcccctgattccattgtgaatgcattcatgtttcgggggctggtgcgctgggggagtttgcgccgcccggacgttgaactcctgacccgtgtgttgcgggtggagagagaacacatgaagcattcgaagttgagcctggccctggccgggctgatgggcatcaccgccatggcggcggttgatgacgtcatggcaatgaattatcacgtgcgggacgatcgcgtcttcctcagcggcggcgtgaccgtcgccgacgtggtggcgctgcccgcgctgctggccaaggcacaggctgaaggccgtccgatccgcgaagtcgtgctgcgcacatccaatggtggcgcgctgatcgccggcgagtggctgcaggcggtgatccgcacccagggcctggacaccatcgtgtccggccactgcatctcgtcctgctcgatcatgcagtccggtggcgtcaaccgttacctcggcggcgatctgccactggtcgactcggtgcagatccatgccgccagcagtggcggcaagatcacctatgcgccgtcagcgcgcatgacccagatctacacaggcaactacggcggcgggatggatgcgggcctgttgcacaaggcgatgtatgaagtggttcaacccaatggcctgctggtattccgcgacccggcgcgcaccacgggtacgtcggtcaccttcgatccggatggcagcggcagcaagctggagtcgttcccgggccaggacatccgcggcaacaacatcatcaacacggcaggctatcgcgatccgggcgacaccctccgtgtcaccagcaacgtcagcggcgacatcaacccgggctacctgcgcaccgcgcgccagctgcaggccttcgtcgacgacgatttcgcgcgctggaataccgactgggccagcacctacatcaactacgcggtgagcctgtacaacgtctccacgcgggggccgaacggcatcggcacgcagtcgctgcaacagctgctcgccgatcccgacctccaggaagagctgcgcggccagttgcggctggccgatctggatgcgtccaccctgggcagttcggcgggcgtgatccgtgtcagcaacggcgccacctggcgcaccgccgaaaccaccggcgccgatttcattctggtggacaacggcaccatcgcactggagggtggtgcgctgcgcacccccgaactgcgggtgatgccgggcagcatcgtggtcggccacggtgatatcgcatcggtcggcaccgacagcgatgcgttgctggatggcaccggcccgtcctaccgcgaggatggcttcaaccgcctgcgcgtgttcggcacgttgatgccgcgtggcggtgatctggtgacccacggctacgtcaacatcatgcccggcgggcaggtgctgttcgatgttaccgaagcgggtggtgccggcagtggccgcctgcgcgtcggcagcttctacgatggcggcaccgaggagggcgcgctggtgatcgcgcagggcgcgcacctggcgttgaacgtcgcccagggcttctatgccggcacctaccgtcgcgacctggtggaaggaccgatctaccaggggggcttccaggatgccgtgcggctgggcgatgccggctacagcgccagcatcacggccggtgaagtgttccgcccgcgccacaattcgctgctcagcttcaacgtcaaccagaccgccgatggcctgtggttgactgccaatccaggcttcgaccagctgggcctgttcaccaacggcacctccggcgacggcctggggcgcgcgctggccgctgcatcggaccgccaggacagcggcctgaagtcgttgctcggcgcgctgcagttcgctgaccgtgatgtgatcgcacagcaggctggcgccctgcgcggtgacgcgcacgccagcctgcgcctggccgacaatgcactgatcggcagcatcggcaacgtcgtgcagcagcaccaggcagcgatgcgcagtggcggcgatgcagacgggttggcttcgcaggcggcgcagtcggtctcagcgcagccgggcatgcgccatggcagcctgttcaatcagctggccatgcatctggtcgagccggcgggcgaggctgctggcgacagccgcgtggcggggcgcagccatggcctgtgggcacgcggtttcgccagccatggccgcatcgatgccgacggcggcgtggccggcctgagccacaacatcggtggcatcgtggtcggtgccgacacccgcgtggccgatgaccgcgtcacccttggcgtcagcgtggccgcggccgacatgtcgaccaaggccagcgatggctccggtttcagtggcgacgtacgcgcgctggatgtgggcggctatctggatgcgacctattcgcggggctatctgtcggcggccgtgcgctacaccgacctgcggcatgacacccgccgcagcctttcggccatcgatggcctgcaacagccgctgcgcgcccgatacagcaacgatgcgatctcggcgcgagtcgaacacgcgttctccttcaccaccggcaagggactggtgatccagccgctgctgccggtggtggactacgcacggacctcggccacccgtttcaatgaagggcagggcgccggtgcgctgctcggccgcagcggcagcctggagagcattcgtgtgggtgccggcctgcagctgttcaagaccttcgagggcaacaacggcgagcgcatcaccccgcgtgcccgcgtggtctggcagaaggaactgggtgacacccaggcgcgctacagcaccggctttgctgcggccccggacctagtgtttggtgccagcagccaggccgtgggtgagcaggtgctggcctggaacctgggcgtgaccagtcgtgccagcgagcgcctgtcgatcatggccgactacgtgggtgagcgccgcgacgggcagatccagaacggcgtgatgctgggcctgggctatcggttctaa

SEQ ID NO: 500415 - DNA, 708 bp, Stenotrophomonas maltophilia
atgaagcaacccccctcgacgcggctggtattttcgatggtgctgctgttgctggccggcgtcgccgttgccggcggggcactgcagacccttgccgaaacgatgggccatccggtgcaggatgaccgcgcaactacgccgatcaccacgccaccaccgcgcgagcggcctgcttcgctcgcaccgattcccgaaccgcggtcgatgccgatgcccgaacgcagcaaccgcttgttcgatgcggactacctgctggccgcccgccaggcactggaacagatgccagccctggccgggcaccggttgatggtgttccacagcatccacttctacgatgacggccgcatcaatctggacctggtcgatccgcagcaacccacgcacgtggacagctaccacttcgagcacggccagtggcgcaagggcgagccggtcgatccgcagcgcttcgcgcccaccatcaccctgcgccgcagcagcacggcgctggccaacattgatttcgaggcggtgccacgcgtcgcccaggcgctgcaggcgcagcgcaacgccctgatggccacgccgggtgacgtcggccacgtctatgtgatcgtgcgcaagggtggcaagctggtgtggctgccggatgaagtcgccggtgatcgccagtccgtgcgactctcgttcgatgcacagggccgttccggcaacgcgagcctccaatag

SEQ ID NO: 500416 - DNA, 1884 bp, Stenotrophomonas maltophilia
atgaagacccgagccctggcgatgtcgttgctgttcgcgctggccgccacgcccgcgctggcgcaggcctcgccatcgggtgatgccgcagccccaggactgctgcgcatcgatgtggatgcgcgtgacctggcccggcgcatcttcaaggtgactgccaccgtgccggccaagcccggcccgatgaccctgctgtacccgcagtggattcccggcaaccattcacccactggcccgatcgacaaactggccggcctgcgtgtcaccgccaacggcaagccgctggcctggcagcgcgaccagtacaacgtctatgcgttcaaggtggacgtgcccgagggcgtcagcgagatcgtcgcccacttcgatttcctgtcctcgcaggggggcagccaggggcgggtggtgatgaccccggagatgctcaacctgcagtggaatgccaactcgctgtatccggccggcgtcgatgcacgcgacctgcaggcgcaggccagcgtgaccctgcccaagggctggtcgtttgccactgcgctggaaaccgcgcgccgcgacggcgataccgtggtgttcaagccgatctcgtatgaccatctggtcgattcgccgttgtttgctggcgagcactaccagcgcatcgatctcgatccgggcgcgaaggtgccggtgcacctcaatgtgtttgccgacgaagccaagtcgctgaagccgagcgaggcgcagatcatgatgcaccgcgcgctggtgcagcaggcggacaagctctacggtgcgcgtcactacaaccactatgaattcctgctggcgttgaccgaccgtcttggtggcatcggcctggagcatcaccgctccagcgagaacagcgccgacccgggttacttcaccgagtgggacgacaacgcctggatgcgcgatctgctgccgcacgagtacacccattcctggaacggcaaataccgccgtggcgctgacctggctaccgccaacttcaacacgccgatgggtgacagcctgctgtgggtatacgaggggcagacccagttctgggggcaggtgttggcggcgcgctctgggctgtggtcggtcgcgcaggcacgcgacatgctggccaatgtggccgcgacctatgatcgcggccgcccgggcctggcgtggcggccgttgcaggacaccaccaacgacccgaccatcgcccagcgccgcacgttgccgtaccgcaactaccagatgagcgaagactattactccggtggccagatgctgtggctggaagtggagggcaagctgcgcgcgctgagcggcaaccgtcgcagcctggatgacttcgcgcgtgcgttcttcggcgtcggcaacggcgactgggacgtcaacccgtacaccttcgacgacgtagtggcgaccttgaacggcatcgcgcgctacgactgggcgacgttcctgcgcgggcgcctggacggccacggttcgttgaccggggggctggaactggcgggctggaagctggtctaccgcaataccccgaacgacgcctacaaggcacaggagaaacgcgccaaggcggcgttgctggcgtactcgctgggcgcgaccgtgctcgacagcggcgtggtcggcgacgtgatctgggacagcccggccttcaacgccggtcttgcacccggcatgaaggtgatcgcggttggcgggcgcgagtacagcagccagcgcttgaaggatgcggtggcgacggcggccaaggacaaggcgccgatcgtgctgctggtgaagcagttcgatcggatcgacacgatgaacatcgactaccacggtggcctgcagtatccggtgctggagcgcattgccggcaagcctgaccgtctggcggatctgtggaaggcgcgatga

SEQ ID NO: 500417 - DNA, 1209 bp, Stenotrophomonas maltophilia
atgaacgccaaacccctgatcctcgccctggccctgctctgcggcgccaccgtccccgcctttgccacgtcccccgcgatgactgagaagccgtccactgcgctgcgcctggccacctacaacacctcgctgtactccgacgacgccggtggcctgatcaaggagctggagggcgacagcgagcacgcacgcaagatcgccgccgtgctgcagcaggtgcgcccggacctggtgctgctgaacgaattcgatttcgacgatgcccatcgcgccgccgacctgttccagaagcgctacctggaagtcgcccagcccggcggcggcaagccgctgcactttgcctaccgctacctggcgccggtcaacacaggtgtgcccagcggcctggacctggacaacaacggcgtggtcggcggcgaaggccgcggccgtggcaatgatgcgtggggctacggcctgcacccgggccagtacggcatgctggtgctgtcgcgctacccgatcgatgaaaccaaggtacgcagcttccagctgttgaagtggagcgcgatgcccggtgcgatccgcccggtcgacccgcgtaccggccaaagcttctacaacgatcatgtgtggtcgcagctgcgcctgtcgtcgaagtcgcattgggacgtaccggtgaagaccccgggcggcgtggtccacgcgctggtctcgcatccgaccccgccggtgttcgacggcccggaaaagcgcaacgcggcacgtaaccacgacgaactgcgcctgtggcaggaatacctgtccaagggtgagaagccctggctgtgcgacgacaagggccagtgtggcggcctggcgcaggacgcgcgcttcgtgatccttggcgatctgaacaacgacccggtcgatggcgatggccgccacgaggcgatcgtcgagctgatcgataacgcgcgcgtgctgcgctaccccaccccgcgcagcgtcggcggcgagcagaccagcctggcctatgcggccaagggcatcgagcgcaagggcgcgccgttccacgccaccggcgatttcgggccgaagtccggcaccatgcgcctggactacgtgctgccctcgaccggcttcgaatacgtgggcagcggcatcttctggctggccaatgaaagcccggaagcgaagatcgccgacggcagcgaccaccatctggtgtgggtggacgtgaagccgtaa

SEQ ID NO: 500418 - DNA, 279 bp, Stenotrophomonas maltophilia
atgctcggctactgcaaccaaccaagcttagtagctctgccagtcaatctgagcgtcagccccgagacagcggtcctgccaagcctgctcccgacccagggaatcgatgaactcatcctcggaaagctgctcatatccgagctcgatttccatcttgttctctggatccagatgaaacgtcaaactcgtccagagtgcatggtgccattgcgcaaagagctgatgcatctccagaagcgctgcttccgcatcatctggaatttccagatagccgtatga

SEQ ID NO: 500419 - DNA, 708 bp, Stenotrophomonas maltophilia
atggcgcccgttccggtgctgtccgccttcgcgaggcaccgtccccccaagcaatacaaggcagtgaatcccatgttctcggtcatctccgccagcaccggcctcggtgcctggttctctggtgcagccaccggcatcggcctgttcgccgtggtcggcgcccagagcgccttcattctgcgccagggcatcctgcgcaagcacatcgtgccggtggtcgccacctgcgcggccatcgatgccatcttcatcttcgccagcgtggccggcctgcgcacgctcacctcggcgctgccgtggctgaccagcgccgtgctgtggaccggcgtggccttcctggcctggtatgcgatgaagtcggcacgccgtgcgatcgcgggtggcggtggcatgggcgaggctgacagcgacgacggcagccgccgcgcggtgctgatggccgcggtcggcttctcgctgatcaatccgcacttctggctggacatgatggtgatcggctcgatcgccgagaacttcggcaacgcccgcatggccttcgccgccggtgtggtcaccgccagctgcctgtggctgaccgcgcagggcctcggggcccgcctgctggcgccgctgttcaccaagcccggcacctggcgcgtgctcgacggcaccatcgccgtgatcctcagcatcctggccctcatgttggcggtgcgcggggtccactga

SEQ ID NO: 500420 - DNA, 321 bp, Stenotrophomonas maltophilia
atgctggtggtaaccctggtcctggtcgccctggtattgggcttgaacgtcgtcgccaccttcgtggtgctggggcgcgaagaggtgtcggcgggcggtcgcacggtgcagctgctgctggtctggctgctgccgctggtcggcgccatcctgtgcctggcggtggccacggccgatggctcgggcagccggggggatggcggcgcaagctacgacagctcaggtggctactcaggtgacagccacagccatcacagccacagcagctccgactgcagcagtgatggcggtgggggggacggcggcagctgcggcgattga

SEQ ID NO: 500421 - DNA, 183 bp, Stenotrophomonas maltophilia
atgattggcctggataagcacgcacgccctaaaggcatggagctgttcgagcttagacccgttatcgttggtggtgatccggtcagccctgagaacaaagcctggttgacgagagagcagcattttgaggctgtgcgctactggaataggattgtcagaagtctgcgtgatgggccgaagtag

SEQ ID NO: 500422 - DNA, 1053 bp, Stenotrophomonas maltophilia
atgccattcttcaccgattcggcggaaggcgcggtcgaaggcattggcgcggcacgtcgcatcggctggatgcgtttcgtcggcaatgcactgggggcaatccccatcgcttcgatcatcctcgagcgccacgatgggccgctggcgtgggtcctgctgctgctcaacgcgctggcgtggcctgcgctggcattgatgctgacccagcgctccggccagcccgcgctcgtccagttccgctgcatggtggccgactcctttttcggtggtggctggatcgccttcatggcgttgagcgcggtgcccagtgcactgttcgccgcactgctggtggccgacaagatcgctgccggtggcgttcgcctggcgatgcgcgccacgctggccctgatgctgggcttcgctctcacctggtgggtgctcggcttcccttaccagccggtcacctcgcagcgcacgatcgtgctgagtgtcccgttcctgttcgtgtatggcatcggcctgagcattctcagctggcagctggcgcgccgggtcaaatcgcagaaccgccagctgcagcgtctcagccggatggacccgctggtcgagctggccaaccgtggcttcctgatcctgcgtgcgcagcaggcgctggaccgggcacagggccagggcgggtttgcctgcctgctgatgctcgatgtggacgacttcaagcgcatcaatgactcgcatggccaccgcgccggtgacgaggtgctgcggcatatcgcggcgacattgcgcaccgttgcccggcccggtgatacgcccgcgcgcctggggggcgatgagttcgtcgtgctgctgcgcgactgcgcgcccgtcgatgcgatgcacgtggccgagcgggtgcgcctgcacctgctcgaggccgcgcggcaggccacgccgggtgtggaattcagcgtcagtatcggcattgcggccacgccgcgtggcggcagtgtcgaggactggttggcactggccgaccgcgcgctgtaccacgccaagcgccagggcaagaacaccgccagctacggcgagtga

SEQ ID NO: 500423 - DNA, 864 bp, Stenotrophomonas maltophilia
atgaacatccctgtccgtagaactgcaatcctcgtcctgctgctcgccgccctgcccgccttcgcaggaaacacagccggtgcgcagaagcccatcgccgtgcagatgtacacgctgcgcaacgccggcccgctcgaccagcagctgaagatcgtccacgacgcgggcgtgcgtgcggtggagaccgtcggtacgcagaatgcaagcgctgcggaactgaaacagttgctggaccgttactcgatcaaagcggtttcgtcgcacgttcagctggccgagctgcgcgacaacctggatgccgtggtggccttcaaccgctcgattggcaacagcacgctggtggtgccctacctggaccagaaggaccgtccgcgcgatgccgccggctggaccgcattgggccgggagctgggccggattgccaggcaggtgcgtggcaaggggatgcagctggcctaccacaaccacgacttcgagctggtcgacttcaatggcaggaccggactggagctgctgttcgacgccgccggccccgagctgcagaccgaactggacctggcctgggtcgcgcgcgcgggcctggacccggccgtgatgcttggcaagttccgcggccacatgtttgcggtacacgccaaggacaatgcgcccaagggccaggccgaagacgaaggtggattcgctgcggtcggccagggcgtgctggactgggacgcgatcctgccggccgccgccaccgctggcgtgcagtggtacatcgtcgaacacgaccagccacgcgacccggccaaggtcatccaggccggcgcagactacctgcgtgaacacctgaccaccaacccgcccacccgtgcccaccgctga

SEQ ID NO: 500424 - DNA, 534 bp, Stenotrophomonas maltophilia
gtgtgcaccttcattaccctgttcctgcccgcatccttatcgcacattgaagccgccgcgatcatgcagcgcagtggccggcgcctgttcgcgcaggattcgcccagcctgcagtcagcggtcgggcccggttggcagccgtggttgagtgccgtgcactgcgattgcggtaccgcgctggcctcgtcgcgggccgagcgggagtggaagggcgatgccgaacgctggcggaagaagggctggagcgaagcgaagatcacgcgcgcgttggcggcgcagttggcgcggcatgaactggatcagcaggcacgccgcgatgaagccctggacgatgccggccagtggttgcagcgtatcgatgcgctgttgcaggctggggccgcgcgcatcggcctgctggtgcgcgactacgacggttcggtgggtgcccggcagccgaagccgccggaacgtcactggccgcgtggccagctggccgcagcggatctgctggcgttcgagccgggcacgttgcattggatcgagcgtgggtga

SEQ ID NO: 500425 - DNA, 540 bp, Stenotrophomonas maltophilia
atgcgcaggataatgttgctgatcgcccccctggtgctgctgggctgttcacgcccggcagcacagacgaccggcgacatcgcggcagcgtccgctcccgtcgctgctaccgcagccgtggacacccgcaccggccccgatcccgcagcagtgcaggcaagtgaaatgccggtgctgtccgctgtcgccgacgatgccgagccgccatcgacgatgctcaaccgctacgtagcggcattgctcaaccgcgaccgcgccgccagcgatgccgcctggacgatcccgcccagcgacccgcggcatgcggacgacgccgcgctgcggcagctgcaggacctgcgcaccctgcgcctgcacagcgatcccccggtcgcccgcgacgaccggcagccaccgcagctgcttgaagtgccggtgcagatccgcgcggtcaccgccaacggtacattccgcttcggtggctggtaccgcgtgcaacccagcagcgacggcagcgcctggcagatccagtcggcgcaactgcgtccaatgctggactga

SEQ ID NO: 500426 - DNA, 417 bp, Stenotrophomonas maltophilia
atgaaggccctgttcgccctggccctgctgctcggtaccgccgcgccggcatgggcggccagcgccgacgccgacgggtgcaatcctgaaggcacgcagatggagctcaacgcctgcgccgaccgcgatttccgcaaggccgacgccgagctcaacgcggtctaccggcaggtgctggccaagcttgccgggcagccggtggcactggcccggctgaaggacgcgcagcgcctgtgggtgcagctgcgtgatgccgatctggaggcgcgctacccggtcggcaaggacgagaatccgcgcgtcctgtacggctcgatgtacccgatgctgtatctgcacgccaagtccagcctgaccgatacgcgcaccgcctacctgcgcagcgaattcctggagcgcagcgaatacgacctgtaa

SEQ ID NO: 500427 - DNA, 489 bp, Stenotrophomonas maltophilia
atggacgcaacgccccccttggcacccaccccggtaccgccgccgttggcggccgtgccggtcttcagcaggcaggacgctgaccacctgcgcgcgctgtccatcgcgcactacgtgttcggtggcctgatcgcgctgctctcgctgtttttcattctgtacatcgtgctcggcatcagtgcgctgagcggccatctgccgatgaactccgggggccagccctcgtcgccggccgaacagcgcctgttcggctgggtgttcacggtgctggggaccgtgttcgtcgccggtggcctgggcatggccgcattcgtcatccaggccggacgctgcctggcccagcgtcgtcgccacctactgtgcctgatcgtggccggcctgctctgcctgtgcgcgccgctgggcaccgttctgggagtattcaccctggttacgctgctgcgcccgcaggtcaaggccgccttcgatgcaagtggtgcaacgacatga

SEQ ID NO: 500428 - DNA, 1386 bp, Stenotrophomonas maltophilia
atgctggcaaacatctacatcagaaactttaggtcgattaaggaaattgttttccctattaagaatgggctaaacgtcattgttggatccaacgggtccgggaaaactaatatccttcatgctctaaaattcctttcgaacatcgttacgagtggggcctctttagcaatggcgaaggccggtggtccatcccgcaattttcgtcgaggtgagaattcaatagaattctctgtgcattatgtcttagaccattctctgttcaagggtaagcaggcaacattttttcttttctgggatgtggttgtctcgcagtctgaagaaggcggctttgtacacgttagaaaggaagtggtgcggattgttgctctatcttctgagggcaaagaggatgtcttgaaggctgaggttactcgaacttcagcaggcgctgtgcggcctaagtttgaaattgtttcggaagatctgataacaaaaagactatttgaatccagctactgggttggtagttctttcaagaagtctgaggttgtttcgactgtttctgagaagtttcaagaggttctgcaggaagcaaagaaaggcgctcaggatgcgtcatttattgctcaggcgtctttttgtcatgcgaattttaggcgcttctttcgcgatatttcatcattggatgaatacaatatatctccggatgttgcccgccaagcggtcgatccgttgccagtagtcagaatggggccggacggtggtggtgttagcgaggtggtgggagcacttgagaatagacagttttcaagaataagaagaggcggggctccatatccgggtaccacttattactatgctcatcactggtctgagtactcatctcctctggggcagaaaaataatccacttcccgtaattttggagcacgtacaggctgccattccctctatcgattccattggaactcagatagatccatcatcgggaaggagatttgtcgtattcggttgcggggggagtttgtttcgcccgcaggaaatgtctgatggaacctttaaatggctttgcctgctggtggcgctcttggttccgaccacaagggtggtcctacttgaagagccggaaaattttatgcatccgtggatgcagcagagattcatatcactcgcaaggcagcaggctagctctgacaatacatcggtagtgctatcgactcacagtgtaacagtgctgaattcattggttgtggatgagctcagggtggttcaccaagttgatggtgagacagtgatgaactcggtggaaaataaggaagagatagagaggattctctctgaatctacctttggcctcggggatatttggataagtggcgagtttggtggtgtgaccggggggttttga

SEQ ID NO: 500429 - DNA, 1518 bp, Stenotrophomonas maltophilia
atggccccggtttcgatgctccctgtacctgcccagacgccgcaacgctggacgctgcttgcggtttgcctggccgcgctggcgctgccgttgtccttcaccgccggcgccgtcgcggtgccggtgctgtcccgctcctcagtggcatcgcccactgcgctggcctgggtgaccaacgccttcatgctcaccttcggcagcctgctgctcgctgccggtggcttggctgatcgccatggccgacggcggatgttcctgctgggcacggccggcttcaccgtcgcgacggccgctgtatgcctgtcgcctacgctgctgtggctggatctggcgcgcgctctgcagggcgttgccgctgccgcagcgctggcctcgggcaccgctgcgctggcgcagggctggcagggaccgaggcgtgcccgtgtcttcgccctgctgggcacgacattcggtgcgggcctggcgctggggccgctgctcgcgggcctgctgctgcaggcgctgggctggcgcagcgtgttcgctgcgggcggtgtgctgacgttggcggcgttcgcactggccgcgcgcgcgttgcccgaaagccggggcgagcgcggacggctggacatcgccggcatgctgggcttcagcctgatgctggcggcattgaccctggccctgctgtggctgggcgagtacggcctgcacgccggtcgcgtgcagctggcgctgttggcgacgctgctgttgggcggcgcgttcgtctgtaccgaacggctgcatccttccccgttgctggacctctcactgttctggcaaccggcgtttctcggcgtccagctgctgccggtggcgacctgcctgggctacgtggtgctgctggtcgtgttgcctctgcaactgctgggcgtgcatggccagagcacgacgctggtgggactgcagatgctggcgctgtccgcgccgatgctggtgctgccgatgctggctgcgcgctgggcggagcgcgttggaagtgcgcggctgtgcacgctgggactgctggtctgtgcctctggcctgtacctgttgtcgcgccacgcatcgcagccgtcgcccttgcagtgggtgccgttgctgatgctggtcggtgcagggacggccttgccatggggcctgatggatgggctgtcggtgagcgtggtgccggtacagcgtgcgggcatggccgccggcatcttcggaaccgtgcgggtagcgggcgaaggcatcgccctggccgcagtgacggcgctgctggcgatgctggccgaccagcagctgcatggggcatcgccctcgtcgttggcacgcgccggtgcctatctggcgagcgggtcccaagaccaggcggcggcactgctgccggcgatgagcggtgagcagctgcagcaggtcagcgccaaggcgctggcaacactgctgcgtgtactggcactgctgacggctgtgtgtgctgtgttgttgcacctgttgctgcggaaacgcaaaggcacgttggccgagcatacggcgtag

SEQ ID NO: 500430 - DNA, 699 bp, Stenotrophomonas maltophilia
atgaccccgattctcttctacggcgtgccctcgggctgctcgttcggctccatcgttgcgctggagtggctgcgccagccgtatcacctgtgccgcatcgacatgcccggccaggtgcagggcgaggactaccgccgcctcaatccactgggcgaaaccccgacgctgcgaaccgcgcagggcgagctgctcagcgagagcctggccatcctcaaccacctggccgccaagggcatcgcacaggggctgggcttcgcacagggcacctccagcttcgatcgcctcaaccatcggctggcctatctcaacaccagcttcttcggtgcctacgccccgctctggcacgcgctggaacacgccgagggcgatgacggcaaggcgctgcgtgcctatggcaccaccaaggtgcgccaggcccaccaggcgctggagcagatgctcagcacaggcccgtggctgctgggcgagcagcgcagcttcgccgacgcctacttcgccggcatcggccgctggaacgattaccaccaggtggtcgaccgccgcgagttccccagggtgcagcagctgttcgagcgcctgcaggacgacgccggcgtgcagttcgcccacgccatcgaagcacagcggccggctaccagcagcggtggcttcctcggcgaggtgcggctggaagacgtgcttgaggccgcggcggcctga

SEQ ID NO: 500431 - DNA, 534 bp, Stenotrophomonas maltophilia
atggacgccgaacacctggagtacttcaaggccgcactggaaggccgcgcaaccgttggctggaacgtctggttcgccgccaaccagcacgcgctggcacaacaactgagccgcccggcactgctgcgcttgaagttcagcacactggatgaagccgaacgcctgctcgccgaagccggcatcgtgccccgcagcacagtgggcaagcgctacgaaatgtactgcgcgcagttctcgccggacgtggtggacgcaaacggtcgcccgctaccggccctctggcgcgcggcgcacggcggcgccatcggcctgctggccgatggtgggcaggaggccggccaggcgaagctgctcgcggagtccgccgcgtccgtaagatctcaagccgggctcttacgccgcaacactctgttttcgtgtctccgagtaatattgatcgcctgcgccaatcccttccttagactactggaagcgtcgctcacagtctcggtagctatggcgcgaaatggatcaggtaaatggcgaatccgctga

SEQ ID NO: 500432 - DNA, 1962 bp, Stenotrophomonas maltophilia
atgaagagcttggatgagtacctagattcttatctggacggaagttctgatccgggcaccgccgtgatgctgattggtcactggggttcggggaagactcattacatacaaggctattttcgtcggcgcgctgagcagagcgcggcgtcagaagcgcttttaaactcgactccgcgaaaatggtggcaccttcccttcctgaagagtgactctagagtcaagccggctgctacctcgcccacccagcacctctacgctagctttttcggtgcagatagtgctgcggcgatctctgaccaatttctttcgcaactatatccggtgttgaattctacgctcggcaaagtgctgggggctgcggcgattcgcgtctcaaacataggggtccaggttgccacagccggagcggtagctgacgcggcccgcgaagaagatgcaaaagcaattacgcgatggcttagtaatcccaaggggcgcgtgctcgtcttcgatgatcttgagcgcgcaggtatgccaatcgaaatgtgcctttcgataatcaatagctatgtagagcgagatggtctcaaggtgatcgtgttggcaaacgatgcagagattaatgccgatagcgtctatggccgttggaaagagaaggccataggaaagacagttaaggtgatctctgatcccggtgctgtgttggattcgctgctcttggaactagacgaagggcctgtaaagacggctgtgaaggatgagcgcgctgcgctgcttgccgtcatggaggtgtccaaactcgtcaactaccgtagcgtgcggagtttagtttttgatgcgcagcgacttctgaaactgctcgatcggcgcctccgcgattctaaggctggggtgctggaattgctgaagttctcaatcgctttgggtggagagcttcgcgcgggaaggcttgagcctgaggaagttgagatcgtacagcaatgtttcgcaattagagtcaaagacaaaagcaaaagaaccgagagagatctatatattttggaccttgaggaaaggtttgcatcggtactggcgcttgaatctgttgtacctgcgtcgggacttgtctctttttggcgcgttggcactctggatgttgaagctgctaatgcagctatccagcagaatgcgctagtagtgggcgttcaggcgcagccaccctggcaaagactgtgggaactacgacggctatcaattagccgatataacgaggctcgggtggacctcttgaagtcgatagatcaaaggatgttgtacgttcagggtgaaattctgcacgtggtcgggattgcattgacgctggaggacttcggcgtgggcctatttcctcagttcaaagaggtcaatctttgggttcagcagtacgcgtcagaccccgtcgtttttgatcggcttgagcgcagcgtggggtggctcgatggagccgattcctacgctggacttggcttccacaagcgccgagatccaaggttcatgagagcatttgagttgcttgaggagctagtggatcgggctgagcagaagcgcctattggcagacgtgcctgtgctgctagcgcagattcggaatagggactattcaaacatctactcgttcggtgcgcctggaagcgtggatgggaagccatggcttcatctcgtaggttccggcgagctggccgatctgcttttgcatgacggagtgatgcaatcgccgctcttgtcactcttgatcaagcgctactccgaagactcgctggcaaagcttcgccttgaatggcgatcactgcgtttgttgcgagagaccttgcgtcagcggattcgccatttacctgatccatttcgcgccatagctaccgagactgtgagcgacgcttccagtagtctaaggaagggattggcgcaggcgatcaatattactcggagacacgaaaacagagtgttgcggcgtaagagcccggcttga

SEQ ID NO: 500433 - DNA, 624 bp, Stenotrophomonas maltophilia
atgtccctctgctacgcggtgctcctcgatgctggatttcttaagtatcaattgggcaagcctggtcatccgatcgaggcgtctgatattgagcagttcatcgagcgcgtgaagaatcgccctgagctgacgggcatgctccttcaccgaatttatttctatgattctaagcccctcgaaggagcggcggtaaaccctttagatggctcagccatcgatttcggctctagtgatacagcgtcgcgcaatcgcagcctgcatgcgcatgttgcgcgcctccccttcttcagcatgcgcttcggcgaactctcaatggaaggttgggggctgaaaaagcgcttcttggataaacatgctggtgaaggggcgatatctgttagtgctgtcgatctccgcccggttgttaaacagaagggcgtggatatgaggatcggactcgatatcgctagtctcactttgaagaagcacgttgccatgattgtgttggcaacaggcgatagtgacttcgtgccagcaatgaaatttgctcgacgcgaaggcgcacagatcatgttgattgttcagcgacatggaattaaggaatcgcttcgagagcacgccgacattgtaattgatgatctatag

SEQ ID NO: 500434 - DNA, 795 bp, Stenotrophomonas maltophilia
atgtctagtttgatccagcagatgaaggatccgtacgaccgtaaagcgcggctcactcccgcgctgcttgtcgctgttccagtgctgatccctttagtttgtgtgtatggaccccggcatccagttctcgtggcggtcgtggggctgcttgcttcctgtggggtgatgtacgccctggctagtattgcgcgaggtcgagggaagaagcttgaagagcgattggttcagaggtggggggggatgcccactaccatcgccttgcgtcaccgtgataggtttttggacggcgtaacaacaaggcggtatcacgaacgcattgtgagcaagctgggaatcgatatgccaactgcagagcaggaggcaagtgatccagttgcggccgacgacgcctacacgggagcaacaagaaggttgcgggagcttaccaggggaaataaagccctgcttttgacagaaaatatcgcttacggctttcatcgtaatatgttggcgatgagagggccgggtgttacttcaagtgttatcgggctcttctacggcttggtcattgctagggtgatctcttttacccctcttgccatcaagcctgtcaatctggcggatcctggtttgcctgcgggtctgacgctggctgtctctgttcttcttctgctgagctggttgttctactttgatgaggataaggtcaggcgaatcggatttgtatatgcggagagacttctcgaatgccttgaaaccctgccagggaagcggggagggcgagtgagaaaggcttcaggcgaggcccaagaatag

SEQ ID NO: 500435 - DNA, 1131 bp, Stenotrophomonas maltophilia
atgcggttctcactattgagcttcatccattcagatctgatccaggggaaggacgacgtggctgatttcgtagagattgattttctcggtgtcgagacttcaaagagtggggatgcaattgcgctccgttattctattgatggattgacgcaaattcatgttgttgatggaggctacctcgataccggggataagctcgtcgagcatttgaagaaacactacggtgggacggtcattaatcatgtcgttttgacgcatcctgacagggatcacgctaatggattgcagcgggtccttgaacaatgcacggtgggaacgctgtggatgaataggccttggctctatgctgaagaactgatcagtaggtttgagacctacaattcagtggatgcgttacgaaggaagcttcgcgagttgtacagtgcgtcagcaaagctcgaagaaattgcgatgcaaaaaggtgtggaaatcaaggcgccattccagggcgctcagatcggtgcctttactgtattggcaccgacgaagtcacgctatctcgatctagtggtcgattccgagaaaactcctgaatctgccggggaaacggtgttggatgcggccctagaggggttggggcgtgtattcagagcagctaagaacttggtcttggccgcatggggggatgaatacttcccatctggaggaacaagcgccgaaaacgagatgagtgtcgtgcagacagcatcgatcaatggaaagcgcattcttctgacgggcgacaccgggagggatggattaaaagaggctgcagactacatcgaggctatcggcgttccgttgccgggcatatggggatttcaggtgccacaccacggcgggcgccgcaacgtaaacacggaactactagatcggtggttggggcagcggcttgctgaaatacctaagtcatatacgtggaacgccgtctgtagctctgctgcggctgatgaagatcatccccggaattcggtggtgcgtgccatgttgcaccgaggtgcgcattttgttaagaccgaaggtaaaaacgtctgcctttctagcggtattaagcgtgaaggttggagctcaatttcacagactccatatccgcccgatcaagagagggactga

SEQ ID NO: 500436 - DNA, 1098 bp, Stenotrophomonas maltophilia
atgacctgcgagatagtgaacgtcggaaagaggcgagacgggggaagccggtactggtgcctatcccatcatgcaaacgccaccgcaaagtatggcgtggcggcagaagaatgcgtggccgcgcatgacgaacccatttcggagagtgagtctcttgatcttgaggtcaaccgctacgtcggggggatagcactttgggggtcagtgcccgcgtcatacgacactaccaccctgcccaccgatagaggcatccatgtccatgccaggcgcttgggccgggactcagccaaggacatcgacaagacatatcgaaggcttaggatcccattcacgacagacttgctgtcctcagaatggtttgtcgtggatgagatcgacgcaatcaattacatggtgtctggggtcttcggcttcggaaccatcagtgtcaaatgcagccactgcggcttccctcacctggaccgcgactggttcgcagtccatcctcacaggaagcatcagtgccatggatgcggaagacagttctccgacttggaaatcgcgataggaaaccctctctcgcagttgaggaaccaccttgagccgggcaatcgatcccagatagctgcgccaagaagcatagagatacgccaacaggactacccaggagggatacagatctggggatcaaatcctgccattctctggacatcaacggctcctgaagaaaccggaatccatctacacgcgctgagcgaggaaggccaagagtggcccaagatagacgacacgtatgagtccgtcgtgatagatggcatcgaacttgatgccgagcaagtgcgcttctacatggcgcaaacagcgctgccacacatcgaaggacgcgtcgtggctctgtcatgcccgcagtgcaaagagcctcacttcgataaggggaagtgggcatatacgccccacattgaccacgaatgccatttctgcggagcgatcttccagaatccgtcgcagatcaagaagacgatatcgaacccgtttgtcgagacacgatcacgcctttccaagcatacgaatcgaattcttcgtgaagacaagctagggttgcgccccgaaaccatctag

SEQ ID NO: 500437 - DNA, 420 bp, Stenotrophomonas maltophilia
gtgagagatgaggcttcatcggctgccgaagttttggacttggagcttgccaagggatctttgacccttgctgacgacggattggtcacatattcggcatttctggcggcgaagaatgatatggggctcggtgatggcgagaccgagtgcatcctcattgcctccgccatccagtgccagatcgcttgtgatgacggccgggcccgcaaggcggctatcaagcggcttgggcatgagtcgcttgtgaccggctctttggggttgatgcaacgagcctgtagccaaggactgatctcaactgaagctgcgcatctcgcctatgaagagatgcgcaagctcggtggctatcttccacagatcgatgtggacttcttcgccaaagaagtgaccctgctagatggtttcggggcgcaaccctag

SEQ ID NO: 500438 - DNA, 1128 bp, Stenotrophomonas maltophilia
atggatattgcgcaacacatcgcagatcgcagtctcacggtcagtgatgtggcccgacgggcgaacctgcccgtttcccgtgttagcgagatcgtctcgggtgatgaggcatcgctgtcggaaatcagaaaaatatcaaaggcaatccgtgttccgctgagctcgattgggcggccggaatcgactgaggatcagagcacttccaagctcttgctgaggcagacgcttgatcagcgcgcaaggggcatgtcttcatctctgagcatcattggtgaccagctaaatgacatactctcgatagcgagaactcttccttccaatctcaattggctggagctgttcaggggactggctcccgatctcgaaaactcagagaactttgctgccatttttagacgggcgttcgcacagctggatgaccaagttccttttcttagtctggcaactaccttggaggagttgggggtctttgtctgctatggaagggatcctaaggtcgagggggtttcggcgattgtcgaaggccacgcactgatcctgcttgctcctcgaaccttcaaggcaaggatgctgttcactcttgctcacgaagtgggacatctcgttgcacgccatgacttgctaaagactgacttcgcaagattggacgaagaggtgggtggagacagagagacggctggctcggctgagcataggaatgaagagcgttttgccgatgccttcgccgcttctttgctgatgccccggaaagggttcttgaaggcgcttgaagcggttcgcactcactaccgggcaaaggggccgctcggggacgtggagatactgaccactgcaattttcttcggggtgagctttgaggttgccgcgcgccgttgcgaaggcttggggttgctggagccaggaggcgctagggcgctgtatcagaagatctcagacgagcatggaaatcctgagaagagagcgagagagctggaccttcgggaacgagaggagatacagatttcaacttcgcctaggctgcttgaggctgctgcgaagctcgtggatcgtgaggagctctctgccggtaaagccgctgagcttttgaacgtccccatctcccatgtcttcgccgctaactcgaagtag

SEQ ID NO: 500439 - DNA, 849 bp, Stenotrophomonas maltophilia
atgacatcgatccacctggtttcactctcttcgattcctaggaatatggcgaactggtggcttgaacattccccgactgtgcgcctttacctcggaggagtcgcatgtatgctcctgagcatcgcgctcttcctccatgaccccagatcgctggcttccgatgtcgccatgtatgcaggatgcacactgctcgcatctgctttcctaacggagtgctattactggaccgtcaagaggctcaactaccccctaatgaaagtggccatcaccgtattgggtgtcgtcaccctagcggcggcaacaggggtaagcaagatcacagtcaacgatgccacaggtcaagatccatcctatttcaccagcgcagtggcgctgctggtcccgctttcgtttgtcccagtcgccgctgccctcatcatcgtcctggggactttcggggtgatcatcggtcttatctggggactagcaaagctcggcacgacctcatccaaggtccgcgatctggatttggttatcactttgacaaggatcttctctggctttgtaatcgtcgcaatcgccagcgcacttctaaatagctcgtccttcatctacccatcaatgcggtgggtggcaagtcacagcgcactctttttcgacatgtatgaaggatccggatgctctgctgacgtgcgagaccgtgccgggcgtgtaaatgatgagcttgtagtcatcggtcgaatgacaaattcggggccgcaattcatgagggcgagctgccccttggggccacaaaacacgatccttgcgccctacccaccagaggcggagaagcgcatcgagagcgaaccaagacaggaccggaagtga

SEQ ID NO: 500440 - DNA, 504 bp, Stenotrophomonas maltophilia
atggtcatagcagcgcaagcttttacagagaaggccgtcagtgagctcaagtcaggcagccttttcctcttccggcagcaatgggccttcatgggagagcggcagtccaagggggctgaaggctcggacaaagaaagagtcttcgtgcttcttcagggcgagcgtgcaggaaccgttctcaaagcccaggactcggcatctacttgctttacccttgccgaaccgtttggttggttcgcagcggtggatattggcgttccaccccttttagagggcgagctagctggctctttggtgatttcgcccgaaggtccggtgctcgtggcaactcagaaggatcgatgggatgatactgaacatctcgccttcagcttggttggtgggcagcatgtcaagcttggcgttgacagggccagacggtttttgcagtggagcatcgagctctgccagacaggaaggccgtatcagagtctgggccggattctagatgtgaggatttcctaa

SEQ ID NO: 500441 - DNA, 1122 bp, Stenotrophomonas maltophilia
atgaaggttttcattagttcgctgatttccgggatggaagccgagcgagccgcagtgaagcgtgcagtcgagaggctggggcacgcccccatcatggcggaggacttcggcgctaggcctagctcaccccaggtcgcttgccttggcggagtgcgagagtctgatcttgtgatcctgatcttggggtctcgctacggtgtgccccaggcgggcggggtctcggccactcacgaagaaattctggaagcgcgaaaccggaagcccatccttgtcttcctgcagggaggtgcggagccggaaggcagccaggttgctttgatcaatgaagtcggaggttgggagggagggcttttccgacaggaatttacgtccccagaggacttggaagacaaggtgacccgcgccattcatcggcacgagctggcgcatgccgtagcgccactgaatcctgaagagttgaaggctcgggcgactaggctccttcctgcgctggagagggggtatggggcgaatacgcttcagctggcaatagccagcggtcccgtctcagccatccttcggcctgcagagatggaagccccctccctgattgcggagattcagcagagcgctctctttggcgttcacccgatttttgatcgagcggccggtagccgatctcggttggagggtgaagcgctcgttgtagatcaggaggacggccacaggtctggggcatcggtccgcctttggccaaacggtgatctgttgatcagtcttcccgtgccacctccggcccgggggatggggctgcccgtggtcttggaagaagacgtagctagcaaactggccagcgccgttggatatgcggcatggctgctttcgcggatcgatccaactgagagaatcacccacatcgtgccagccgttaggctcagtggggatggtggcggtgcttggcgcaccagggctgagcatgacgctagccctaattcggggcagttcccatggcgacaaggtgagcatgaggagcctgtattcttggctcccgcgcaccaagtcaggcaggtgctgtcgatggatgcacgtcgagtgatcgaggactttgtcgttctgctgaggcgacgctggaatcaggactga

SEQ ID NO: 500442 - DNA, 390 bp, Stenotrophomonas maltophilia
atgaccaagccgtcactcgattccattgcctccgctaaagccaagcttgctgaagagctgcgcaagctggaggagcaggaagttcaacttctccaggagcaggccgctgatgcctttgcagaggtcgccaacctcgtttctcagtacggtaagagcttctctgcgaagcagcgcgccgagatcgtcagcatgctcggggctgatgcgcccaagaggggagctgcggcgaagaaggaaatcgcgcccaagtattggcttccccacaccggcgagacctggaccggtcggggtaggacccctcgtgctttcgctgcttgggaagggacttctgcttacaccacttggaaggcttcccatccaaacgagaagttcccggctttccctggatga

SEQ ID NO: 500443 - DNA, 1392 bp, Stenotrophomonas maltophilia
atgaatgaagagctagaaaagagaattgaagactacgttcggcaaccctttggtctgctggaagttgggtgcatccgcattgggcgccacgaattcaaagacatccgcgtccaaggacgagaatctgcgatccaactgcaggaaatgctcaactccgcctcggatcgatccaggcgcaaccggctgcgaaaggacggcactcgatactactctgagatgccaatcggggcaccagcgcgcctgctgtcgtcagagatcgatgactacctccaatacatggaacacaggggcttgcgcagtcgaacaatagacgcaaatgcccggtctctagcactgctcatgatcgtgactggagacatcccggtatcaaggatcgacaccaagcacatccacaagttctggcagttgatgcaatgcgccccaccaagcctggcgactacaccgcgacttcagcagcttagtgccgatgagctaatcgagctcgggcggcagatgggcgcacctgtaccagcccgggcgacgctagagctacatcgtcgcttcctggccaccttcttcaatggcctagtgaaggctcaggctatcccgcattctcctctaagcgcattcccgtccatcaagaaagacctgatagaagagacagataggtctgaacgtctacttggcgacgacgatctgcagaagatcttcaatcctgacagcttcctgccgtgggccatgaagttcccgcatcgatggtggtgtccgatgatcggcctttacaccggggctcgcatcaacgaagtcgctcaactcaaagtcgccgacatcgtccaggagcagggcatgtggtgcatagccttccggaaaaccgttgatgccgaccttgccaacgcatcaggagcgagaagtcgccagacgctgaaaggaagatcagccatacgcaccatcccgatagccgagcccttactcgctgctggcttcctggactatgtagcggacatcaagtccacaggacaccctaggctctttcccaacctctcggctggtatcagtcggaagaccggggagacaaatgctcgatacagccaggcgctgcttattcaatatggcacctacctgaagcaactcggcttcccgaaaggcgtggggttccatgccttcagacacacactggcaacagcattggacaacctgggagtgcgtacggaggacgtagcgctgatcaccgggcactccgtcgtgaagacagcacccgtcctgcaggcatcctactatcacacgaagcccgactgcgttcgagctaggcagaaggcagcccttgatctctacaagccgccagtggaactgcctacatacaccagaggtcagttcagagaccggattggctggggcgccaagctgtatccatga

SEQ ID NO: 500444 - DNA, 1176 bp, Stenotrophomonas maltophilia
atgcgcatcagatacgtcatcccagtcattcggccgctgattgtgcccgatcactgggaaataccgcttcaaggtggacgccttcggcttttggagagtgctgggaatgtggtctccattgaggtggcattcgatggtcaacctgtcgagagggccccgcggtttagaagtgaggggggtggtttcaccttggtcaatgacgatggaggattggaacttgtcaaatccaagcttgcagacgcagttgcgtttctcaactgctatttcgacgtgtccatcgactgggatgaggcagaggcattctatgaggctgagtcgccagaagaggaaagcagtattgaggtgaagtcattcaaggctggaagacatgtgcctgttttgcctctcagcttcgatttgatagcaagggccatattctgcgcagagaaaaatcgtggtcctgcttttgaggcaacattggttgctacggcgcgccgagcgatgggcgagcagcgttacatcgactctttccgctattcgtttttgttgattgaggccatgtatggtggcgggcagttcaagtcagccagtctgaaggcagtcctgaaggcgagtagcgagttcagcgctatcgtgaaggacacgagtagccatattgctacctacgatgcgacgcggatagggggcttgccgaagcttctctccatcgccggggatgttgatagcttgattgatcacttggttgagcagcgtggcatcttttttcacagcaatgtgaaaaggaaggacgcatggagaccagaagaacagcgtggtgcacatgcgcttgcagcgttttcagcgttgattgctcaaggcatatccatgaaagcggctgaacagatgtatgcgcgtgagtttgaggttcagtatctcgatgttgcatctaaatcaggggccaagattgtgtatgtagtccgctacgactttattgccatcggggagtcttttgttaggactcaggaactaatcgtgaacatgcctgggactaagccaactccgtcagcagtattggaactgacgaagttgttcattaagcatttcgaggaaatggcgcctatgggtgatctccagagagctcgttgtgtgatccaggggacgaatcagccagtgttcgatatggcgtttaccgttagccctaaccacggcaaggaatag

SEQ ID NO: 500445 - DNA, 207 bp, Stenotrophomonas maltophilia
atggaatacctgaagcgcatgcttggtctctccttggcaccggaagacaaggcgttggttgagatgttgtccaaaagccgatatctacactcgatgcaggtagtaggtcgtggcacattggtgatcccgccggaggagatccgcaaatctccccgtcaccagaaggacttggcaacttgccaagctatcgttgaggcaaatcgttaa

SEQ ID NO: 500446 - DNA, 990 bp, Stenotrophomonas maltophilia
atggtggcggcgctagtattactagtgttggtcgcaggcttctatgcctgtcgccgccaccctatctattcctatcatttacatcgatacgaagggcaattcctttatctcaaaagtgctgagatgggggttagatgtgtgggtgccgcctttatcatttcttttctctggggttttcttccagatagatatgagcttggatgctatgtcatcaggctcgatgttcatacgtggctggtatcgtgggccaaaagtcatctttgggttgaggcaccactactctcaacaactggcacccttacccccaccaaaccgaatcgagattcagaaatagcgcagtggacttatacagtcggactgtcatttttgactctattcgtggcttgggcttgggggaggttcgccaagttaatcctatggctaaaaatcggccgctcaatgaccaagtcagaaggcggatctgcctggaaacgattctggggctggtcttctaaggcatatgcgattgggcagctattgaaagatagccctattgataaaatgctcttcgacttgtctgcaaccgacgaactcgccatgcttagcatgagcgataggaaggtctatattggaagaatatccaacttgggcgagccctctgaaacaggaggagtagatcaagatattctgatactcccctacatgagcggatatcgcgacaaggaccgcttaactgttgagtttaccacgcattacaatcatgtgggccaagagatatcattatcgcttcgccaaacagatattgtctcggtgacaaagttcgatgcaggcgcctacgaaatctggaaggacaagcatgtgtcgccagaagccaagccactaatagttgaactgagggatcttcccccaatacaggttcaggtgaatccagcacccacagaatctccagcggttaccattcgcaggatgatcagagagatggcaacgcgattttctccctggaggaaataa

SEQ ID NO: 500447 - DNA, 10890 bp, Stenotrophomonas maltophilia
atgaaccgcatttaccgtctggttttcaatcgtgcccttggggtaatgcaggttgcttcggaggtcgcccagaatcccgggggaagcgcggtcagcgcagggcgggtaccgcgattgcggacgcagcagctggcggcggcattggccgccacactggccagtggatcggcattcgcagcgtgcacgggtaccacgaccgtaaactgcgacagcaccaccaccatcaacaactactccaacgcgaccaacggcctcacgctgaacatcgccgcgggtgcattgctgcgtacgccgccgatcgtaggtggaggcaacgcagcaacgctgaccggcgacaacgtgacggtcaacaacaatggcacgatcgatccgagctcgatcgtcctcgcctcgcccggcctggtcatcggcaatggttccgccaacaacagcgcgatcgtcgtcaacaacaacgccagtggacagatcaagggtgtcgtcaacatcgcaacgctgctgggcttcggtggacaggcgctggtggcacagaacgtcaacggcaccaccaccatcaacaatgccggcctgatcagcacgtccttgatcggtgtgggcagcgtttccgacgcgaccacggtggtgacctatggtggcgcggcagcgaatgtgaccaacaccggtaccatcgacggacgcgtcggcctgggcgcttctggcggtaatacgttcctcaatgctggggcggtcaacggtagcgttcatctgggtgattcaaccggcggcaataccttcaccgcagtgtcgggttccagcgttgtggccggcggtggcaccgcccttgccggcgtgattacgggtgttaccggggtgaaggttgcggcagcgggaacggtcgacgcgggtaccggcagcggtgcgggcaacaacgcgctggtgctgcagaacagttccgccggtcccgggtcaggcaccggcggagcggtgaccacactgggctggaaccagtacctcaacttccagaagctcaccgtcaacagcggtacctggaacctgcagggcgcatggggcgcatccggcccgacgacgctcaatgatggcctggtcaatttcaacaatgccggttcattcggcacagggctgttcacggccaacggcggtgccatcgcatcctccacggccggtctgaatctggccaatgcgttcaacctcggcggcaatctatccctggccgggaccaatgcgttcggcttgaatggcgtgctttcaggcactggtgggctgacggtcaacaacaccggcattgttactctcggcggcgcaaacctgttctccgggggcgtcaacctcaatgccggcggcctgctgctgggcaatgccggtgcactcggcagcggcaacctgaccgtcggtggcagcgcctcgctggatacgacggcgggcttcaccctgggcaacaacctggtggtcaatggcgggggctcgctgaacctgctgggcagcaatgcgctgacattgagtggctcgatatccggtgccggcaacgtgaccaagaacggtgccggcacgctgaccttgaacggtgccaattcgctgagcggcagcttcaacctggccgggggcgcgttggcgctgggcgcgggcggcagcctgtcgcccaccggtgcgatcacgctgggcgtcggcaccagcctggatctttcggcggcggccgaccagaccatcggctcgctggccgggcttggtggttcggtcaacctcggcagccacaccctgaccctgggcgggctgggcaataccagctacagcggcacgttcgccgcaggcaccggcggcctgatcaagctcggcaccggtgtgcagaccctgtcgggcgtcaacagcctcacgggcggtgttgcgctcaacgccggtggcttgttgctgggcaatgccgccgcgctgggcagcggtacgctctctgtcggcggcaacaccaccttcgacggcaccacggcgctggcgctgaccaatgctgtcagcctcggatcgggtgccagcctgaatctgcttggcgggcaggcgctcaccttcaacggggtgatcagcggcgctggcggcctgatcaaggatggtgcatcgtcgctgaccctcaacggcgccaatacgttcggcggtggtctggcactcaacgcgggcagtctggtgctgggcaacggcggtgcactgggaaccggggcactgaacgtcggcggtgcggtatcgctcgacgccagcgccgggctcgccgtgggcaatggcatcacgcttggcgccggtggttcgctcaatgtgctgggctcgaatgcgctgacgctggggggtgtcattggtgggggcggcagcctggtcaagaacggcgctgccacgctgacgctgggcggcgcgaacatgttcactggtgggctggcggtaaatgccggaacggtggcattggccagtggtggcagcctggcggcgaccggcgcggtcagcctggccggcgctggcagcgcgctggatatctcgctgggtggcaaccagaccatcggtgcattgtccggtgtggcgggcagcaccctggcgctgggcagcagcacgctcaccttcggtgatgccaccaaccagaccttcgccggcgtgatcggcggcaccggtgggctgatcaagcagggtaccggcgtgcagacgctgaccggtgccaataccttcagcggtggggtgaatcttgcggccggtggcctggtgctgggcaacgccggtgcgctgggaagcggtgcgctgacggtcagtggcaacggctcgctggacgccactgcggcgctgaacctgggcaatgcgatcaacctcggtgcggccctgaccctgccgggcagccagaacctgaccctggacggcaacatcacgggcaccggcagcctggtcaagaatggcgcatcgacactgaccttgaacggcaccaacaccttcagcggtggactgaatgcaaacgccggcagcctgctgctgggtaacagcggcgcgctcggtactggagtactgggcatcggcggcaacgtcacgctcgatggcagcgccccgttgagcctgaccaacaatgttgacctgggcgcgggtgcggcgctgtcgttgccgggctcgcaggcgatcacgctgggtggcgtggtgtccggtaccggcaggctggtgaagaacggtgccagcacgttgaccctcaacggcgccaacagcttcggtggtgggctcaccgtcaacggcggcggcgtgttcctggggaacgccgccgcactgggcaccggtgcactgtcggtgggcgccactgccacgctggacagttcagtagcgctgaacctcgccaacaacgtcaacctcggggcaggcgcggcgctggatctgctgggcagccaggacgtgtcactgggcggtctcatcagtggcactggcagcctggtcaagaatggtacggccacgctggcgttgaatggacccaacaccttcagcgggggtgtcggcctcaacgcgggcctgctgcagctgggcaatgcgcaggcactgggtaccggccagctggacgtgggcggcaacgcttcgctggatgcaacgtctgcactcaccataggcaacctcatcggcctggccgccggtgcgaatctctccgtgctgggcggcaatgacctgacgctcaccggtccggtattcggtgccggtgggttgatcaaggacggcgcggcccgcctcaccctgtccggcgccaacctctacaccggtggcaccaccatcaacgccggcacgctggcgctgggggcgggcggcagtcttgccgcggccggcgcggtggatcttgccggtgccggtgcgacgctggacatctccgcagccggtgcggcgcagaccatcggcgcgctgaacggcgtggcaggcagccagctggtgctgggcgcgcagtcgttgacctttggcggcgccagcagtggcagctttgccggcgtgatcgatggtaccggcggcctgatcaagaccggtgccggcgtgcagacgctgtccggtgccaatactttcagtggtggccttgcactcaacgacggtggcctgattctcggcaacgccagcgcactcggtaccggtgcactgggcattggtggcacgaccacgctggacagcacagtggcgctgaacctggccaacgcagtgaacttcggtgccggtacgcagctgaccctgggcggcagcaacgatctcaccctcggtggcgtggtggccggcaatggcagcctgatcaagaacggtgcgggcctgctgaccctcaacaacaccaataccttcgatggcggcctgaccttgaacggcggtggcctggtggtcggtgcgaatggtgcgctcggtaccggtgcgctggcggtgaatgccagcaccacgctggacgcgggcgcggcagtgacactcggcaatgcggtcacgctgggctcgggcgtcgtactgacgttgccgggcagcaatgcgctgacgctgtcgggcgtggtcggcggcaatggcagcctggtcaagaatggtgccaccacgctgacgctgtccggtgccaacacctacagcggaggtaccaccatcaatgccggcacgttggcgctgggcgcgggcggcagccttgctgcagcgggtgatgtcacgttgggtgcaggcgctggctttgatatttccggtgccggcagcagccagaccatcggcgcgctcaacggtgcgggtggcagcaccctggcgctgggcggcaattcgctcaccttcggtacggccggcaacgccgcgttcgatggcgtgatcagtggcggcggcggtctgatcaaagcaggcgcgggcgtacagacgctgtccggtgccaacacgtttggcggcggcgtaacgctcaacgcgggcggactggtgcttggcaatgatgcggcgttgggcaccggcgcattgaccgttggtggtgccgccacgctggataccaccggcctggcaacgctggccaacaacatcgcgctcaacgccgggctgaccgtgctcgggaccaatgcactgacgctcaacggcgtcctgtccggggccggcagcctcaccaagaatggcagcgcgacgctgactttgaacggcgccaacacctataccggtggcaccaacatcaacgccggcacgctggcgctgggggccggtgccagcctggcggcgagcggtaccgtgaacctcgccacgggtgccacgctggatctgtctgccggcagcggcacgcagcagttcggcaccctggtcggcaatggtacggtgaacctcggtgccaactcgatcgaggtcggcggcgccaccaatggcaccttcagtggctcgatcgcaggcaccggtggcctgaccaaggtgggcgcgggcatcgaaacgctgaccggtgccaacacctacaccggcggcaccttcatcaatgctggcacgctggcgattggtccgggcggcagcctggccgcgaccggcgcggtgacgctgagcgctgcgggcaccggcttcgacatctccaccgcaggggccaaccagaccatcggatcgttgaacggcgtggccggctcgacggtgagcctgggggcacagacgctgacacttggtggtgtgggcaacagcctcttcgatggcacgatttccggcaccggtggcctggtcaagaatggcaccggcatcctcacgctgggtgacgccaatctgttcagtggtggcgttgcactgaacggcggtggcctggtggtcggcaacaacgctgcgctcggcagcggtgcgttgacggtcggaagcaacgcaacgctggatgcaacgaccggtgccagcctgtccaacaacatcagcctggcagcgggtgccaatcttgatctgctcggcagccagtcgctggcactgggcggtgtgatctcgggtacaggtgggttgatcaaggacggtgcggccacggtaaccctgagcggtgccaacacctacaccgggggtaccaccatcaacagcggcacgctggcgatcggtgccggtggcagcctcgccgcaaccggtgcggtgaacctggccggtgcgggcacgctcgacatctccgcgggtaaccaggccatcggttcgctggccggcgttgcaggcagcacggtggcgctgggcggcagcacactgaccctgggcggcaccgtggacagcaccttcagcggtgtgatcggcggcagtggcggcctgatcaagaacggtgcgggcgtgcagacgctcaatggcgccaacactttcagcggtggcgtggcgctcaacgccggtggtctggtggtcggcaacaatgctgcgctgggcaccggtacggtgacggtcggaggcgctgcgacgctcgattcgaacactgcggtcatcctcggcaacaacttcatcctcagcaacgcgttgaccgtcctgggcagcaacaacctcaccctcaacggcaacctgagtggtaccggcagcctgaccaaggagggtgccgcgacgctgaccttgaacggcaccaacacctataccggcggcaccaacatcaacgctggtacgctggcactgggtgcgggcgcgagcctgtacgccagtggcatcgtcaacctggcctcgggggcgaccttcgatctgtcggcaggcagcggcacgcagcagttcggtaccctgatcggcaacggcacggtgaatctgggcgccaacacgctgacgatcggagacgccaccaatggcacgttcagtggttcggtggccggctccggtgggctgatcaaggaaggctccggtacccagacgttgaccggcaccaacaccttcaccggtggcaccaccatcaacgccggcacgctggcgatcggcgccggtggcagcctcgctgcgaccggtgcggtgaacctggccaacgccggtaccaccttcgacatcagtgcggggggcgcgcaggcgatcggttcgctggcaggcgtggcaggctcttcattggcgttgggtggcagcacgctgaccctcaatggcgtgggcaataccacgttcgccggcaccatcggaggtgcaggggggctggtaaagaacggcgcaggcatccagggcttgactggcgtcaacgtcttcacgggcggcgtgaccctcaatgccggtggcctgctactgggcaacgacggttcgctgggaaccggtgcgctgaccgtaggcggcaacgccagcctggatggcaccagcgcgctgacgctggccaacaccgtacagctggccagcggcacgctgactctgggcggcagcagcgcactgaccttgaacggcccgatcagcggcgctggcggcctgctgaaggatggcgcagcgacggtcaccctcggcggtgcgagtacctataccggcgccaccaccatcaacagtggcacgctggcggtggcggccggtggcagcctgtccggtgccagcacggtcaacctggccggtgccggtacgctggatatcagcgccggtggcagccagagcatcggaggcctcgctggcgtgaccggttccagcgtggtgctgggcggtgcaacgctgaccaccggcggcaacaacgccagcaccacgttcgccggcgtcctcagtggcaccggcggcctggtgcagagcggtaccggcacgctgaccctcagtggcgacaacacctataccggaggcaccaccatcaacggtggcagtacgctgcagatcggcaacggcggcagcaccggttcggtgctgggcgacatcaccaacaacggcagcctggtctacaacctcggcaccacggcaaccgtgggcggtgtagtcggcggcagtggcagcctgacccaggccggcagtggcaggctggtgctgaccggcaacaacacctacaccggcggtaccaccatcaatgccggtggcacattgcagatcggcaacggcggtgcgaccggcgcgatcgtcggcgacatcaccaacaacggtgcgctggtatccaacgtggccggcaacaccacgctcggtggcaccatcagcggcagtggcggcctgacccaggccggcagcggcacgctgaccctgaccggcaacaacacctataccggcggcaccaccatcaatgccggtggcacgttgcaggtcggcaatggcggtgcggccggcgcgatcaccggcaacgttgccaacaacggcagcctggtgttcgacgttgcgggcaacaccacggtcggcggtgcgatcagcggcagtggtggcctgacccaggccggcagcggtgtgctgaccctggtgggcaacaacacctacaccggtgggaccaccatcagtaccggcagcacgctgcaggtgggcaacggcggcgcgaccggcgccatcgctggcgacatcaccaacaatggcgcgttgatttccaacgtggccggcaacaccgcgctgggcggcaccatcagtggcagcggcggcctgacccaggcgggcagcggtacgctgctgctgaccgggaccaacacctataccggcggcacgaccatcaacgccggcagtacgctgcagctgggcaatggcggggcaacgggctcaatcgtcggtgatgtcaccaacaacggcacgctggtgtccaacctggcgggcgataccacgctgggcggcaccatcagcggcagtggcggcctcacccaggccggcagcggtacgctgaccctgaccggcaacaacacctataccggcccgaccaccatcaacacgggaggcacgctgcaggtgggtaatggcggcgccaccggtgccatcggcggcagcgtcaccaacaacggcagcctggtgttcaacgtgggcggcaacaccaccgtcggcggcgccatcagtggcagcggtggcctgacccaggcgggcaccggcaccgtgatcctgaccggcaacaacacctataccggcggcaccaccatcaacaccggcggcacgctgcaggtcggcaatgggggcgccagcggtgcaatcaccggtaatgtcagcaacaacggcagcctcgtgttcaacgtcggcggcaacagcacggtgggcggcaccatcagcggcagtggcggcctgacccaggccggcaccggcaccctcacgctgactggcaacaacacctacaccgggggtaccaccatcaatgccggcggcaccgtgcaggtcggcaacggtggggccagcggctcaatcatcggcaacatcaccaacaacggtggtctggtcatcaacaccggtggcaccaccacgcttggcggcagcatcaccggcggtggcagcatcgtgcaggccggcccgggcacgctgaatctgggcggcaacagtggtggcttcagcggcaccggccaggtcaccggcggcggcctgaatgtcaccggcaacatcggcggacagtggaccatcggcagcggcacgaccctgtccggcaccggcaccatcgggggtaccggcggtggcgtgacggtgtccagcggcggcgtgctgtcgccgggcaatggcccgggcaatggcggtggtgcaggcaacggcaccggcacgatcacggtgggcggcaatctgaacctgtcaccgggcagcacgctgggcatcgacctgggcgccaccggcagcgacacggtgcaggtcggcggcagcgcgaatgtgggcggcagcaccgtgcgggtgaataccatttcgccgagcaccagctaccagcagggccagcagtacacggtggtcagtgcgggcggtggcgtgagtgggcagttcgcctcggcaacctcgccgtcggccttcctgaccatcaccccggtctacaccgccaacacggccaacctgcagatcgacgtggcgcagaccgcagcgttcaccaccgtggccaacacgcgcaaccagtacaacaccgccgcggcgctggatagcctgccgcagggtggcgcggccttgggcctgtacaacacggtactgatgtatgacgccggcactgcgcgcagcgcattcgaacagctctccggtgaagtgcacgcggccagccgcgcggtgctgctgtacgacaactacctggaagaaggcatccgccagcgactcggcagcgagttgccgaccgtgcgtggcgagcacgcgtcggcctggttggccggcagcggcaaggtgttcaggcaggatggcgacggcaatggcgatgagatccgcgccaatcgcaatgcgctgatggccggtgtcgactggcagctgggcgagcatgtggtgctgggtgcagcggccggcaacgagcggctggatacgcggttgtatgatcgcagctcgcgggcccgcctgcgtggccacacgttcggcctgtatgcacagggacagtggaacaacggcttcgcggtgggcggcagcgtgtcgcgcggtgactaccggacgcgcaccacgcgtgaagtgccgttgttgggccagaccctgtacagccgccaggatgccgatgtgaccatcgcccaggtggaaggcagctggacatggacccacggcaggacccagctgcagccctatgtgcagttcaccaagcactgggtcgacagcgatcgtgcggtggagcagggtggcagcgcggcactggtgctggaaggcggcaaggacacgctcaatgtcagcacggtgggcgtgcgtgggcgctgggacgtgggcagcggcgagcgcttcccggcgcagctgacggtcggcctgggttggcagcatgcgtcgggggataccgatgtagccagccgcaaccgctttgcggtgggcggcgacgccttcgatgtctacagcgcggtgatggcacgcaatgccctggtcagccaggtgggtgtggcggtcggcctcggtcgcaacagccagctgtcgatgttcgtgcagggccagcatggcgatggccgccgcgatgtgggtgggcagatcaacctgcgcgtcgggttctga

SEQ ID NO: 500448 - DNA, 2808 bp, Stenotrophomonas maltophilia
atgagcactactcccggctacgtctccaacgccgagctggcttcgcgcctctcgacgttggtagaccgctggaaccggcgcgagaatcagatgatcgcgctgctgactcaggaggaaggcaccgtcgtcgtgacggacggcctgggcaacaaccacaccctcccctcgttcccgcagctccagaaggacgtggccgggctgactgacgagctgactggctcggtcgtgcaggtccgcgacctcgtgtccgtggcgaccggcatggcgaacgctgcggctgagtatgctgatgacgcctctggcttcgcagatgcctcctcggcctccgcggatcgcgcggaggctgccgcagtgagcatcgaggcggacgtgatcgccactgcggaagccgcagccactgcggtcgccaaggctggcgaggcgagcgcgtcggcgaccgccgcggcgaccaaggctggcgaagcaagctcctcggctgccgcggcagcttcgtccgcgagcgcatcggctacatcagcgaacctggcgagcgactcgatgacgcaggcggaggccgcagcagccgcagcagatgcttcgcgcgccgcctctgcggccgtgctggaggaaatgacggacctggctgacctggtggaggctgacgcgcagtcggccgcagcctctaagaacgccgcagctggcagcgcaaccgctgctgccgcttcggtgacctcggcgacctcccaggccaaccgggcggaagcccaggcgtccattgccaccaccaaggccagtgaggcggctggatcggccgtcaccgcggctggtcatgcctccgcagcatccggctccgcgtcgtctgcctcgacctcggcgcagaccgcttcatcggccaaggccgctgcggagggggcgcgcgataaggcgaacctgtacgcgaacgccccgcaaggcaccgaagtagcgccgggcgagttctcggcgaagcattgggccgcccaggcgcaggctgcggctaccggctccctgatctacatggggtcgtgggatgcgagcaccggggcgttcccggcgaaccccgtgaagggccacttctacaaggttgttggcgaaggcaccgtggggggcattcattggcgagtcggagaccaggccctctacggggttacctgggagaagatcgacaacaccgatcaggtcaccagcgtcgccggaaagcaaggcgatgtgtcgcttgtggctggcgacatcggcggcttgggcgcactggcgatccgcgacaatgtggacttcaacacccacgtcacgggcaagccgacgacgtacccgccgagcacgcacacgcacacgaaggcgcaggttggcctcgacaaggtggacaacaccgccgacctcgacaagccgatcagcaccgccactcagaccgctctcgacggaaaggccgcagcggcgcactcgcacgccattgcaaacgtgaccggcctccagtccgcgcttgacggcaaggccgcggcgtcgcactcgcacgccattgcccacgtcacgggcctgcaaggaacgctggatgcgaaggcggacctgtccggggcgaacttcaccggacctgtcggggttggctctccaggagacggcaacaccctactcacgttcaacggcgaacgctcgtggtcgttcaagcaggcgggcaccggcgctgaaacggtcctccagctgtatgacaacactggtgccaagaggttccagatcgcagcggctcagaccaacaacgtcatcgagatcgccccagccacggccagcatcaagatcaacggcaacgccgtttggcattcgggaacgttcaaccccgcgacgaaggctgactccaaccactcgcacaccatcgcaagcgtcacggggctacagagtgccctggacgctaaggcagggctgggagcgaatacgttcagcggcaacatgacgatcaacaccgcgaacgaggccaacatcaaccttggcccgtcgaacggcggccgcgtcatccgcatcgtgtccaacaccacgcctaacactggcttctacgacgcgaccaacaacacctggctgttccgcatcaacggcgacaacagcgcgaactttgccagctccctaagcgccaccgcaatcacggcgaccggccgtctgacggtcggggatcagctctacctcaacggtggctggttccgctcacagcagtccggtacaggctggtactcggaaccgcacggcggcggctggttcatgcaggacaactcgtggattcgctcgtacaacggtaggggcgtcctcatcaatggggcgaacggagccgacgctggtctgcgtctggaaggcacctctccaaccatcacgttctacgacgccgaccagggcacgacccattgggtgcactgcaacgataacaacctcggcttcctggcgagcaacagcttcgcgtgggcctgcttccgcaacggcagcaacgactggcagtgtcagagcaacagcatttcctacgcatcggacgcccgtctcaaggagaacatagtacccatcgcgcgcgccgcagtggacgacttcttcacgaagttccgcgtgcgggagttcgactggaatgacgaacggatcaatgagctgaaccccggcttcacctactcggcaaagcatgagtacggcgcaatcgcgcaggaggtggaagaggttctgccgtacatggtctacgagtccgagcacaacgggatcaagacgatcctgtgggacaaggccgtaccgttcctcatcgccgaggtgcaggcgctgcgcaaggaagtcgccgagctgcggggtggtgcctga

SEQ ID NO: 500449 - DNA, 321 bp, Stenotrophomonas maltophilia
atgaacttcaagaccatctacaaccgcgccagcgagcgcctggtgcgcgcctacgagcgcgccaaggggtacgtagcgctgaacatcgaactcgctgtggatcgctacagggagcgtgtacgcgccttcgctgcgcggagctactaccactacctcgccgtcgtgatctgcgtgctgctgcccgtgttctgcgtgtgggtgctgcctgtcggcctgttcgtccatgtgcgtgagttcgtgagcgaggtgatcggcgacttccgcagcatcgacctggaggacttcacccgtgccgcgtgggagcgcaacgtccgtcaatga

SEQ ID NO: 500450 - DNA, 540 bp, Stenotrophomonas maltophilia
atgaagaagctgttgaagtggttgctgctcgcggtaattgttttcttcgccgcgatgctggcattgggcgtgattatcaacgcaacgatgtcgcccgaagaaaaggcagcacagcaagctcagatcgacgcccgaaaggcggaacaggcagctgccgccgagagcgcacgagtcgctggggagcagaaggcacaagaagcgaagcaggctgaaatcgctgcacttccggtggtgaccgcgcgcgatctggcgtccgcctatgagcaaaacacggttgccgccgatcagatgtacaagggcaagaagttcaaggcaacgggcgagatcgcatccatttccaccgacttcatggggcggccctatttgacgcttcgtggcggggtcaacgagttcatggagccgcagttcattttctccaaggacgcgctggacagcatcgccaagttgaagaagggtgacgttatcagcgccatctgcgtgggcaagggcgacgttgccaagactccgatggtcggtgactgcgagttcttcactcagtag

SEQ ID NO: 500451 - DNA, 201 bp, Stenotrophomonas maltophilia
atgcaccgacttctcctgatcctgctcatcgcgggcgtcacgcccatcaacccgctcctggcgatcctcgcgtacaaccgagggatcacctgggccatgcctgtgtgcgtcctatggggacttgggtcgctcgcctggatggctgtcgtggcgacgcggaagcgctccggtgtgactgaggctccctcctcgcgcgactga

SEQ ID NO: 500452 - DNA, 276 bp, Stenotrophomonas maltophilia
atgagcaccgcaacgatgaccctgacctgcccccatgacccgatatggcgcattgagctggaccgcagcgaggtgttcccggatgaccccggcgcaggcacccccgcgatgctgtacggcccgcgtgattcgtcggccacctactactgcgccctggacaccgaggaaatctggaacgctcaggagtgcatcgccatcccgcgccgggtgctggactggatgagcgcgcaggagttcaacgtggccgcattcctgttcgtggaggtcgccccatga

SEQ ID NO: 500453 - DNA, 168 bp, Stenotrophomonas maltophilia
atgacttcctacggcttctggacgagtcaggcgcgcaggtggtccgcatcggtggacttcgggtcgcctgtcagtgcgtggacggccgcaatgcacgccgagtggaagcgcgcgaaggctgagggccgctctcccagcatgacgaacgtgcgcaagggggtgctgtga

SEQ ID NO: 500454 - DNA, 309 bp, Stenotrophomonas maltophilia
atggccgatatgaaacgactgcaccggaggctgtgggtttcatttgcgttgctggcgctggcggcctgcgcgccggaacgtgatccggcgcagaccgtggagcgcgatgcaggtacggaggcggttccagcgcgcccggtcggtgacgccatgcagatgcagccggcgcagccggtggagggtgaggctgcgccggaggcgatggggttgcgtcgcaccgacaagggtggcgtggacatccgcaaggtggatgtggcggccgggcagggcgctgacgcaccggcgtcccctgccgaggcgaagcactga

SEQ ID NO: 500455 - DNA, 351 bp, Stenotrophomonas maltophilia
atgctcctttacgctaccgataccgaatcggcatttggcggttcacgtgcagccatacagaacccggaagccgttgccgaatggaagactgacgcagtctcattcctcaatgccgctgcgagcgaaggcagcgttgatgccttggttgccctcgggcgcgctaacgccaacggcataattgtgaacaagaatccgaccgaagcctttgcctattacttggcagccaaaagggcaatgccctcagcgttctcggaaaaattgctcggcatgtaccagaaggaactgagcgccgctgagcagcaggcggccatcagacgagccgatgcaatttacaagaactgctgccaataa

SEQ ID NO: 500456 - DNA, 384 bp, Stenotrophomonas maltophilia
gtgacgcaaccgcaggcgctgctgctggacgagccgttttccgcgctggaccacgacctgcgccagcatctgcgccaggagttggaggcagtgctggacaagaccgggatcccgttgttgttgatcagccacgaccctcaggacatccgcttcttcgggcagcaggtagtgcatatggagtcgggccaggtggtacacggaaaggaagtcagtgtagatccggacagtaatgtccgaatggtccagccggcagcccaggcttatccactcttgccgccttgcaacctctcggtagaggcctttacacccaacgcttccacgtgccttcccctgtccgtcaatgcgcatgcagggtttggggaaaggtgtcgggacgaacagtga

SEQ ID NO: 500457 - DNA, 1023 bp, Stenotrophomonas maltophilia
atgtcgctgaccacaagcccctactgtggcgcggggcgttacggcagtcccattgacgagcaagaggtcgacatgaggaacgtacgccaggacgtcgaaatgaggatgcggcgccaaccgacgatgtgggacattgcgtttgcggtcaaaggcacgattcttccgaagatcgcgaggcatctgatgctgatcgcgttgatcagcatcatcgccattcttgcgtcgcttgagcacccgggcatcttcgcccggttcggctccgtcccgttcacgctgattggcatcgcgctgtcggtgttcatgagcttccgcaacaatgcctgctattcccgatggtgggaagcaaggcatctatggggagaactgatcatcgcctgtagatcgctggcacggcagacggcggccttagcccctgaggatcgaacgcagatcattcatggcctctgtggattcacggcaggcctgacggccaggctgcggagaaacagcgaggccgacgcaatcagcctttggtgcaatatcggagccgccgcaaagggtcccaatccaacaaatgcggtccttgaaagtatcggaaatcgatgcctgcaactcgtcaggagcggcaagatcgactcgatccagtactctgtccttgacggccaactcagcacgctagctcgtatccaagggggctgcgagcgcatcctcaataccccggtgccgttctcatactcattgctcctgcaccgcactgccatcgtgttctgcaccatgctgccgttcgcactggctgggtcactcggctggtggacgctattgccagtgttgatagtggcctacacgttttttggtcttgatgcactcgggcaccagctggaagaacccttcagccttgcacccaacgcgctcccactgtattcgctgcggcagatagttgagcgcgagatgatgtcgatcctggagctcgccaacaccgacgccggcagcgcaagcggtggcgaggaacttgccagcgagcgggcagaacgatcactgagatga

SEQ ID NO: 500458 - DNA, 1398 bp, Stenotrophomonas maltophilia
atgacgcccaagagcgccattcatgcagccgaagagcacgccggtggcgatgtcgcttggccggatctttcagattcgtcgatcctgatcgtcgacgacgagccaggtatgcgcagttttctggtgcgtgccctgcggccaagatgcaaggctgtggaagcggctgcagacactgaagaagccgagaagcatctggccgagcgccacttcgacatagtcgttgtcgacaacgtgatgcctgggaagagtgggatcgtctggttggaggagcagcgccgggagggtacgtcggctgacttcattctgatcaccgcctacgcggacctggactcggccatcggtgcgatccgcgcaggcgccgctgacttcctactcaagccattccgaaccagccagctgctggcggccctgtctcgctgtctggagcgcggtcggctgcagcgcgaaaatgctgttctacgccacgaactgcatggatcgggcgcgccttcaccactgcgcgacaagctcaccggcagctcgcgagtgatccaagccactcgcgacctgatcgcaaaagtggcgcccttgcccagcagtgttttgttcactggagagtccggcgtgggcaaggaggtggcggcacgatcgttgcattcgctctccacgcgcgcctccaacccctttattcctatcaactgcgcagcgatcccggccgagctgatcgacagtgaactgttcggccatctgaagggggcgttcaactgggcgcaagcatcacgccaaggcctggtgtcatatgcccaaggcgggacgctgttcttcgatgaggtcgccgacctgccactggcgttccaaggcaagcttctgcgcatgctcgaggataggcggatacgcccggtcggcgcagagcgcgagactcccatcgacgtccgtttcgtcttcgcgaccaacaagaatctggtctcggcagtgaaggacggcaccttccggtccgatctcttctatcggatcaatgtcctggaggtgcagataccacgcctgcacgaccgggggacggacgtactggaactagcggccggattcatgcgcgaactggggctgcagcttggtctacatcccattccgttcgatgaacgaacccgtgcctatctccagcactactcttggccgggcaatgtccgcgaactgcacaactacgtggagcgcagcctgatcctgggccattttccgtcgcatcttgaacggctcgaatctctgtctgatccgcgcagtcgacttctgtccgaggtcgagcgtcggcacatcctggcggtactacgcgaaacgggtggagatcgcgaacaggcagccggcattctggggatttcgcggaagaccatcgaccgcaaatgttccagctggaacgtatcagcttag

SEQ ID NO: 500459 - DNA, 2055 bp, Stenotrophomonas maltophilia
atgaaacgagtgcgctccgtccgccatcgcctgctactgatcgcgatccttccgatggtcgtgatcctgccaatgatcgttggcgtgctcatctataagtgggacaagcgtttcgatgaactgctgtcctccaaggtcggcagtgatctgaagattgctgggcagtacatgaaccagttgctgatcaatgaccgtgcatcacttgctgccatcgctgactcggagagctttcatagcgcagttggtggtgacagggacgctctcagcacattgcttgcatcgaaagcccgtccaggtgcattggacttcatcgcgctgcttgatcgagatggccatctcctggccagcagcgaaccgtcatcgcagaaggccgtgttgctcaagtggccagtgattgagaaggccttcaacggcgtctccgacgtgcaggtaggcgtagtgcaagaggatgacctgcgagcgctctcgccccagttggcggcgcgtgccgagatagtccgtctgccagagccgggagagcaggcgccgccgagcacatatgaacggcgcgcactgatgatccaggctgctactccagtgaacttgcccggccagcagccaggagtgctggtcgcgggcacgctgctgaaccacaacacgcacttcatcgaccagatcacggacttgatctatcgcgacaacggcatgcgcaccggaagtgccggtatcgcgtcccttttccttggcgatacccgcatcagcacgaatgccaagctgcccggcgggcgcccagcgtccggcacaagagcgtcagcggaagtggccgcagcggttcttggtcaaggcaagacgtggttggcaaaggccttcgtggtcaatgactggtatgtgtcaggctatatgccgattcgggacggtgagggtgtgccggtcggcatgctcttcgttgggttttcggacgagccattcgctaccgcgcgacggaacgccatcggaatgatcgtcctcggttgcctgctggttgcggcaattaccgtccctctgtttctgtatatcgcccgtggcgtgtttcgtccgctggaaaagatggacgcagccattgcgcgggtcaacgccggcgatcgcaacgcccgcgcaggcgcgcgtggttccaacgacgagatcgggcgactggcatcgcagctggaccagatgctcaaccagctgcaggacaacgagcggcagctggtggcctggaacgaggagctcaacacgcgggtagaggagcggacggcgggactgctgcttgccaaccgtcagttggaggaagcaacgcagcacctgattgtgaaagagaagttggcaactattggcgagatcgccgcaggtgtcgcacatgagatcaacaatccgctcgcagtgatgcagggaaatctggagctcctgcgtgaagccgtgctccaggatttcggaccaggcggcaaggacgagtttgacctcatcgaggatcagatccagcgtatcagtacgatcgtgtccaagctgcttcagttctcaaaacccagcgagcacgcagcgggatacgagctgttggaaccttcatccctgctgctggaaacgctaccgctggtacagcacctgaccaaacgccagcccgtcatgatcgagaagaggtttcattccacccgactcatcagggccaacagaggggaaatccagcagatcctggtgaacatcatgatcaatgcactccatgccatgccgggcggcggtgtcctgggactagccaccgaggacacggatgacatccacggtgcacctggagtggcgctgcggatctccgacgccggcggcggcatcccgcaggacatcctggagcggatcttcgagcccttcttcacgaccaagcaccatcagggcaccgggctcggcctttcgatcagccagatgttggcgtcgcggcatagaggaaacctctctgtggcgagtacggggccagccgggaccgtcgttgaactgtggatgccagaggcggccgaggaccgtcccagcgcgttgaattcctcaaatgacatgaacgaatggaggttggagtga

SEQ ID NO: 500460 - DNA, 906 bp, Stenotrophomonas maltophilia
gtgagcagtccatacgaaacactgggtgttgccagtgacgccacgacggatcagatcaagaaggcgtaccggaggctggccaggaagctgcatcccgacctgaacccaggcgacaaggccgcggaagaaaagttcaaggatgtcgccaatgcttacaggctgctcatcgatccggagaagcgggcgctgtttgaccaaggggcgatcgacgaaaccggagcggagcgcccgcgccgcgagtactaccgcgactatgcccaggccgatgccggctatggcgacggcggctttggtggctacgcggactttgccgaagccggtgatccgttcgccgagttcttccgccgcacgtcgaatgcccgtgcaaaccgccgtggccaggacctccgctatcacctcgaaatcagcctggcgcgcgccatcgagggaggcgctgagcgcgtggtcctgggcgatggcggcaccctggatgtgaacattccaccgggcgtcacccaggggcaaacactccgcctccgaggcaagggcgcaaagggtgctggtacggggggagacggcgatgccttcatagagctggagattgcaccagacccacgcttccttgccgagggcgactcgctcacgattgatgtgcccatctccttgaaggaagccgtgttgggcgcacgcattaccgtgccgacaccaaccggtcacgccgaggtgggcgtgccggctggctcagatggcaacacccggcttcggctgaaagggcagggcatgccactacgctccggtggccgaggcgatgagttcgtccgattgaagattgttctacagaagcctatggacgcggagctggcccagttcgtgaagacctgggagtcgggcgcgtccttcaatccgcgggaaggaggtgcagcatga

SEQ ID NO: 500461 - DNA, 279 bp, Stenotrophomonas maltophilia
atgagcgcattgaatgaggttgtcagtgttcaggatatcctcgaccaggccggcgtcgaggaggctgtgctgagccattgggtccagctggagtggatctctccacagcagggtgaggatgggctggtctacacgcgtgtcgatctcagtagagcacttttggttcgcgaccttatatttgaaatggaggtcaatgaggcaggggtggacgttgcgcttcaactgatcgagcaggtgcatggattgcggcgggtgctgctggccatgcgtgatcggtga

SEQ ID NO: 500462 - DNA, 951 bp, Stenotrophomonas maltophilia
atgagctacgcgacgccgcaatcccccgaaccgcaaccgatcgatgcaccactgtcgatcgctgcatccttccttgttcttaccattgagcgggacgcctcgtccctatctaccgttcgaacggtcctgggcagcctggacgatctgatcaagaacgtgctcgtcagagatgtgaccggcacctttacctgcaacgtcgggattggcgcgaacgtatggggctcgctccttggcacggctccgcctgctgagctacgtccgttcaaggagatccgaggcgcagcgcatgcggcagtctccacgccaggcgatctcctgttccatatccgcgccaagtcgatggatctgattgtcgcgttccagcagatgctcttcgagggcttggatggggcagttgcagggcaggacgaagtcagtggattcagatacttcgatggtcgcgatctgctggagtttgtcgatggcactgccaatccagttggttgggcgcttcccgaggcgaccatcgtcggaagcgaagatcccgcgcacgcgggtggaagctacgttgtcacacagaagtaccttcacgatctcaaggcctggaagggccttagtactgaagtccaggagcagatcatcggtcgcagaaaatttacgaacaccgagcttccagacgcatcagaggcagatcagaagtcgcacaagacgctgtgtaccattacaaaggatgggatcgaacacgacattctgcgggacaatatgccttttgcaagaccgtcacatgccgagtacgggacctacttcattggctattcaagacatctctgggtggtcgagcagatgcttgagcgaatgttcatcggcaacccgccgccgcttcacgaccgaattcttgatttctcaagagccgtgactggcaacgtcttctttgttccgtccagaagcgcactcgcggcaatggcaggttga

SEQ ID NO: 500463 - DNA, 174 bp, Stenotrophomonas maltophilia
atgcgcaactcgaacaatggcgctggccatggcgacaccatttggaattacgacctcgttcccttgcgcatcccgaagggttgtgaaaccaagagagatgccctccacccgggcttcgatgaccccattgggagcatacacgcggacggtatcccccacgcgcatcgcctttga

SEQ ID NO: 500464 - DNA, 432 bp, Stenotrophomonas maltophilia
atggtgttcatcattacattggcagcggcagctctggcggtggggttggtcatctccgtaagcgggaagcaacacaagcctctggaactggggttgaccttggcgtcgctgcctctcgcctgggccaccattcacgcaatgatggcctggcactacgcgcacatgtattggagaaaatccgataagaactgcgagaacgaaggtgagcaggatggctaccacgcgggattgcttttccccgggaacaagccgcctggagcacgcgattttctgtatttcgcgttcatcatcggagtggctgcacagacggctgatgtctccatctcttcgtcgaagattcgagccgtgagcctgctgcactcgctcgtggccttcgccttcaataccgtactactggctgcagtcgtgaatgtcgtggtgacgctggcgtag

SEQ ID NO: 500465 - DNA, 1488 bp, Stenotrophomonas maltophilia
atgccagagaccctgcgatggcttcagcagccactcggagtcacgatcttctggctgttgctggccttccaggtcgcggttctggcacgcgcgatcacccggcgtgaccgaactccagcctcaagaatcgcttgggtggcggtcgttctttcccttcctgcgctgggcacaatcgcctacctcctcctgggcgaaaccagcattggccgcggtcggatatcacgccttcatcgggccgaacggatgcttggaaccatcccgacaccccaggtgccactgctgccccctgccacgcaattactgtccaatctctgcgcgaccaccaatggactggggccggtcggcggcaacaggatcgagttgttgggctcgccttccgcttcaccgaacgagccgatgctcgactccgatgcagccatcgaaagactgatctccgatattgccgggtcgcgtgatcacgtacatatcagcttctacatctggctggacgatggcaatggtggcagagttgccgatgccgttgccgcagcagctctccgaggcgtggcatgccgggtgatggtcgattctctggggtcacggtcattcatccgtagccgacgctggcgacaactgcgggaggccggagttcgcttgcttgcaacgctggacgacatccctcgcataggacatctggcgctggggcgacttgacctgcgcaatcaccgtaagctggtcgtcatcgacaatgccattgccttctgtggcagtcagaactgcgcggaccctgagttcagggtgcttgcaaagttcgctccctgggtagacatcttcctgcgatgcgaaggccctgtagtgagacaggcacagtggctgtttctgagcacctggatggccgaaaccggggaggagctggagtcgctaccgtctcaacaccccttgccggccttctttgcccaaggtgcggtggcccagatgtatggctgcggtccgtcaacaattggcgacgccatgtcggattcatttgtcggcgcggtgtacgccgcacggcgcgaactgctgatcaccaccccctacttcgttccagacgaggccctcctacgggcactatgcgctgcgccgcgcaggggtgtaagaaccacgatggtgtttccgaaacgcaacaactcactattggtggctaacgcatgccgcagtacctaccgtgacttgcttcaggcaggcgtatccatctacgagtatccgcttgggctacttcacaccaaatcactgacggcagatgggcaattctcattggttggatccgccaatctggatcgtcgtagcctgcaactcaacttcgagaacaacctcctcatcatggatccactggcaacgtcggccatcacgaatcggcaggaaggctacgtacgcgtgtctgagcaggtagcactggagacggtggaggcctggcctttccatatgcggcttcttcagaatgccatcggcatgatgtcgcccgttctctag

SEQ ID NO: 500466 - DNA, 426 bp, Stenotrophomonas maltophilia
atgagcatcgaatccatcctgtactcggcccaagccactgctgttggtggtcgcgaaggccgcgccacctcgtcggacaaggtgctggacatcgcgctgtccacgccggccgaactgggcggcaccggcggcaccggcaccaatccggagcaactgttcgccgcgggctactctgcgtgcttcctcggagctctcaagcacgtggcaggccaggagaagatcaccattgctgacaacgcctcggtgaccggtcgcgtcggcatcggtgcggtcagcaccggctttgccatcgacgtcgcactgaccatttcgctgccgggcgtagcctccgcgcaggcggaggagctggtgcggaaggcgcatgtcgtctgcccgtactcgcatgccacccgcaacaacatcaacgtggcgctgatcattgcctga

SEQ ID NO: 500467 - DNA, 870 bp, Stenotrophomonas maltophilia
atgacatctgtccgcaatggcgaacgcctgtgggcgctacgcctgatagcgcgtcatgggtgccatcgcgcgagcctccggatcggcgcggccctgttgccattgctccctgcatcggcccaggtcttcatcgccgaagccgccttcgcgctattcgggttgctgcttccgtcagtgcggcaacgccgtgccgccaggaccctcgagcaattgggtcatgcgccgtcgcttgcccatgcattggcaacccgcttcagggcacggcactggctgcacatcgcccgggcgcgccaactgcaatcgctgccgttccctgccctgcagtgtgtgctgcgcggaatgacctggcgcgacccggccgctctatggaccgcatccgctggaaggcaacgtgtgatctgtctgctgcccagcggtgatatcaacctggcggtgggcgcgctgctggatcgcccaggtgcgcctgcacattacttcatcaattcgatgcatcacgacgattcacccattcaccggacgctgctggcgctgcaacgacaggggcatcgcctggatatcggacgcgcccctcgcggcggggaggcctggagaatgctgcggcgcggggctgcagttgtgaccgtgctcgacccgtacccgtggtgcaggcccggtgaaaccgcagagccagccccactgcgcctggcgagactggcgagggcgccggtactgctgctcggtcatcgctgcgatggcccggcggttggtaccctgcatgtactgggagagtacagtgccgaatgcatcgccggcggcgcaaccgcactttataccgccgcccatgcattcctggccgccgcgccgcatgactggcgcgatctggaccggtag

SEQ ID NO: 500468 - DNA, 2571 bp, Stenotrophomonas maltophilia
atgttggcatgtggtgcggtgctgagcctgctgtcattgagcgtactggtcaccctcatcgtggtccaggtgaacagcttcgaggcgcgccgaatcgccgacttccgccgcgctcacgctgcattgcagatccagctggcgcggcaggatgcaagccatgcgcggctggcgaacatggccgaatatgcgtgggatcaccacgtgcagctgggccgtatccctgccgatgtcatggccagcgcctacctgcagggcggtcagcggctggtggtggctgctgacgagtacagccggccacagatggcactggggctggagaccacgcagtggcgcccgcaggaactgaagcgctacctgcagctcagcacagcggtgtcgctgatccagcgcctgacccgcaccgccgatgacggcgagccggccagtgcttcgtacttcttcgaccccagcggccagtatctgtccctggacaagggcctgaccgaacgcggcctgatcgaggcccttgccgcaggctcgcgcagcgaggtcttcgcgcatctgcgtgccccagcgcagctgttggttcctgccgccagccgggaccaggtgccgctgcttgagagtgtcgcacgcagcgactccccgcagcgcacgtttggccgccacccgctcaacggcgaaccgtcactggtgtcagtcttccaggccagtgccggcggcgttccgatcgcaacgtttgtggcctacgagcccatgtcgcggctgcaggcgctgctccgccgcaacagccaagggcacatttcgctgttggatcgtgatggccttcgggttctggccagccaggacacgggcgctgcaggcaaggccgcggcgcccgacagcgactgggtgttgctgggtgacgccacccgcgcgcgctttcacaacggccggttcactctggcattgccggtggctggtacaccttggacgttggtggaaacctaccaatggaccgatatcctgcgtggcatcgctcccatgctgttgtccggtggtgcactcctggttgccgcgcttgcgctgctgtgggtgctgctgctctggctgcaccggcgcatgtacactccggcgttgcggcaggtgaaggcgatctacgcccgcgatgcgcgcctgcgcctgctgctggaccacgttccggtcggcgtggcgttgctggatgcccggaccggcgatgtgcaggactggaatggcccgctgcagcgcatggatcgcttgaccggcgcgcgcttgctgccgcagttgcgcgccgctgcactgcaggcggatctcagcgggggggcggtgaccctcacgggtgacctccgcttcgccgcccagtcacagcaacggtttttccaccggacgcaggtgcatggcggtggccaggcctggccgggaggcgtgctgctgatggtggaggacgtgagcgaggccatgcacgcacttcacgaagagcgggaaaggactgcgcaggcggaggcccgtagtcgtgccaaatcgaatttcgttgcggcgatgagtcacgagatccgcacgccactgcacggcatcatcggccacctggagctgctggcgcgggcgccactttcggccgaaccgctcgaacgcgtgttgcgcttgcggcagtcggctgattcgttgatggacatcatcaccgatgtgcttgacctgtcgcgcatcgagtccgggcaatggagcctggtaccggagcgtttcgcgccaggctgcctgctggagcgcgtggcggtgctctacgcaccggtcgcccaggccaagggcctgcagctggattgcgtgattgccgaggatgtcgccgcaagcgtggtcgcaccgatggccgccgtcgagcgcgtcctgcgcaaccttgccagcaatgcgctgaagttcaccgcttccggccgggtccagctgggtgtgtcgagctggcgcgcggacggccaggcctggttgcgatttgatgccactgactcgggcatcggcctgagcgcagacgaatgcgagcgactgttccagcccttcgtgcaggccgatgccagcattctggtccgctttggcggttccgggctggggctggcactgtgccagcagctgtgcgaacgcatgggagggcgcatacaggtgcagagcacgcccggggtgggcagccgcttcctgttcgatgtgccgctggtaccggcaccggcctcccccgtggcggtgccgcttgccggtcgatgtgtcggattggttgccgcgccggggccctggcgccgtgaactggagcgacgcctccagaggtggggcgcacaggccaggctgccatccgcgaacgacgatcaccagccttgggcagacctgccgatggaggcgccgatcgtgatgttcgagcccagtccggagtcgcgccagcaggtcctgcattccggccgcgcctgggtggaggtctgccgctatggccccctgcgcgcgcaaccccatgagggaggacaccgggtttcttgttatgccagtgaggcattgtgccgggttttgctgggtccggtcgcgggcgggatgtcgaatcggccacatactgacgtaatcggataa

SEQ ID NO: 500469 - DNA, 3258 bp, Stenotrophomonas maltophilia
ttgattacagccctggtgctgctggcgaccgtcgtcagctctttcgccgacgtcgaagagttccacgcgcgtgagcgccagtccttcctggaagcccgcgcggcgctggactatttcctgttccagcgtgaccgcgcatatgccacctccatcaatggcaacgatgtgctctggcgcgaccagcaggccctgctgcagcagggtggcatgccgctggtcaagcgtttccacagccagggcgaggaagtggtggtgcgtgccgaagggcgtaccgctgtaccctggctggtgctggggttggcggacaacccgttgccggatgccgacctcgccgcttacctcggcatgatcgacgtctactcggcgtacaccgccgactccatcacctcgcaggatgcacccgggccggtggcgatgtatgcctacgagccgcaggggcgcctgttggcggtatccaacgtgcgcgacgaagcgcagctgttgcagacgctgggcgtggcgacgcggcagcaggcctttgcccgcctgctgcgcaacgaaccggaggtgcgccggcagccgccgcggcccgggccggtgaaggcggcttcgcgcgaaggacgcctgatgtcgcggtttgcggtcaaccccctcaacgggcaaccctcgctggtgggcgtggtgaccatggccgaaggcaccacgccttacttccggcgcgtggtgttcgagtcgatcgacaacatcaagtcgcggttggaggcgcgcgaggaggggcgctatctggtggcgacccaggatcaccgcgtggtcttcagcagtggcggcctgacccgcaaagagcagggcgtgctgctgggggcggtgggcagtgaggtcggcgcgcggcccgtgcggcaatacacagagggccgcttcatcctcagttgcaacctgccgggcgtggactggacgctgagccatgtctatgactggaccgacgtgtggggtgcccagggcccgtacctgctggcgcgctggctcagcgcgctgctgatcatcggcctgctctggtggctgctgcagcgcatcgaccgccgcgtgttcacgcccgccctggctgacgcctcgcgggtctacgaaagtgaggcgttgagccgggcgatcatcggcaccgcgcccatcgggctggcgctgttggcccgcgacaacggccagcctctgctgcagaacgagacggcacgtgcgttggtcggccatgaaccggacgacggcgctgccgtcgcgccgctctacgccaggcttgcggaactgggccggggtgaaacaggcgaggatgcgctggagcttcagtggtcgcccagtgataccggcagcaccacccagttgcagatcagcctggccaaggccagctaccacgaccaggccgtgtgggtctgcgcgctgcgtgatgtcaccgcgcaggtcgagctggaggaaaacctgcgccgtgcgcgcgaagactccgaggctgcgcggcaatcggcagaagcggccaaccgggccaagtccgccttcgtggccaccatgagccacgatatccgcacgccgctcaatggcgtcctgggccaccttgagctgctggggcgttcctccctgcagcccactcagcgcgagcgcctggaacgcattcgcttctccgccgatgccctcatgcgcatcatcagtgacgtgctggatttctcgaagatagaagccggccagctggacgtggaggcggccccgttcgcgctgcggccgttgattgagggtgtcgccctgctgtatgcccccgaggcactgcgcaagggcgtgcgattgtatttcgccgttgaggcgccgcaggccgtcgactgcatcggtgatgcccaccgcatccgccagattctcaacaacctggtcagcaatgcagtgaagttcactgcgtcagggcgcatcgcgctgcgtgccgaactggacgatgacgagggcaagggaagctggctgcgtgtccaggtggtggactcgggcatcggcatgaccaaggagcaggctgcgcagctgttccagccgttccagcaagccgatgcaagtgtttcgcgtcgttacggcggcagcggcctgggcctggcgctgtgccagcagctggcacatgcgatgggtggcgacgtatcggttgagagcacggtaggcgtgggcagcagcttcaccctgagactgcccttgcgcacgcaggccgctgcgcttccagcaacgcagccgctgcaggacatgcacatcaccgtactgtcgtcttcgccggaatggcgtagcgaagtcgagcgcctgttgctgggctggggggcgcacgtgcaggtgctcggtcagccacagccggacatcgatggcgatgtgctggtggtcgtgggcgaccatcggccttgggaagaggctgaagaacatgacctcgcaagctgccatcaacgctgggtgttcgcccatgcacaggggccgttgattccagaaaaacgcgcggagttcaccaaggtcacctgctatgccagcgaggcgctgctggccgccatcggtgcacaggaggagcgcgtggcgagtgcgccgccgcagcaaccaccggttgccgacaggcgtgggcgcgtgttgctggccgaagacaacgcggtcaaccgcgagctcatccagcagcagttggaggaactcgggttcgccgtggataccgccgaagacgggcaggccgctttggccctgtggcgagacgacacctacctggccgtgctgaccgacatcaacatgccggtaatggacggctacgcattggcacgcgaactgcgcgagcgcgggcaatccctgccgatcctggcgatcactgccaccgcgctggccagcgagcgcgaacgctgcctggctgcaggcatcgacgacctgctgctgaagccactgaatctggatcgcctcgaagctggcctgctgaaggcgcgggcgctggcggcaccggtgccgccgccaacgccgcggccgatctctgcagccatccgggaactgttcgtcaaaaccggcgacacggacctgctcgcgatcagccaggcccgggccgaacaggatgatcatcgcctgctggatcgcgtgcatgccttcaagggggtactgcagatgttgggcgaggaggcgttggccgcgcggtgtggtgccatcgagcaggcgctgcgggaaggccgcggcgtacctgcggacgagctggacgccctgcaggcgggtctgcaggcctgcgtggacagctatcgccgtgggctggcgcctgcgccatga

SEQ ID NO: 500470 - DNA, 654 bp, Stenotrophomonas maltophilia
atgaactcgctggccattcgtgttgcccttgccgacgaccacccggtgatccgcctgggcgtgcagagcgcgcttgatgaagcacctgccatccagtgcgttggcacggcggccgattccactgagctgatggcgctgctgcagcgcgaaccctgcgatgtactggtgaccgactacgccatgccgggcggcaaccatggcgatggcctggacatgctggcggtgctgcagcggcagtttccgctgctgcgcatcgtggtcatgaccggcctcgaccagcccggcctgatccacaagctggactccagcggcgtggccgggatcgtcagcaagtccgacgatctctcgcacgtgcaggcggcggtaatggcggtctacgcacaacgccgttaccactcgccgggggtgctcgagcaattgcgacgcaaggaacagcggcgcgtgatcaagctgtcgccgcgggagaccgaggttgtcgcgttgttcatcggcgggctgagcatcaacgagatcgccctgaagctcgatctcaagaagcagaccgtcagcacccagaaggtcaatgccatgcgcaagcttggcatcgagcgcgacgcagaactgtactcgttcgccgccgacctcggcctggaacccgggcctggccacgactga

SEQ ID NO: 500471 - DNA, 660 bp, Stenotrophomonas maltophilia
atgaacatccgcgtcatcatcgccgatgaccatcctgtcatcctcgccggcgtgcgcgaatccctcgcctcggtggcaggcatcgagatcgtcgccactgccggaaattctacgttattggtggatatgctgagcaagctctccatcgatgtggcggttaccgatttttccatgcctggcggcgagtatggcgatggggtcaccatgctcggcttcctgcgcaggcgcttcccgaacatgccactggtggtgcttaccagcatatcaggggtgcaggttctggctggtatcgagcgcgccggggtggcctgcatcgtcggcaagctcgaccccatcgccgaactgaccacggccatcgaagccgctgccaggggcgagcgctacctgtccggcagcatcgcgcagcaactggagatgacccgcgacgtggcattgaccaagcgtgagatcgaagttctgaggatgatcgcgcagggcatgacccagaaggagattgccgagcagctcaagcgcagccggcagaccgtcagcacccagaagaagtcggccatgagcaagctcggcctgaagcgcaccagcgaaatattcgattacgcggttgaccagggcctggtgtctgcctcgcaggtggcgcgcaaggggcctgcaggtggtcgctag

SEQ ID NO: 500472 - DNA, 231 bp, Stenotrophomonas maltophilia
gtgccgccactacttgacgcccgcctcgcatcgctgatgttccgcttcagccagctgacaccgcatgggcagaagcgttacatggcgctgttgaacgactacctgtacgcatcgccgctgcaacggcggcagctgcgccaggcatgggaggccctgcttgcccagccctgtggcgatgcagatgacgcccggcattggatgcgggcgccgcgcaggaaagggcgcccctga

SEQ ID NO: 500473 - DNA, 939 bp, Stenotrophomonas maltophilia
atgaagaacacgcatcgcaataccctgctggccgccctgctggtgtgcctggccccggccgccgcctctgctgcagaaggctacctgaccccggcaacgaacaacggcagcggctacatgccgtcgggctataccaagctgtacttcgagctgggtgacggtgactgggccgcaaagctgaagctgcctggcaagccgcagcagggtgatcacgtcgtcctcagctcgctgtcttccaagtacgccacgctggacgcggccaagactgcgttcgccaaccaggtgtatctgccggtgcaggacctgagcaacatggatctgcgctggaccgcgagcgcccagcgctgggacgtggtgggcggcgaatcggcgcgtgtggtctatggccgcaacctgcccagccaggagattgaatcgtccaaccacctggtgacccaggtgggcctgtacgacaccaagcgtgcaacgtccctgggcctgccggcctgggctccgcagggcgctgtgctggtgattgccaatggttccagcaacgatgtgcaggttcgcccgtcgtcgttggtcggtaatgctggcagcgtctgcaatgccaaccagaactgcggcttcgtgtatgccgccgatggcaagtggcatgcccgccagggccatgcgcgcgtggccgcgcaggcacagctgcccgcgccgacggcgcgttggaacgatgtcttcctcggcgaccccgccgaggacatcggcatgcagccgacgatgcgcctgccggcacagggtgtggagggtgacatctaccagatcaccaatctgcatggcgcccgcttcacccgggtcctggctgaccacaccgacatgccgagcggcatctacgtgacgtctgcccatcgcctggtgctgcgttacgactcggcccgcggcctgtggatccgtcaggcgctgcgctga

SEQ ID NO: 500474 - DNA, 684 bp, Stenotrophomonas maltophilia
atgaagaccccgatccttgttctggcactggccaccgccagcgccttgccgcaggttgccctggccgaagccgcggatggctactacgccactgttcgcatcattgatgccgaccaccgcgcgcgcaacatggacgccagtgcccgccccggcgttggtcgcttcattgccggtgatgaacaccagcgcttcgtgaccggtgccatcggcgtgggctacgcacatggcaatggctggcgtaccgaaggtgaatacaccctgcgccgcagtgacacctacaccagcggttccagcctgttcgcctccagcttcaacaatcatgacgtcacctcgcagcgactgatggccaacgcctaccgcgatttcgccatcaacggtgcgtggtcgctgtatgccagcgccggcgccggtctggcccagctcaagtccggtggctggcaaggcaacgaaagccgccgctatggcagcaccacccgcgtcgggctggcctggtcggtgggtgctggcgtgtccgtggccgcctctgatcgcatgcacatcgatctgggttaccgctatgtggatatgggcagcaccgaaagcggctggaataccttcggcaacgcgcgtggcctgcaggacgaaaagatgaagctggatctggcctccagcgagctgcatctgggcgcgcgcctggcgttctga

SEQ ID NO: 500475 - DNA, 525 bp, Stenotrophomonas maltophilia
atgaacaagcttgcaattgctttgtccgccgcgctgtcgctgggcgctgctgcgtcggccaatgcggccgatgccaccatcaacttcagcggcacgattaccgccatgacctgcaccattggcgcaggtactgccaccggaacctcggtcgccctgccggagctgaccacggattcgatcaacagcggcgccgccaatcgccagacggcttttgatctggtcatgggtaccgcttctaacggctgctctccgggaaccgtcaagctccagttcaagaacagtggtaccaccactgacgggatgctgaagaatgcggccgccaccgacgcggccagcggtgttgcgcttgccatcatggacgccggcacggcccttgatctcaccaaggacaccctggatgccaccttcgatgcgtccaacaccaccaagacctggccgcttgttgcgagctacgagaaggagggcaccggcgatgtcggcgccggcaacttctctgccgatctggtagtcgacgttactttctga

SEQ ID NO: 500476 - DNA, 738 bp, Stenotrophomonas maltophilia
atgctgaaaatcaagcccaccctgatgatggcaggctgcgcagctgctctcatgttctctacgcttgatgcgcatgccagcgtggtcatgaatggcacgcgcgtggtgtttgccgctgaggagcgtgaagcaagtctgcgtttgcagaacgttggcaccaccgccaacctggtccaggcgtggatcgatgatggcaagacggtgagtgaaaccccaggtgctgccggtgctgtgccctttgccattcgtccgccgatcttccgcatggagggcgggcgcagccagctgcttcggatcttccacaccggcgaagccatgcccggcgatagggagagtctctactacctcaacattctggctgtgccgggaaagccggctggtgtagctgacgggcggcacctgaacgtggtggtgcggacccgcatgaaactcttctatcgaccgaagggcctgtccgcggcgggtgcggcagcggcccccagcaagctgcaatggtcactggtgaaggaccagaagggttgggtgctgaactcgaccaatccaacgccttaccacgtaagtgtcgattccatccaggcgggggagaaggtcacggcggatgtagcgttgccattggcaacgacgagctatcgactttcccacgcccaggccaatgcactgggaccgcaggtgaagttccagtacatcagcgctcacggcgcaaagattgagatgacatccccactggctcggccctga

SEQ ID NO: 500477 - DNA, 2577 bp, Stenotrophomonas maltophilia
atgatgagcccccagtcgccaatgcggttgcgcccgagtcgtcttgcgacagcggtgcttgttgcattgctgccgatggccgcttgcgcagccccggcacttgagttcaacgccgaccttctgcacggcggtatcggtgccaacctcgatatgagccgcttcgagcgggacggccctctgcccggtatctacagcgccgacatcctggtcaatggcacgaacatgggccgccaggacgtcgaggtgcgcgcccggggtgacgcggaccatatctgcttgtctcccgaacttttccgcctgatcgggctggaagtggacaagctcgaagccgcgcgcgaaaagagcgcagatgcggattggctgcagttgccggagtcgctgacgtgcgaagacatctcccggtacattccatcggcaagcgtgcacctggactccggcgagcaagtcctggaggtcagtgtgccgcaggcctatcttcgcgcaaaccgtcacggttgggtcgaatcagatcgatgggatcacggcgtcaatgccgcgatgctgaactacaacatcaaccacagccgcaaggagtacgaagggcggacgagccagcataccggcgtcaccgttgacgcagggctcaaccttggcgcctggcgcttccgccatgcgggctacttctcgcaggatggcaatggaaaccgcggctacagtgccaaccgcagctatgcccagcgggagatccgcgcgtggaacgcacagctgaccctgggcgaggcaaccaccagcggcgacgtgtttgatggcgtgaactatcgcggtgtcaatctgcgtaccgatcctcgcatgttgccggaggtgctcggcaattacgcgcccgtggtgcgcggcgtggcgcagaccaatgcacaagtcaccattcgccagcgcggccaggtcatcttcgagacgaccgtggccccgggtccgttcgaaatcgatgatctgcgcaacagctccggttccggcgaccttgaagttgaggtctctgaagcggacggtcgcgtggagacctttgtcgtgccttacgcttcggttccccagcttctgcgcgaagggcagcagcgcttcagcctgacagtgggcgagctgaacaatgatggcctttcggaggcgccgacctttgttgaggcgaccctgcgtcgtggcgtgggaagcgcgttcaccgcatatggtggtgccaccgtcgccgatggctaccatgccatcgtactgggcggcgcgctcaatacacgtatcggggccttttcgggggatgtgacgttctctgatacgcggttgccgtcgccgagcacagccttcggcgagcgcatgcgcggccaatcgtatcgcttggcctacagccggagcttcgactcggccaccaacctgacggtggcggcctaccgctactccaccgaaggatatctctccttcagtgacgcagcgcgcttgcgcgatgacctgatcagtggcaatggcgatcccaggctgcagcgacagcgcagccggttggatctgacggtgactcagcgcttggcgaagggcgcgctgttcctcagcggaagcagcgcggactactggagcgataaccggcggaccacgaacttctcgctgggttacaacggccagctggggcgcgcgtcctacagcatcagtgcgcgccgctcactggagtcgtcactgctcaacagcggctcccagaagcagaccaccggcgcctacctcagcgtgaccgtacccttgggacgtgcgcctgcggcgccgcgactgagcgcgagcgcgaacagcgactccagcggtggccggtaccgagcgggtgtttccgctggcttcggtcgggatatgcagggtaactacaatctatcctacagccaggctggtgcgaaccgagatattggcgcgaacgtggcctatgaggcaccaatggccagcctgggtgcttcatggaaccgcagccagaacggccagcagtttggcgtgacggcatccggcggcgtgctggcgcacggcgacggcatcaccttctcgcagcgcctcggcgaaaccattggcctgctgcacgtgccagaggcagcgggcgccaaggtagggaatcagcgcggtgtaaagaccgataggcgcggcttcgctgtggtgccgtacctgagcccttatcgcctgaatgagatctccgttgatcccatgggcatgacctcggacgtggagctgaaaagcgggtccgccacagcggtaccgaccgcgggtgcggtggtgaaggccgtcattccgactgcaagcggccgcagtgccctgatcgaggcgctcgacaatgaggggcagccgttgccgttcggtctggacgtatacgacgaagacggacaggtggtcggcgtggtcgggcagggcagccgcctgtgggtgcgaggtgtcagcgagaaaggaacgctgtgggtcagatcgaacgaggccgccggtcactgcgccattgcctacgacctttccgcggcgaacgaacagctctacatcagccagtgccttcgctccacggttgccaacattgccgcgacaggcgcagctgatggcgaccagaactaa

SEQ ID NO: 500478 - DNA, 1065 bp, Stenotrophomonas maltophilia
atgaacagtctgacgaacttcaagcagcgggcctggtgtggcgctctgcaaggggcgctcgcgctcgcgctcctgacaggcgcggccgaagccagcgcggcgtgcatcgccggatccgagcactttctgagcactccaacgaccgtgctgcatgaaggtttcagctatggcagccgagtgacagcgacgggagccagggccacagtgctccgggaatgcgacaggttcagtggcgccgacctcagcatctcgacctcgcttgcatatgtgggtgaagttggaggtgtgccgactttcgaaacatcaaacagagccatcggtgcccagttcagctatcgctacatagagtcggccgggttgggtaccgaggtctggtcttcctggttgaatctggatgatggaagtgacgactttcacgcgaaagcccagttcgacaggaacgtggatcggacaggcctgcccattgaggtcgaggtgacgttcgttgcattgagggacatcggaggcaacgagtcgatcagcgttgcagatctgaatcctgcgttccagctggaagacagaacatacggagaggacctgcccgccgcgatgacgacaggtttctcgatgcgccccaggcggtatgcattctgcgctttcaccagtgcaccccccagctcgcagcggctcgcaacgacagccatcaacatgttgacgcgggaaggtgaagttggacccgcggtcgacttctctttttcctggagttgcgttgcaggcgacgaccatgcaggaggcgcggacttccagttcctgtcgagcaaggcgctgggcacgtcgaacggcctgctggccgtggatggagatgccaagggggtcgatatgctggtcacgatgaaggataaatcagggaaacagatgccggttcccttgggcacgcactggtgggcctcgcatcattatggcagaggctatcccctgcccagtatcggcagccaggagatgcaggttcgattccgcaggaacaaggacgctatcacgccgggcgatgcgaccagcaccatgacggtgcgtctgtcgctcttctag

SEQ ID NO: 500479 - DNA, 936 bp, Stenotrophomonas maltophilia
atgccaacgtctttcggctattacgattcgttcaagacgggcgatgtcatggtgggctgggcacgtgcagtcgtgccgtactacgtcgactgcagcccgactgcttccgcccagttgtccattgggccggcaaccggccttgcaggtgtgcacgatgggcgaattacgttcaagacagagcatgatggcgtcggcatccagcttgagtaccgctacatccagtccatcgcaggctccgggcaacccgtttactcggaatggcaggaagtgggtactgccgcttcatccctgatcgcgcgggcggagtacatgcgggataatccgaccgcgtcgattcccatcgaagtggactaccgctttatcgcgctgcgcgatttctcagatgaatcgattgcgatgggcgatatcgaacccttgcgcgtgaccgacggcagccatggcctgtcactcaaccagttgatcgtggaaggggttcgccagagtccgcgggtggaggcgagctgcgagttcagtgcccggcctccggcgaggctgcagctgccgctgacggctgcctccagccttcgcgcgcctggagacgtggggccagccgccgatttctccttcagctggagctgccgtgccggcaatcagggccatagtggcaagggagatttccgtttcaagtccgccgctgcggtctctggcagccccggacagctctccaccaccggcgatgccggaggtgtgaacatgctggtcacccttgagcggaaggacggcagccaggagcccatcgtgttcgacacctggtatgcaaaccgcctgagccctggtacgggtggtctgcctgccaatggcagccaggcaatgcaggtgcgcttcgtccgcaccgctcaaccgatcgtaccgggggtggccagcagcacactgaccatcgaagccattccctactag

SEQ ID NO: 500480 - DNA, 600 bp, Stenotrophomonas maltophilia
atgaacccgcgcaacgctcttgcaatgccagtgctgcttgcacttgccctttccgcaaccagccaggccgccaccgctgacctcagcattggcggcagcatcgagcccagcccgtgctcgctgaccttcaccgacggcctgctgccgtcctttggcgatctgaagccgactccgtcctccgacggtaaattggcattccgcggcatcatcgacgcgccgctggagatcgaatgccccaacgcgaccgttctgacaatgcacttctcggaccaggccctcacgggcgcaccgatgccgccgaagaacttcttctatctgctgaaggacgacgggaatgagatgggaagggtgcagatcgccatgagcggaggaaaggccgacgataaggccattgatttcgtcaatgcgactggcaattccaatggcgtcagggctgatgaccccgacggcttcatgcagatgggctggaataaggaggccttcagccgcgtcaccggcatgctcaacatttccgtgatcggagatgcggttgatcctgccgagctcaccgattcaaccaagctgaccagccggatcggtatcgagctcaactatctctga

SEQ ID NO: 500481 - DNA, 606 bp, Stenotrophomonas maltophilia
atgcatccaaccctccgtgcactgctcggcgccaccctgctgcctgcctgttcggctgctgccgcaacaagcactctggacatcagcggcacgatcacggtcaaggccgcgccatgtgagatcagcatcgccgaccaggacaagcttgcgtttggccagatcgcctacgagaacctgaagccgagcgagatgacagagctggcagcggtcaccctgcccgccacgctcacctgcccgaacggcgccaggcgtgtccagatgtcgttcgtcgacaacatggaccccctcacgatgcgcgccagcttcaccatcaaggacaggacagataccagcaagttggccggcgtctacatcgtccggctgatggacggagtcaaccagggcaggttgtcaggcatctggcgatttgacggtaaaaacgacgcccacctgagcgatcaggcctgggccaataccccgggcagcggcatgggcttcctgcaggcagtggagaatgcgagcttcaacatcaatgtcaagccacgcctgttgtcccaggccgcgttttcacccgctgacgagatcgacctgatcggtagtttcaccatcaatctcatctatatctaa

SEQ ID NO: 500482 - DNA, 645 bp, Stenotrophomonas maltophilia
atgaacaagaaaatgcttaccctggccgtcgctctgctggccgcgtcctcctctgccagcgcggcggaatcggccacgctggaagtgaccggcaccatcaccccgcccccctgcaccatcggcctggacggcaccggcatggtgaacctcggcgagatcaaaaccgaatcgctgtccaccaccgttccgaccaagctgaccacgcagtcgatcgacctgagcgtcagctgccccggcaagagccagttcgccatcagtgcggtcgatgcccggagcgcaaacctggttgacgctgccgtgggtgtggccaagaccggtgcaacgagcgatcaggcgttcgggctgggcagcgaggatgggcaggacgtgggtgcgtacgtgatctcgctggccagcccgatcactgacaatggcagctccagcatgatcacgcgcaccagcggtggcagctggagcgcggcgacggtgctccagccgggcgacggccagcagaccgcctggggcaacaaccaggcggtgacggcaacgaaggacgccaaggttacgctcaacgtggacgccgccattgcttccctcagcgagttggacctcagcaacagcatcgacatccagggccaggccaccattgaactgacggtgctgtaa

SEQ ID NO: 500483 - DNA, 2418 bp, Stenotrophomonas maltophilia
atgaacgacgcctggctgcggcattcggcgctggcgttggccgtgagcggcctgctgcacgcccctgcggcatcggcacaggacataccggtcgaggccgaattcgaccgacagatgctgataagccggggcctggctccggaactggcggatctgttccgcaaagcgccgcaattcacaccgggttcgcaccgtgttgccctgcaggtcaatggccgtggccgcggttcggtcgacgcgcagttcagcacctccggcgagctgcgcgcaactctggcgctgttgcgcgatgcgcggctgcacacgccacgctcggtcgcggacctcggcgaagacgcaaccttcgacctgcgccaggcgtggccacaggccgtcgtgcgcccgcagcctggccagcaggcgctgcacctggtgctgcctgtggaggcgctggacgatgcgaacggaactcccgatgactggcatcaaggcggcagcgctgcgttgctgaactacgacgtctcgtccaatacccgggtggccgctggccgcagccagacgtcgtacaccgccttcaccgaagtcggggtcaacaccggcggctggatcctgcgcagccggcagtccttcagccactcgggcagcgcctcgcacctgcaggtggtggagagctttgcgcagcgcagcatggtgcaccgccgccagctgctgcagatcggtgagttggctgtggccggcccgttgtttggcggcgcgctgattaccggcatccagctgcttccggaggacgcgctgcccgcgccggaggctgggggcgtcgtggttgaaggccttgccaacagtgaggcacgggtcgaggtccgccaatccggcgtattgatccacagcacgctggtgccacctgggcccttcgcgttgtctgccatctcgccacgcagtgccacggccgacctggaggtcacggtccatgagcaggacggcgaacgacgcttccaggtcccggcaaccagcttcaaccgtgcccgcctggcacgccccggtgccactctcgctgccggccagctgcgtagattcgatagcgtacgtggcggtagccgcagtttgctgaccaccagcagcgcctggcgcctgcccgccgcagacgcggtcctcagcggcggtgcgttgctgagcgagcgctatcaagcggtcggcctgggcctggaccacgtactgcaaggcaacagccgcgccatcatcagtggccgcacaacgttcgcgcgcgcggcgcacgggtatggcctttccatggacctgcggctcggcacgcaatggggacccttgcggttgaacctggggggcagccggcgtacccggggctatcgcgatctgtacgaactggatcctggcgagccctctgcaaccctgcagggccgggtgaagtggcagggtgcggccgggctcgcgggcgccacccagcgttggggtagtttcagcgcgcactgggcaccattggccacattcgacggccggcgcggcagccgcatgacgggcagctggtcgcaaaggatcggccgcagcacgctcagtgccaccctcgaatccgtgagtggccggctgcaaccgggcgccaggcgcgatcgcgccgcgtacctgtcgttgtcggtaccactcaacggcgcctcgttgcgcgcgaacgtgcgccagcgcaatggccgcaacaccatggcgttggacgccgccggccgcgccacgccgcagctgaactggcgcgcttcggcacagcagcacggcggccggcaaactacgcgccagttctctgcgggcacgggcctgctgctgccacgggcgcgcgttgccgccagcatgacgctgggcgagtcaagccggacgctcaatacccagctcagtggcggcatggtgctgcacccgcagggactgaccttctcgccgacccgggtgcaggacaccttcggtatcgccacggtcggttccatcaagggcgtccgcctcagcaccggtggcggcagcgcctggaccgaccgcaaaggccgggccgtcctgccgaacctgcgcgcctatgccgacacccgcgtgaatatcgagggcggcagcctgccccgccgcgccgacgtgcagaacggaacgcgaacgctgcgcgcggcgcgcggctcggtcagctacgtgtcattcaaggttgaactcaaccagcgggcgttccttgccgccacctacggtgatggcagtcccgttcccaaagggctcactgtcctggccgatggccagttcctcacggccacagtcgaaggcggccgcatttacctgccctcctaccagccacagcagcggctgcagctggtgcttgggggcgggcgcagatgcgagctcgaggtcgacctgcccgaacaggtcgccgaggacgcgttcttccaggagggcacggcgcgctgctcaacctga

SEQ ID NO: 500484 - DNA, 702 bp, Stenotrophomonas maltophilia
atgtccgccagcctacccgtactgcaccgctgcatcctggccatttcctgcgcattgattgccagcaatgcgtcagccaatggcatgcaaccccagtcgaccatcgtgattctcgacgaggcggtaggcgaagcggcaatggatgtaaccaacacagatgcgacgccggcactgctgcataccgtggtgctggatattccggaagatcccgataccgtggtgatcgctacgccccccgtcgcgcgcgtcgaccccgggcaacagcagatggtccgcttcatctatcagggtccgccgctgcgtacgcagcgcctgaagcgggtcaccttcgagggtattggccattcactggaagctgatggccaggcggtggtcggtatcggtatccgccagaacctgccattgctgctgcatccgaaggggctggccagaaacaacacgccgtggacattgctgcagtggtcccgcgagggcgacgcgctgcgggtcacaaacgacagcccgtacgttgtccgcttgacaccgtccgtaaccctccagccctcggcgacggtggtcacgctgcaacggccctacgtgctcccgggagagtcattgacgttgccggtttctggcaacgcaggcaatgacaccgtcgtccgcctggaacccgccagcgtttacggattcgctgccggcagctatgacgcgccgttgaaatga

SEQ ID NO: 500485 - DNA, 918 bp, Stenotrophomonas maltophilia
atggcccggggcatcactgaatctgacgtccatagcgccgccgacgaattggtcggcaagggcgaacgcccaaccgtcgagcggatccgggctcacctggggacaggctcgccgaacaccgtgacccgctggctggagacgtggtggaagcgacttggcacgcgcctgcagccagcgcgtccggacctggaagatgcaccagcggtgttagcagaactcgccggacaatggtgggagctagcgttgagtcatgcccgggaggccgcccatcgagagcttgcagcggctgagcagtcactggccgcccggcgtgatgcactggaggcaaaatcccggcttgtagctgacgagctgacgcaaatgcgctcagagcgcgacgatgctctcacaggagagaggattgccgctacgcaagctgcagagctacagcgattggttgaccagctccgtctgcagatgtcagagcttgtagagcagcgggatgtcgagcttcgaagagccgatcgaaatgaagcatcgagacagcaactcgacgccaggcttcatgaggcgctagaaacggcgaaatctgagcgagaagactgggccgagtacaccagatctgtcgagaatcgggcgctcagcgatgttgatcgcgcccgacaggaggtgaaagaactccaggtgcagctaagcaaggcatccgagcaacacagggctcttgagaagcagctgcgccaggatatccagaccgcccaagcagcggccgccacggccagtcagtctgccgatatcctgcgtggcagatgtgacgcgctcgagggacaactttcagggcttcgagatttgccagctcagctggaagttgcattcaagcgatccaaagaagttcgcatcgctgctgatgttaggccgaaacgcaagcggccgaagcaatga

SEQ ID NO: 500486 - DNA, 1086 bp, Stenotrophomonas maltophilia
atgaaagatatttctacaattcccgcacttgccgcgacggccacctgcctagcactgcccgaacagctggcccaacaggcttccgatgcggtccgcgagctgctggccgaagccgcagccgagaacaccacccgcagctacagcagcgctctgcgctactgggccggctggcacgtggcgcgctacggcatcgagttggccttgccggtacccgaagccatcgtgctgcagttcgtggtcgaccatgtgcagcgccggtcggctgatggcgaattggcctgggaacttccaccagccgtcgaccaggccttggtggccgccggcctcaaagccaaggtcggcccgtggaccttggccaccgtgcgccatcgcgttgccgtgctgtccaccgcgcaccgactcaagcacgtggccaatccctgcgagcagcctgcaattcgcaccgtgctcagccgcgcggcgcgggccgcggtcaaacgcggcgagcgcccgcgcaagaagactgcgatcaccttggccgagctggaggccatgttggccacctgtgacgacagcctggaaggaattcgggatcgcgccctactctgcttcgggttcgctagtggcggccgccggcgcagcgagatcgccgctgccgacctgcgcgacctgcgccggattggcgaggcgggctatatctaccggctggagcacagtaagacccagcaggccggggttacggcgacctcgaccccggacaagccggtgctcgatcgggccgccctcgccctgcaggactggctggacgcagccgggatcatcgaaggggcgatcttccggcggctctggaaacagcgggttggccctgccttgtccccggcggctgtgggtgagattgtccagcggcgggctcgcctggccggactggagggcgattttggcgggcatagcctgcgctcggggttcgtgaccgaggccagccgccagggtgttgccctgccggcaatcatgcagctgaccgagcaccggtcagtgtcaagcgttctggggtactttcaagctggtggtgctgcagcaaacccaggtgctcggctacttgaagactga

SEQ ID NO: 500487 - DNA, 621 bp, Stenotrophomonas maltophilia
atgagtagattttatttttccatgacgcgcggcgccaaggagttcatggacgcgttcactcaaaggttggcagaagcgcaccacgaggcaacgcagaaatttgtatctggcaagaacgtgcaccacttacgacacggcgccggatggagactctggagtgcgagcgagagatcggatgacgattctttcaaggtccactcgacagagatacaaactagcctcgacgacatcgcggatcacaacgttgagagcctagcatccgctatgcgtcgggctgcagaagatatggaggcgcagctcgcaggaagtgtctatgggctgcttagcgaaacttgtgagtcctcaggtaacgtggtctcagcgagttcgcaagcgtccttggcggagacattctacgagaccatcgacaagatcgaattcggcgccgacagatttggcaacgtacaactccctgctcttcatgcgggcaaagaagtagccattagaatgctccatgccttggagtcagcgtcggatgatttcaggaagagatttgaagaactaaaagaaaggaagattcaggccgctctccagcgtgaaattgaacgaaaggcacgtttcgtgagctacgggggagagtga

SEQ ID NO: 500488 - DNA, 1905 bp, Stenotrophomonas maltophilia
atgagagctcttctggcaattggatgtgactcctatgatcatgtaactcctctctcgggggcagagagggatgccgatagggttttcaacgcacttttgagcgcaaacgtcccattctatgatgcggatcgatcaactctacttcgttctccgtgcaccgacgtcgttcggctggctctgaaagagctcctttttgatggcccgaagctcgacgtactgaccatctacttcgccgggcacggcaaggtggcgaacgggagctttttcatttgcctgcgcgatacacgaattggtgcgctctctgtaacatcgttgtcgttgggggacttgtttcgttacatcaatgaagccaaacccgctcagacaaacatcgtgatagatgcctgtgaaagtggtggcctaatagaagacctcaacgttctcctcaagggaaccttgtacggggaggtcggcacacctggtatcacgttgtttgctgcatctgcgagcaatcaggttgccaaggagactgccgaaggagggtttgcaactcaagcactcgtgtcgtacataacaggggagaaatttcttcgagacgatagccaaactctggatttgttggaggtcggcagaagaattcacgagagcttgagagtgattggacagagccctgtaatgtggggtctgaacctctacggtccaccgcagttctgcatcaatccgaactactctttgaatgatagcgagctgcggcaggcgttgaagacggcgggcgatgcatgcgatcagcctgcgcagcgcgaaatatcagatttgtggaagattcactatactcttcccgaggtttgggagcccaggactttcgttgatgggcttggcgcatgcctcaaagcatttggctcagatggcagtcgaaggggtatgctcgctaggacatactacgaagccacctgttctcgaatagtcggaagcagcgaggccatgcttagatcggaagtttgtgcggcgatgcttgcggctctcctgccgtggttgcatgaggcggagtgctatcagctttcccgcgatgtgtgtgacgacttggtggcggaatgctgctcagcacaactgagtgtaaagagcatagtgtccgaagacaggctggccatgctccgccatccagggggcggaccggcagatctattcaaccacccaataagaatatctgccctgatggcttggactgcattgccgcttattgtatacggtgaggcagcagggccggagagtgtggcgagtttcgctgcatgcgttgaagaactcttgaaggcatatccggcatgtatgactgtcgtatgcgaggagcaagcacccctcattgctgtggctgtttcgatgctcctattgaccgggaatcaggatctagcggaggaggcacttggctactatttctcctccttaaccgactctcgatcgaggatcgccgcgagttctctagatgggaaggctgccttgagctgcctgacttccatacaggactgtacggaggagtcactctttgaaggtgtggcgaatccatgtgaagcattagcggtggttctgcggctaggccacgctgcgaatctggatgacgtctttgatccgtatctttggcagctcgacggagctgccggcgttctcttcgttactgatgcttgggctgaattctcagctgagagaatttcaaagggtaaaaattctacgtttgagattggccgagatgtatttcgaatagcgcacttgtctgcagtagatgtatctagttccccttctgatcccgtccagcggctcgctgtcgtggctactgcactcctctttccagatagggttccttggttccttgtcgaagaggcgctacttcgaaatcagctaacgacggtctcacggaaggcggtggaaggttcgtga

SEQ ID NO: 500489 - DNA, 1119 bp, Stenotrophomonas maltophilia
atggtcgtttccttcaactatcgaaagatgcgcttggaatcggcaggggcgcttaccgcagcggttcttgccatgcagccatggccggttgtagcaatcgagtcgccccacgtggtggtggatgtggcctacaacccatcactggatctattcaacctgctcgacaacctgcccgattggttgtccggatacacttcctcggtctaccaaaaggagtggcaacaacgcttcggccttggggagcgggaccgacagttgttggcgggctatgcggcattccgccgtcgcacctcgccgttgggacgggatcaccaagtgaaggtcgctccagccggccggttgttcgccgggcccgacacccgcgatggcgatccctacgccagccatttcctggcggcacaatcgttcgatgcggccgtcagggaggccattgccagccagaacagtagtgaccaggcattgctgcggcagtactacgcgcgctttgctccgcgtgcccgtcagctgctggcaggacagacgcagttccatgctcagaaaagcgagctcgcgcggcagcttgcgtctgacccggttggtgagcttgcggatcagatgaaggcctttttcaaggtgacttctccgcctaccttccaagtgcgcttcctgtggtggccggaggcggcgcagacccaagcaaagctgcgcggcggctacattttcctattctcgacgtccgatgccgaggaggactgggcgccgattgtgatgcatgagtacagccactttctttcctctgagcagccgccggcgcagcggcagttgttggccgaaacctttgcagcgttgtgcccggaggcgctgacgctccggaacccgttgaatgctcttgaggagccactggcggtctattggggccagtaccgattcgagtatcaggtgcgtggtggcatgctgtcgcctgagtcctcctggtacatccagccacatgtagaccgggcagcgaaggcgctcgcggcagcgttcccggcagcaggtcttgcgccacggctgcagcccggtccgttgttgaaggcggcggcatccgtctgtgctgaggcccgggcagggatagcgccgaaggctggatttcagcagtga

SEQ ID NO: 500490 - DNA, 726 bp, Stenotrophomonas maltophilia
atgaacaacacacaccgccaaacgcgatcgccattggtgttgatcgctgaagatgagggcgacatcgcggatatcctgagtgcttatctcagccgctcagggttgcgcagcacccgtgctgtagacggcgaatctgcgcttgcgctgcaccgtcaactgcgtcctgatctggtcctgctggatgtgcaaatgccgaagctcgacggttggcaagtactgacggagctgcgccgccgtggcaatacccccgtcatcatgctcaccgcgctcgaccaggacgtggacaaactaacgggtctgcgggtcggtgcggatgactatgtggtcaagcccttcaatccggcggaggtcattgcccgtgtccaggccgttcttcgccgcagcgtggttgccgaggcaggagagataggttcgccaactgacgtcatccgccaagggcctttggatattgacctgcttagccacgaggtctttgtacgcgatgatcagccgcagcgggtgccggatttgacctacaccgagtttcgcctgctggcacacttggctcgcgcaccgcgtcaggtacacagtcgtgttagtttgctgcacgcttgcctacccgaaggcgaggcacaggagcgcacggttgacagccatgtcagcaaactgcgtcgaaagcttgagtctgtcgggattaccggcatcccggccacggtccgcggtgtcggttaccgcttcttggagtaa

SEQ ID NO: 500491 - DNA, 1077 bp, Stenotrophomonas maltophilia
atggctatcactggcaggaccatcggccaccagatcactctgtcaatcacgatcgctgcggtcgcgtcggcgatactttcgattggcggcttttacttcctgtactacttgatagtgaagctctatcccaattggtatcaagagccagactccatgacgccatcgggactcgagtggctctggatcgccctgacgtcgattgtggtggccgtgctggctaccctagtggcttcaaggctgactcgtcgcatcattaccccgctaaattccgtagctgagagcctgcgcagtgtcgccagcggcgacttgagcgcgcgagctcgtggaggagatagctcgatggtggaagcagcggcactggtccgcgatttcaattcaatggccgaacagctgagtcagatgtcgagaaaccgggtgttctggaatgcagcaattgcgcatgagctccgcacgccgatcaccattttgcgtggacgcgtacagggcatggccgatggagtgttcgagccagggccggaacaattcgataacatgctgacccatctcgaggggttaacccgcatcatcgaagacctgcgggtcgtcagtctcgccgagagcggtcatcttgatctccgcctccagcgagttgacgtcagcgaagaagtcagagcggttgtagatgcgatgtccgattcattgagagaaagcggcttctcgatctcggtcgacgcgccgttgtcgcccgctgattgcgacccctcgcgcatccgccaagcaacacttgctctcctggaaaatgctcgtcgccatgccaccccctgccctcttcgcatcagggttgctcgggatcatggcgagtgcatgatcgcggtccaggatagcgggcccggagtacccgaggccctgaaggaaacaatcttcgaagcgtttcaaaggactgacctctcgcgctcgcgccagagcggcggttccgggttgggtttggctgtggttcgcgcaatcgccgtcgcccatcaaggcaccgctcagtgccgcttgaacgaatgcggaggaagttcgttcgagatccgatggcccgtacacactcgccgctga

SEQ ID NO: 500492 - DNA, 927 bp, Stenotrophomonas maltophilia
atgacgaccccacttggccccgctgcggcggccaggagcattggccagcagaacgccgccgccaccctgaaagccatcctacgaacctatcccttgcagctcgcgggtacattctcgctggtcgcgctagagaacgccctcatgctggcctatcccctgttcgcgggctttgccgtggatgcaattatccgcgggaatgtgtggcaggcgatctcctacgccggagtggtcctacttttctggctggtcggtgcggcacgtcgcgcagtcgatacgcgcaccttcactcgaatctacgccgatctggcggtcaatgtggtgcaggcccagaggcgtctcggtcagaccgtatccacgtccgctgcgcgcgtggtgttggcacgggagttcgtggacttctttgaaaagcacgtgcctattatcgccacggccctggtgtcgatgtttggcgctgcggcgatgctgcttgcgattgagccattggtgggtacggccagcgttgttaccctgatcttcgcgctgctactgttgccggcatttgcacggcgcaatgaacagctacatggtcgactgaacaatcgtctcgagcacgaaatacggctagttgaccgggtcagcccctccgtactgcgccgccactacaccacgctttcacgtctacgaatcctgctgtctgaccgtgaagcaggtgcgttcttggtgagcggtaccgcagcggccacgctattcgctttgactatagcccggctcgcaagcaccgatcacgtgactcctggccatgtctatgcggtgatgacctacctttggaccttcgtcggtagcttggacgacgcaccgtcgatggtggatcagctggcaagactgaaagatattggccgcagggttagtccaggaatagaggaacgcgacggcgagagagcgcgatga

SEQ ID NO: 500493 - DNA, 1152 bp, Stenotrophomonas maltophilia
atgagtgctacgaacaaaattcgcttcatgtcgtgtcttgcgctcgcgagtcttctagcggcctgcgggggcagtaaggaaacgagcccagaggagcctagcgcaccgacgtacgagatcgtgaccgtccacgccggcgaacagtcgcaacaacaggaatggccaggccggatctctccagtccgaattgcagagatacgctcgcgcgttgctggcatcgtgctcagtcgcgagttcgaggaaggcgccgaagtgaaggcgggccaggtcctgtttaggattgatccatcagcttttcgtgccgagctgtcgcgagccgagggggagctggcaaaggcgaaggctgaactcaatgaggctcgcactcaggagcgccgactcggtccgctagcaaccatcaaggcgatcagccaacaggactacgaagtcgcactgactcgtctgagaaccgccgaggcggggctgcagtcgaacaaggccgcagtcgagagcgcgaagatccagctcgggcacgccacggtacgatcccccattgacggacggatcggccgagccctggtcacggaaggagcgctggtaggccaagatagcagcaccgccatggctattgttcagcagctggacccgatctacgccgatttcagccaacccgccggcgacatgttgcgcatgcgcgccgcggctaccggatcggcgggcgctggggacccaactgtaaccatcgagatccctgagacgggcgccgtacgttcaggcaggctgcttttcacggacattgccgtggacccgggaaccgaacgcatcgccatgcgcggccagttcccaaacagcgatggcacgctgctcccaggcatgttcgtgcgcgttcgcctcaacgccgggaaggcgtcccctgtagttcttgttccgcagcgtgctatccagcgcgacgctgctggcaaggcatatgtgatgttggtcggcgacgacaatgttattcacgtccgaaaggtcgagacttcccgcatgcaggacggtagctggcaggtggtccgagggctgcgtgaaggcgagcgtgtagttgcttctggtgttgaaaaagtcaaagagggcatgaaggtgccaagcgctaagactcgctccgagaccgctccaagtccaactcagccttga

SEQ ID NO: 500494 - DNA, 3144 bp, Stenotrophomonas maltophilia
atgtccagattcttcatcgaacgacccaactttgcctgggtcgtggcaatcttcatctgtttcgcaggattgctggcaatcccgcgtctctcggttgagaagtaccctgaggttgcacccccgcaggtgagtattgccgcatcgtacgctggagcttctgcgaaagttgtcgatgagactgtgacaagcatcattgagcaagagctcaatggtgcgcgcaacctactgtacttccagtccaacagctccaatggctccgccgagattacggcgaccttcaagcccggcaccgatccgaacctcgctcaggtcgacgtacagaacaggctcaagaacgctgaatcccggctgccgcctacggtgacgcgcagcggaatacaggtcgagcaggcaagcgccagcttcctcatgatctacacgctaacctataaagacggcgtgcaatctcaggacgtcgtcaagctcaacgaactcgcggcacgtagcgtcaacgacgagattcgccgcatacccggcgtcggccgcgtccagttcttcggtgcggactcggcaatgcgagtttggatcaatccgctgaagctcgctgggttcggcctgtccgtacaggatgtcaacagcgccatcaccgcgcagaacatccaggttcctgcgggcagcttcggtgactctcctgcagagcctagccaagagctaaccgcgaacctgctggtgcagggcacgatgtcctcaccagaagagttcgggcgaatcatcttgcgcgccaagcaggatggctcaattgtgcgtctgtcggacgtagcgcgactggaaaccggtctgcaggactatcgctttgcaactgagagcaatggcaaggtctcggcgagtgctgcagtgcagcttgctcccggcgccaatgcggtcgcaaccgtggcgtccgtcaggaatcgccttgccgagctctcgaagacgttccccgctgacgtcacgtactccgttgggcttgacagttccaagttcgtgaatgtagccatcaagaaagtgctgatgacgctcgctgaagccatcgtactcgtatttttggtgatgcttctgttcctgcagaacatccgctatacgatcatcccgaccatcgtcgtcccagtgtgccttctgggaacattggctgtgatgggcattctcggcttctcagtcaacatgatgacgatgttcggcttggtccttgccatcggcattctcgtggacgacgcgattgtcgtagtcgagaacgttgagcgcttgatggttgaagaggcgctttcacccaaggatgcctcgatcaaagcaatgaagcaggtgagcggcgcgattgtcgccatcacgctggttctatctgcggtgttcctacccctcgccttcatgcagggctctgttggcgtcatctataagcaattctctgtcgcgctggcggtctcgatccttttctcaggtttcctggcgctgaccatgacgcctgccttgtgcgcgacgctcctcaagcccgttgaggcggggcatcacactgaaaggaacggattcttcgattggtttaaccgctcgttcgcgcgtgctaccaacgcctacgatgcaaccaacaagcgactcatgcgtaggagcgggcggctcatgcttctctatgcttccctgctgggtctgcttgcattcatgtacctgcgtctacccgaatccttcgttcctcccgaggatgagggctacatgatgctggatatccagctgcctccagccgcttcggagtcccggacacgtaaggtggccgcgcgggcaatcgaatacttcgcgacgcgtccaaatattgacgaggtcactgtcatcttcggtttcagctcctctggttcaggggccaatgcggccatggcattccccacattgaaggactggtccatgcgcagccgcaaagagactacggcaacagaagttgctgcagccaatgcgttcttcgcaggcatcaaggacgggaccgtgctggcaatgagtcctccaccagtagatggacttggcaactccggaggcttctcgatgcggatccaggatcgcgcgggagtcgggcgtgaggccctgaccaccgcggtaaaccagctcttggagcgcgccggaaaatcctcaaagatcgcctacgcatctatcgaaggcattcccgacgcgccgcagcttaggctggaaattgatcgtgagaaggcggaggcgcttggtgtgagctttgataacgccacgaatgtgctttccagcgcctatggatcggccatgatcaatgagttcgtgaacaagggacgaatgcagcgcgtggtagttcagggcgacacgcagtatcgaatgtcgccggactcattgagggacctctacgtcactaacagagaaggaaagcaggttccgcttacctcctttactcatagttcctgggaagttggcccggtacagatcagccggtacaacggctatccgtcgttcgcgattaccggagatgctgcggcggggagcagctcgggccaagcgcttgccgaaatggagaagattgcctcgcagttgccccaaggcatcgggtacgagtggaccggcctgtccttccaggagaagctcgctggctcgcaggcgcccgcactactgtcgatcgcactggtcgttgtgttcctgctcctcgtcgccctctatgaaagctggtccattccttttgcggtgatgctgatcgttccgatcggcgcaatcggatcggtcggagcggtgagcctggcaggcatgtccaacgatgtgtacttcaaggttggcctcatcactatcattggcctcgcgacgaagaatgcaattctgatcgtggagttcgctagggagctgcatgccgaaggtagtagcgtcttcgaggcagcgctgcgggcggcgaagcttcgcttcagaccaattgtgatgacatcgcttgcgttcattctcggcgtggtcccgctcacgatcgcgtcaggcgctggtgcggccagccagaacgccatcggcacaggcgtggtcggcgggatgctggctgctactgttctaggtgtcctcttcattccgatcttctatcactgggtgatgtcaacgttctccaaggatcgaacgggcgacagctccgcagattctgacttgtcgcggaagacgatctag

SEQ ID NO: 500495 - DNA, 1530 bp, Stenotrophomonas maltophilia
atgaaccctgtaacggtgagaaacaagtggttggtgctggcagcggttatcgcgtcattcgtgcccattgcgatggacctgaccatccttcatattgccgtcccgccgctcacgctcgcactatctgctactggcacgcagatacagtggatcatcgacgtctatcctttggtgatggcaagccttctcatcccaatggggactcttgccgaccggctaggacacaagcgcttgctgctctgcggattgggagttttcctggtcggctcggtagtagcagcgctctcgcccactgcccagatcctgatcctggcgcgcgcggtcatggcgattgggtcggctatggtcattccgtgtgtcctggccatcatccgacaaacttttaaggatgagcaagagcgcgcgtttgctctgggaatctggtccgctgtcgcatcggcctgtgccgcgatcgggccactggtaggcggcttgcttcttgagtacttctggtggggggccgtgtttcttgtgaacgtccccatccttgtcctggtcacgcccctgacgttgaagtggctcccctctggacgcggctcacgtgaacggggttggtcgatcggtcaagcattgatcctcatggttggcgtgatgtcacttgtctacggcatcaagaatgccgcaaagcctgaatcctcgctcctgctcactgcagcagctgttgctctcggtgctggcatgcttgccctctacatcggaaagcagctgaaatcagcaaatccaatgctcgatctcggccttttcaagatgcccgcggtgcgggcgggcgttctaatggggctggtcaccatgggggcgcttgccggcgttgagctgacagtggcccaggagcttcagttctcgatgggcaagacgcccttgcaggcaggtgttttcctgcttccgataatgatctgcgcaatggcgggaggcccattaggtggcctgttgaccgctcacgccggccttcgaagcgttgccgtggctgcaatggcggttgcggcgatagcactcgctggcttggggctggtgagcattgaacacggcggagtcgtgatcacagttctgctcgcgacgctgggtttcgctctgagcgttggactcaccgcctcatcggcggcaatcatgagtagtgcagcggccagcaaagcaggctctgccggcgcacttgaggccacaagctacgatctcgggacagggcttggcattaccgggtttggagtgcttgtgacaaggctctataccgccagactcgaggtcccaccagaagtacggggcctgattccggagcacgcgacccactcgatcggcgagaccgcactggcggcgagcagcctagcggcggatgatgcgcaggtagtgatggctgctgctcgtctggcattttctcagggacacggagtagtgctgctgatggcctccggcgcaattgccatgctgtccgccggcctgttctttatccttaaaggttcgtcgtcccatctggtcaatccgtcgcaacccgcagaatag

SEQ ID NO: 500496 - DNA, 1944 bp, Stenotrophomonas maltophilia
atggctgaagcgttgctggaagttaggggcgtttcgcgtgcctaccactcgggcgcgggcgagattgtcgtgctgaaggatgtttcgctgcgtatccaggccggtgagttcatagccatcatcgggccgtctggctcaggcaagtcaacattgatgaacattctggggtgtctggatcgccccactggcggcagctatctcgtcaacggcaatgccaccgaggacatgcagcccgatgacctcgcccgtctacgccgggagtactttggcttcatattccagcggtacaacttgatggaagatttgagcgccacagagaacgtggcgcttccggccatttacgccggcgtagccgccggggcgcgtaacccgcgcgcgcgcacgctgcttgaaaaacttggcctgggtgagaggacatcgaacaagcctagccaactgtccggggggcagcagcaacgcgtctctatcgctcgctccttgatgaacggcggatccattatcctcgcggatgagcccacaggtgcattggaccatgccagtggacaacaggtgatggaggagctgaagcgccttcatgcccaaggcaagacggtagtgctggtgacgcacgaccgggctattgccgcgaatgcaccccgcgtcattgaagtgtccgatggtcgaattgtgtccgaccacgtcgagggaggtcgctcggctcagtgtcctgaagcgctaatcgatccagacctgccaccagctcgcacggctcgttctcgactcgacgtcatccgcgaggccgcggggatggccgtgcgctccatgctgtctcatcgcttgcgcacgttgctgactatgctcgggatcataatcggtgtggctgccgtggtatcggttgtcgcgctgggcaaaggcgcgcagtcacaggtcgagtctcagatcaacgaactgggtgccagcactctggaggttttcccaggtagtgacttcggagacccaaggtcggctgagattgagacactcgtcgtcggtgacgctgatcatctgggcgagttgacctatgtggatagcgtgagcccaaacctaagcggctccgtggcggcacttcaaggcagccgccgggctaatactcaagtgctgggtgtgggcgctgaactgcctcgcgttcgggggatgcgccttctggctggtcggttcttcacggacgctgaagtggaggaacacgccgcggtaggcgtgattgaccagaaggccgccagtgcactcttcagtggtaatcctatcggcagcacgctgctattggggggcatgcctgttgaggtgattggcgtggtcgggtcgagcgcatttgccggcggtgcaacgccaacggtgtatgtgccacacacgtcggcctcatcgaggctactgggcagccaacgcttggagagcatcattgttcgggtgcgcgacaacgtacctacaagagcagccgaagcactgttgcgagccgagctccagcgtcggcatggcacgaatgactttttcatctacaactcggaccagatccggaaggctgtaatgaagtccagtcagacgatgacagccttggtctcagcaatcgcggctgttgcgctcatcgtaggcggagtaggagtcatgaacatcatgctggtatcagtgaaagagcgcgtgcgcgagattggcgtgcgtctggctgtgggggcgcgccagggcgacatcttgcgtcagttcctgatcgagtcagtcctgatttgcctcttcggcggcgtgctaggcatcctgcttgctctcggcctgggcgcattgtcgactctggtgtcgataggcgtgcctttccagttcacagcgtggcccgtgataggcgccttggcctgctcgtcagcgattggccttggcttcggatacttccccgctcggagtgccgctcagctggatcccattcaagcgcttacggcagactag

SEQ ID NO: 500497 - DNA, 1185 bp, Stenotrophomonas maltophilia
atgaacaatcgcaagttagtggctattgcagttgtgcttgccgcaatagtggggggcaccgtctggtcgatgagttcagctggggacgatgctgcgttgatcaccgcgcccgcaaagattgccgatctggagaagactgtacaggcggttggccgggtcaatcctaaggagctggtggccgttggcgcgcaggtatcaggtcaagtcacgagtctgcatgtcacgctgggtcaacgcgtgaaggccggggatctcattgctgaagtcgactcgcagcctcagcgcatcgctctgcgcagcgctgaagctgcagtcggcgcgctccgtgcgcagcaggccgctagcaaagctcgctatttgcaagcgagcagcatgtatgagcggcaggctcgcttagtgaaatcgcaaatggtctcgctggagggctttgaggctgcacgagtggcgcgtgacgccgcccactcggaggttgcctcgctacaagcccagatcgatcaggctgtcacgcaggtggaaacggctcggatcaacttgggctacacccgcatcgtttcccctacagagggctacatcgtggccatagtgacaaaggccgggcagaccctgaactcgatgcagaccacgccaacgatcgtcatgctcgcgcagatggacattatgacggtacgcgctgagatcgcagaggccgacgtggaactggtgaagccaggccagcgcctctggttctcgactctgggctccaaaggccgccggtatgagtcacgcctggagaggttagagccggcgccggcgaccatagccgacagtgcgacaactacctccggcagcacgtctcaggcgcagaaggccgtctactacgcgggattgtttgacgtccccaatccgggcttgaagctcaagccttccatgaccgtgaaagtgaatctggaactggctcgggtggccaacgcgttgcaggtacccctgacggcacttgttgagtcaggcgatagcaccggaaaagagatcttcgtacgcgtcgttgatgccaagggacgtgtagcgcagcggcaggtcaccaccggcttgcgcacatctacttcagcgcagattctttctggcctacgtgcgggtgagaatgtggtgatcggccaagccacaccgggcgctatcgagcctagcgctactagcctgctggggatgtga

SEQ ID NO: 500498 - DNA, 198 bp, Stenotrophomonas maltophilia
atgcccatctgcggggtacagatctgtgaagtcggcgaaatatacgaccctaccaacttgggccatgcgtatgcctcactggatggctcacaatcctgtttgtccctcaacatgaagaacacgataggccgacgctacaagggcgttgactgggagggctcgggctcgtggatggagccctccaacaaggcaacgtag

SEQ ID NO: 500499 - DNA, 216 bp, Stenotrophomonas maltophilia
atgacttttccgatctgcatctacgatagaacgggcacggggctccggctgcccgcggggtggtggatcgaccttcagtccgatctgcccgcgctggtgaacggcgccgcacgcatcgaccttccgcgctcttcgaaagacgagcatccacgcttggatccagaggtcctgagggaccttttccggcgcatcgggggttcgcaatggctaggttga

SEQ ID NO: 500500 - DNA, 714 bp, Stenotrophomonas maltophilia
gtgctgttgcgggaagcggcgagccatttcaaggggcacgtggtccgcaccgtgtccggtaacagccgcatcgacctgtcaccgctgcagggccgccgggtcaaggcggtccgcagttggggcaagcacttcctgctggaattcagccgccacacgctgcgcatccacctgatgatgttcggcagctggcgcatcgacgaacggaagccaaccccgccgcgtgcatccctgatgttcgacaatggcgagctgaacttctatgcgtgctccgtgcggctgatccacgagccgttggacgatgtctacgattggcgcgcggacgtgatgaacgaggcctgggatccgaagctggcccggcgcaagctgaaggtcctgccggacgtcctggtctgcgatgtgcttctggaccagagcgtcttcgccggcgtgggcaacatcatcaagaacgaggtgctgttccggataggcgtgcatcccgcctcccggctgggcgacctgccgccacgaaggcttaccgccttgatcgagcaggctcgcgcctacagcttcgatttcctggagtggaagcgccgcttcgagctgaagaagcattggcaggtgcacacgaaaaaggtctgtcccctgtgtggtggcccgatcagcaagctctatctggggacgacgcggcgacgcacgttcttctgtcccaatgatcaggtactgtacgggacctga

SEQ ID NO: 500501 - DNA, 468 bp, Stenotrophomonas maltophilia
atgccttttcgagcaattgcctacgcaagtgaagcctcccgcaacctgacggaacagcggctgcagcagcttgtggcggaggcggtgcagttcaacgaatccgtcgatgtcaccggtacactgctgttcgatggctcgcgcttcctgcagtacctggaaggcccggaggcaggaatcaaggccgcttacatgcgcattctgggagccagcagccacagtgggatcgtcgagctgaaccggggcagggtggggcgtcgacagtttccgcactggcggatgcgcagcgtgcgggtggacgagctggcgctgggaaaggtcgccatctccgactggaccggcttcgtgcgcagcgcgtcggcgctcgactcggggaagagtgcactggatcgtctgctgtcggtttcgcagtcgcacacggaggcaggtgtgggcggcatcacggaaccggacgggcagctcgcacgatga

SEQ ID NO: 500502 - DNA, 318 bp, Stenotrophomonas maltophilia
atggccaaccagaaccagaaccagggcaacagcaaccgcggtttcgcttcgatggacgaggacaagcagcgcgagatcgccgccaagggtggacgtgccgcgcacgagtcaggtaacgcccatgaattcagctcggaagaagcacgcgaagccggccgcaagggcggcgaaacagtgagccaggaccgccagcacatggctgacatcggccgcgaaggcggccagaacagtcgcggtggtggcaaccagggcggcaaccaggggcagcaacagcaggaacgtggcggcggcaacagccgcggtggccagcagcgctga

SEQ ID NO: 500503 - DNA, 342 bp, Stenotrophomonas maltophilia
atgccgctatctggaaccgattctgcttccccacgcgtgctgcgtgtcgagtgcatgccgctcgactgcggtggcactgcgatcgtagtggaactggaccgcatgcctgaacgcacgtggatgaagtcgctcaagcgggcgctgcaggccgacgatctcctggagggcgcgcacgccaaattcgatgggcgcttcgtgtatgtcgtgggcgtggaaggcggcgctcatcgtatgcaacatcgtgtggtacaggcgctggtggcaacggacgctccgcgcgcgtcgggcggcagccggcaaggtcaagccggcggcgcggcactgtccagcccgatgccctga

SEQ ID NO: 500504 - DNA, 429 bp, Stenotrophomonas maltophilia
atgccgaacagcgcgattgtctacgccagccgggctgtccccgggttcacgccggaacgcctggctgcactgatggaagatgcggcccgcttcaatcgatcagcgggcgtaaccggcgtcctgttgtttgacgggcagcgcttcctgcaatacatggaaggccccgccgacgggttggatgttgcgttctcccgcgtaagcggcgcccgcagccacaccgaactgaccgaactcgggcgtggccgtgtcgggcagcggcggttgccgttctggccaatgcgctgcctgtcggtcagcgcgggcgagctgcagaggattgcccttgccgactggagccatttcatccagcgggcggtaacgagccaggacgaagggggagcgatggaaaagctgcttgcaatcgttgagccctacgcgaacgccgcctga

SEQ ID NO: 500505 - DNA, 648 bp, Stenotrophomonas maltophilia
atggcgcgctgcctgcaatcgatccgaagagctaccctgcacccgggcctgggcggcgaagcagtggacgtggtggttgcactggacgcttgctcggatgcgacggcgtccatctgccaccagcagcgcgtcggcattgtgcggctggatgcacgctgcgtaggggttgcccgcggcgtggccgccgccgagctgctgagtcgtggcgccaggtggctggtcagcacggacgccgatagcgaggtccctggcgattggttggttggacaactggcgcagccgtgtgacgccttctgcggactggtggacattgcggcgacctgcccgtccgaacagcgcctgcgcagggtattccaggggcggcagcagtggggcgagggccacgggcgcatccatggtgccaacctgggtgtctctgcccgttcctatcgtgcggttggcggttttcctgccttgcgctgcggggaagatgttcagatggtgagggcgctgcaggcccgcggcgcggatgtacgctgggccggagctcccgtcgtcctgaccagcgcccgtctggaagggcgcgccgcagggggattttcggcttatcttgctgatatgggggcggcgggtgcccctgccgtgctgaccgggccggccattgcgtaa

SEQ ID NO: 500506 - DNA, 759 bp, Stenotrophomonas maltophilia
atgggcgctgtagccagcacacccctgcaaggacagggaacgcaagaacaggcctggctgcgctgcgattggctctggcagcaaccgtccacgcccgcccgctcgctgtgcgccgaccatgaccgccttgtggtcgttgcgccgcatcccgacgacgagatccttggctgtggcgggctgctccatcaagccgcggcacagggcatggagattggcgtcattgccgtgacggatggggaagcgtgttatccgggtgaaccttggtggacaccggaccgcctgcggtcggcgcgtcgggcagagcttgccgcggcgctggcggagcttgggattccggctgacgccacgtttcatctcggcatcggcgatggcgcggtcagcaagcacgaacagggcctgcaggactggctgcagcagcacttgcagccgggtgatctggtactggcgccctggcgcttcgatgggcaccccgatcacgaagcggcagggcgtgcagcctgccgcgccgcgcgcgcagtgggttgctgtcgcctggagtacccggtatggggctggcactggctggatccggcctgcgcgcacatggcgtgggagctcccgcgacttgtcgatatttccccagcggcgtcggtgaaacgaagcgccatcgcccggttccggacgcagaccggcaacgtgccgggcctgaacagcccgccggtgctgccttcccatgtactggcccgatttctccgcgattacgaggtgttcctggcatga

SEQ ID NO: 500507 - DNA, 942 bp, Stenotrophomonas maltophilia
atgcaggatgtgacgttgccttcttcgctgttcaaccgtgcacgccaggttctcgcccagcagcccgcactgcctttgcccggaagtggccacacgctgcagcgctggcgggcgctggcggcgtggggcgcagaggatctctgcctggccaaggtactggaagcgcattacgacgcccaggcgatcattgccgagctgaacgcgcctgtggttgctgaagggcagctgctggcggtatgggccgcagaaggcccagccaacaccctgcgcatcgacgccggcgatgggctgtatggcgacaagccctggtgttcaggcagcgcttgggtggatgcggcactggtaaccgtgcggagcacacagggcgtgtggctgtgccacgtggcggcggagcattggtgcacgctttcgggtgagccctggccggccgctggcatggctggcattccgtccacgacggtgcgcttcgatggcgcaccgatgacgattctgggagcgcgcgacgcctacctgcaacgcccgggcttctggcacggcggggcgggcatcgcggcggtctggtttggcgcagcggtggcactggctgaacgcatgcgaccagcctgcagcgacggcaaccgcgcacgactgctgggtgcagtggaccttgccctggggccggctgcggcgctgcttcgcgaagtggccgcgcgcatcgacgacgcgccccaatcggcgcatcgggaagacgtagtgcggctgcgctgcgtggtcgagcgggcggcgacgcgcgtcctggaccttgcaggtcgggcgctcgggccggcgccgatgtgcctggaagacggtcacgcccgccgctgggcggacctgacggtgttcctcaggcagtgccacgccgatcgggattggcagtggctgggtgagcagcgggcagcagaggagaccgcatgggcgctgtag

SEQ ID NO: 500508 - DNA, 498 bp, Stenotrophomonas maltophilia
atgagttggattgtcatggcatgtgtctacgcagtctggctggccgccggtgcgctggacttccactttcaccggcgtaccgacctgccgcacacgtccgcgatgcgcgagagcctgctgcatgggctgcagctgctgctcatcggcagcggcgtactggcgtggctcgtgctggaaagcacgtggtcgctcgtcacgctgctggcagtcctggtcatcgcgcacgcaatcgccggctacttcgacactgtcagcgcggacgggcggcgacgcatcagcccggccgagcagcacgtgcacagtgtgctcgacgccgctccttgggtcctgctgggcggggtggcgtggcaggccgaacctcgatgggcagtcaatgtggcaccggcagcaccggcgctgtggtggttcgtattgctgccggcacttggcctggtggtgttgccctggctatgggagctgcgcctgtgcgtgcgtgccagcgaacatcgccagcggtga

SEQ ID NO: 500509 - DNA, 552 bp, Stenotrophomonas maltophilia
atggcggatgccccaccaccggccttgctgatcatcgacatgttcagtcgcttcgacttcccaggcgcgcaggcgctggcgccagcagcggagcgggcggccgcacagatccgacgcttgagagaccactttgatcaccacggatggccggtcatctacgccaatgacaacttctcggactggaagcgtgacttccgccaacaggtagcacagtgccagcgggacggaggaccggccgggcggattgccgacctcctctctcccctgcccggccactacttcgtgctcaagcccaagcattcggcgttcctggccagcccgttgccgattctgctggccaagcttggcgtgcgcagcctttggctcagcgggatgacggccgattcatgtgtcctggctaccgcgctggacgccaacgccagggaattcgacgtagtggtggcacgggaggccgtggcggggacggcggcccggaaacagcgtgcgatggcgctgctcgccgattcgggtgcagcccgggtcgcacggctcgcctcgctggtcccggcatga

SEQ ID NO: 500510 - DNA, 447 bp, Stenotrophomonas maltophilia
atgaaaggacatcacgcccgccgcgcgcaccgccgcatgcgttggctcctgacactgggcctcggcgccctggtgggacccgccgtggcaggcacaacgcaaccggaacgcacctggcttgtcagtggtgcggagctcatcacgctgctgcagggcaaaggcgctgacgggttctgcgatggcgaacactgccgggggctgtccagcgcccgggccagcagctatatcctgggcgtcgccgatgccagccgcggtcagtggtgtgggcagggccggatccttccgcatgaactggtcgatcaggtgtcttcccatctgcggcagctgccccgcgagcgattgcaacaggatgcgtctcccctggttgtcgaagggctgcgcgcggcgtttccctgtggtcacggcaaatcgcctgatggcagtgccgagcccggcaaggcacgctga

SEQ ID NO: 500511 - DNA, 687 bp, Stenotrophomonas maltophilia
gtgttggcgggtcgcgcgttgtctgctaaaagccatctggacacgcagacccgatggatcatcgccttgtcagagccttattcagcgctgttgcgcctgcagttgcgccacgaagatctctccagatggctggcggcgcccctgccttcgccatcccgatggtccgactggcaatgcatcgccgggtcgtggcgcttgcgcaacggtgaatgcctggcgtcttcaagcgacgaggcgttggatgaactgctcgcagactgccaggccctgctggcccgctaccccgacaatcgcgccgcattgaaggccttccttgcatccgcgcaggccgataacatccaggttgccgcctatgaccgcactggtacgcactttgttgcgggatcgctgacgtattcggaaagcctctacgatctcatcgcgtttctgactgtggcacggggcgcggccgatttcctgaaggcgggcgaccacggggtggcactggtccacgactatctctgggcagaggaaggtgcgcgcgagaccgttgccgcgattgccctcgccggccaggggcaatccggattcctttcttccacggacctggataccgctgccgcgcccttcgacgccttggtggatgccatgctggacgctgaggacgacccggcgtttcaaccacgcaaccagcttgatcaactctga

SEQ ID NO: 500512 - DNA, 957 bp, Stenotrophomonas maltophilia
atgactgcccgcgccgtcaccgtgaccctgaacccggccatcgaccagaccgtgcgcgtggcccgcctgcagccaggccgggtgcatcgcgccggcagctcccgcgacgacgcaggcggcaagggcatcaacgtggcggcctgcctggccgactggggcgtgccgatcaccgcgctgggtgtgctgggcgacggcaacgacggcgtgttccgcacgctgttccgtgagcggggcatcattgacggctgcctgcgcgttccgggccatacccgcaccaacatcaagctggtcgaagaggccaacggcgaaacgacggacatcaacctgccaggcctggccgtggacgctgccgatctggacgcggtgtcgcgccagctcggcgccctgctcgcgcccggcctgccggtcgtgctgtccggcagcctgccgcacggactaccggccgatgcatgggcgcggttgcaggcgcaggccggaacggccggtgcgcgcgtgctgctggacaccagcggcgatgcgctcgtagctgcgctggacggcgcgcagggcgcgctgccctacgccatcaagcccaaccgccacgaactggaggcctggaccggcacgtcgctgccggatcgcagcgcactgcgcgctgcaggccaggccttggtcgaacgcggtgtcgcactcgtcgccatctccatggggaccgacggcgcgctgttcattgatcgcgccggcgcactggtcgcgcgaccgccgcgtctggcccagggcagcacggtgggcgccggtgatgccatggtcgccggcatcgccgccgcgctgttggagcgctccctcgacctggccgcctgtgcacgactggccacggcattctcgatgagccggctggatagcggagacgcgcggcggctcgatccggcgcaggtgcgcgccggggccggcgatgtactgatcgagcggttggattga

SEQ ID NO: 500513 - DNA, 831 bp, Stenotrophomonas maltophilia
atgttgccgagggatgatgcgctggccccgctgccggccggtcagctgcactggctgagatgcggcgaactggaggttgcgctcgccgcagcggcgggcgggcgcatcgcgcgcctgcgttaccggggcgtggaatggctggtggacgcgcaggagaccggggcggcggcgatcgcctggggctgctacccgatggtgccgtgggccgggcgcatccgccgtggacagttccgttttgacggcatgccgcatcggctgccgctcaacttcgacgggcatgccatccatggggtgggcttctcgcgaccctggcagatcgaccggctggatgcggccgcagccgaggtctcgctgcagctgccgcgcgacagctactggcccttcggtggcattgccatgctggaactgcggttgcaggggcacaccctgcagatgcgcctttcggtccaggccggcgagcaggcgatgccggcggtgctgggctggcacccctggttcaggaagccggaccggttgctgttcaatcctcgcgcgatgtatccgcgggacagggaaggtattgccacgctgccccacgtggagcccaccaccggcccctgggatgactgcttcgttgccgacggtgacatcacgctggtacacgaaggccaacgcctgcggctgaggtcggaccacgaccactgggtggtctacgacgctgcgccgcacgccacctgtgtcgaaccgcagagtggcccgccggacggcttcacgctggcaccgcaccggctggagcctggccagcgcctcgcgttgacgttcgaactggcgtgggtggcggacagcagctga

SEQ ID NO: 500514 - DNA, 1989 bp, Stenotrophomonas maltophilia
atgagcaggttcggagcagtcgggtgtgcgctgttgatgatggctgcgctagtggtggcgatgccggccgcagcgcgggaaacgacgggcctgctgcatcccctgttcagggatcacgcggtcctgcagcgcgacgggcccattgcggtctgggggcacgcaggccccgggcagccggtttccgtgacgtttgccgggcaggcggtaagcacccgggcggacgccgcaggcggctggcaggcgacgctgcccccggtggccgcgggcggtccgcatacgctggaggtaaacgccgggacacgtcgggagatggcgcgcgacgtgctggtcggcgacgtgtggctgtgctcgggccagtcgaacatggaactgccggtgtggcgctcgctcaacgcagccagcgagatcgccgcagccacgatgccacggatccggctgttcaccgtgccgcagcacgccgccgtgcaggcacaggagagcttcaacggcagcactgcctggacatcggcaacgcctgatacggtgcgcgatttctccgccacctgcttctacttcgcgcgcgaactgcagcgcaccgtcgacgtgccgatggggctgatcgaggcggcgtggggcggctcgcggatcgaggcctggaccagcgtgggtgcgctgcgagagcagggcggcctggacgagcccctcgatatcctcgcgcggtctgcgcgtgatccgctggaggcacgcgcagcctggggccgctactggcagcactggtgggccatgcgtgacggcgcgctgcccggcgacgcaccttggcgcgcggacaccgatgacggcggctggtcacgcgcaccggccgcgctgggggcgtgggagcggtggaacgtgcccgcgcttgccgactacaacggcatggtctggtatcgcacgcaggtggtgctgagcgctgaacaggctgcacgcggcgcgaccctggagctggcatcggccgacgaggtggacgtgagctgggtgaacggcgtgtccgtgggcagccagtacggctccggccagaggcgctacccgttgcccggcggcctgctgaaagcagggtccaacagcattgcggtcaacgtgctggacacctacggtgaaggcggcctggctggccccaccacggcatacggcctgcagttcgacaacggtgagcgggtggcactgcagggtccgtggaagtaccgggtggcgccgggccaacaggcgccgccgtttgccccctggcaggccgccaccgggctgtcgacgctgtacaacggaatgatcgcaccgctcggcgctttcgggctgcgcggcatgctgtggtaccagggtgaatcgaacaccggtgatggcgcggcgtacgcggcgcggttgcgtgcgctgcgcgacgattggcggcgtcagttcggtgcgcgcacgccactgctgttcgcgcagctggccagctatggccagccgccggttgcgcccgccgacagcggttgggcgcaggtgcgcgaggcgcagcggcgcgtcgccgccgaggacgcgcagagcgggctcgccatcgccatcgacatcggcgatgcctacgacatccacccgccgaacaagcaggagctcgggcgccgcctggcgcgcgtggcccgctacgtggtgtacggcgagcaggatctggcaccgtcaggtccgcgggcggtcaccgccgtgcggacgcccacggccgtcgccattgcgttcgaggatgtcgaaggcgcgctcaccgcaaccggtgcgctgcgtccgatcggctttgaactgtgcgaggccaggggccatgcgcgccactgcgagtacgccgacgccgaactggatgcacgccggatcctgctgcgaggcccgctgtcgacgcgcgcaacgcatgtccgctactgctgggccgatggcccggtgtgcacgctgcgcgatcgcagcggggcgccggccggcccgttcgaacttcccattgccgaagccgaggcccgacgatga

SEQ ID NO: 500515 - DNA, 561 bp, Stenotrophomonas maltophilia
gtgaacgctcttcagcgcatcgccgccgcagtcggcttcgccgtactcgtttcgtccggctcctcggttttcgccgccaacaccgtcatcgtgggcggggcagaaatgtaccccaccaggaccatcgtcgagaacgccgtcaattccaaggatcacaccacgctggttgcagcggtcaaagcagccggcctggtcgacaccctcaacggggccgggcccttcactgttttcgcgcccaccaatgcggccttcgaaaagctgcctgcaggcactgtcgatacactggtgaagcctgaaaacaaggcacagctgacccggatcctgacctaccacgtcgtcccgggcagctacagttcggcccagcttctggccgatgcccgcaagcacggcggcaaggccaccctgaagaccgtgcagggtgagcctctcaccgtggcgctccacgatggcaagctctgggtcatcgacgcaaagggtggaaaggcaggcatcagcattgcagatgtcggccagtccaacggcgtcatccacgtggtcgacaccgtgctgatgcccaagtaa

SEQ ID NO: 500516 - DNA, 210 bp, Stenotrophomonas maltophilia
atgccaggatcctgctggttgtcctgcgccctggccctggtgttcggcatcgccgggcccagccaagcggcgacgcgtgccgaagcccttgccgcgatcgagcgcaacgcgcgcgccgcgcattccgatgcggtcctggtgatgcacgaccgggagacgccgcttgagctgaagcccgccgccggagccagatctccgcgcgcggcctga

SEQ ID NO: 500517 - DNA, 381 bp, Stenotrophomonas maltophilia
atgaagaccacatcctggttctggatcaacgtggccagtcacttcagcattgtcgccgccctggcctggctgcccgcacggtggacgggccagcttgtagagggtttggccggcactcagccggctattggcgatgcccagcatgtggccctcgttggttccatttttggcttctgcgtgaccgcactgatcttcatgggggcgctgacagtcaccggcgaactcctgggtttctccaggccctatgcgcggcggccggaggcccagaacgaagcgcaggtcgtccaccggaaggtgctgctgactgcattcgccacgctctcatggggggccgtgggatcgcttgcaggtattgcgtcgatcttcgcggcttcgtcatga

SEQ ID NO: 500518 - DNA, 279 bp, Stenotrophomonas maltophilia
atgaccaagctgcacgcactgatgctggccggcggcctgctcgcgctgagcccgctggcctcggccgagaccgtgaatctgaccaacagcgccgagggcgccaaccgcgatgccggtatcactgcggtcaagaagaaactgcaggacgcgtgtaccgagcgcaagggctcgcccgatgctgcctcgttcgaggtggtcttcgagaagaccagcccgaacccgaacgtacccaagccgtactacgtggacggcaggatgaagtgcgacctgccgggctga

SEQ ID NO: 500519 - DNA, 213 bp, Stenotrophomonas maltophilia
atgttcgactaccaggactggaccttcaacgccaatggccgaaccggggtgccccgggtggaactggatggcgacggcggcggcaccatcaaccgttaccggttgaccctcgggcccgcccagtccgggctgtgcatcaaggtggcctcgcaggaggaagccgccaagaggctcgaaaccgaggtggagaaactgctcggcccagagtggtaa

SEQ ID NO: 500520 - DNA, 1014 bp, Stenotrophomonas maltophilia
atgcacaggatgctcgtcgcaggcacgctctccagcgtcgcctgtctgttcgccccttcagtgttggcggaagatgcccccgaaccggccaacgactgcgcggagattgcgcgactgatggccaacgacgactttgcggcactcgacgcgatggccgcgcgtttccgcaagggcgagctcaacgccgccggccaatcccggctcggccgtttctacatctgcatgtcgcgtgcaatcggcacgtcgcggcaggaggttcaagcctggaatgactggtctgcatgggcggcgcgctgggttcagcacgcgccgaagtctgcggcggcccacctgatcaccgcacggattccactcaacctggcctggagctaccgcggcaacggttacgccaacaccgtcaacgccgaagactgggcacagttccatgagtacaacgcggtttcgcgggcctacctgcaatcgcatgaggatgttgccggcggcgacccgttctggcacgaaatgaacgtgctgatcgcgctgcgcgaaagcgcggatgacgacgaaatgctggcgctcgttgatcgcgcagcgaaggccttccccgactacgaaccactgcacctcattgccatggagtacttcacgccggcctggggtggcagcgcgcagaagatgggagccttcgcgcggcactcgatggccagtgcaccaaagaagaagggggccatgcgctacgcacggctgtactggtcggccaccgaatattcgcccgatcacttccgcgcagcgaagcccgattggccgctgatgcgccaggggctggacgaaatcgcccagcagtacccgaccatcgacaacctggaatcgatcgtccgctatgcctgcctggcacgcgacggcgacgcactggtccgctggaatcgtttgtggttgagccgcgccggtttcgacgaggcggccattgcgcactcgaccgagcaaagcaaggccgcatgcctggcgccggacgaagaacaggaaacattcctgtag

SEQ ID NO: 500521 - DNA, 1041 bp, Stenotrophomonas maltophilia
atggatcgacggcagttcctggccaccttggccgcagtggcagcctcaagcgccctaccctcggggcggcccctgtccagccacagcgaagactggaaatggttgcagggcaactggcaggtccggcaccaacgcctgaaggagcgcctggtgggcgacacccgctgggaagccttcaccggcgccagcgcggtctggctcaccctgggcgggctcggcaccatcgatgacaacgtcatggcgctgccttcgggcccgtacagaggcctgggcgtgcgtgcttttgatccagtgtcttccacgtggtcgatctggtggatcgatgggcgcaaccctgcccatatcgaagcgcccgtgcgcggcgtcttcgaaggcgatggcggcagcttccgtggtcgtgatcacttcaagggacgccccatcgacgtctggttccgctggcatgacatccatggcgaggagccgtggtgggagcaggcgttctccgacgatgccggcgcgcactgggaagtgaactggcgcaactggttccgccgcactgcggcggtcccctctccgcttccgaagctgccggatgcaccgcgcgattttgatttcctggtgggccattggaacgtgcgccatcgtcgcctgcgcgctcggctggcaggcagtgatgcgtgggacgcgttcaacggcaccctgcacaactgggcggtactgggaggattcggcaacgtaggcgacaaccttatggacgtgccgggagcaccgctgcgcggcatgggtatccgcgcctggaacgccgctgagcggcactggctgagctggtggctggatggccgggagccgacccggatcggcgcgccgctgcgcggtggtttcgaggccggtgtcggccgcttcttcggcgaagaccagcacgacggacgggcgatccagacgcgggtgatctggtcacgcattaccccgcgctcggcgcgctgggaacaggcggcttcgaccgatgggggacgcagttgggaaaccaactgggtcagcgacttcgagcggcaggcatga

SEQ ID NO: 500522 - DNA, 531 bp, Stenotrophomonas maltophilia
atggacggcatcacccccattcgcggcctgctggcaacgctggccgtggccctgctgtcggttggtgcgagcgcctctgcctccggtgcacgccagggcgtgaaggctcaaccgggcgaaatcgtcctgttgcgtgatgtgtccgcacgcccggcctatcgcatggcgccgcccggcatggcgctgatcgccgacccgaaaccccagcgcgagatcgcggcggccctcggtgcgggtgccccggcaaacgggatggacgagctgagcgatgaagactacgcaggcatgggggcgggtcaggcagccacagccaccgcacccgcaggcaccacggtcgaacgtgtgacgcagcaggcattgggcggtacgctcggccgcaacggtgacggcatggtcggcagcagtctcggtggcgccatgagcgggccgctcggcgcggtcggcaacagtactcgcggcatcggcgagaccgtgcgcggcgcgctcggccagttcccgctgcagggcatggccccggcaggtggcaagtga

SEQ ID NO: 500523 - DNA, 1317 bp, Stenotrophomonas maltophilia
atgaaagcgaccgtcaaacggaccatgctcgccatggcgattgccactgcctcgaccgccgctgcggccaatggctgggacaaccagaacaccaacgcgaacatcaaccacacccacaccgtcagcgaaacccgcaacgagacgcacaaccacaccgacaacgacgtgcgcaaccgtaccgtcaacgtcaatgtgcagaagcacagcaccatccaggccgacgaacgcaaggaaaagaacaaccacggcgtcgacgtgaacctggagaaggacctgcgactgagcaccgacatcaatttctccggcgacccgaacatcaccggcgacatcgacctcgactcggcggccattgccgtgatcgacaaccgccaatcgatcagcaacaacgccaccagcaacagcctggtcaccaacagtgcctccatcggtgacagcgtgggcgcaggtgcctccggcaacctcggcttcaacgtggtatcgggcgacaacaacgcccaggacaacgccgcgtcgctgtccgctgccgatgcgtccttcagcttcggcatggccgacgccgaggtgttcgtcaaccaggccggcttcggcaacgcgaccatgaactccggtgtcaccaatgccgcaggtctcggtggcaatgcctttggcggtgcgtcaggcaacatcggtgtcaacattgcttcgggcaacaacaacgagcagaagaacgcgctggcggcgtcggtcgcgaccaccgcggtggcgcagtcgagcatcagctccaaccaggtctccaccggcaacacggtcagcaacgccggcttcgtgcagtcctacaccgataccgtgcaggtcggcatgcgtggcggcgtcagcggcctgaccctggcctatggcgccggcacctaccgcggtaccggcaacgcctaccagatggccaactactatctggatacctggagtggcgagctgccacacccgggtggcagcagcaccggccatatcgatctggacaaccagatccagaacgccacgatgaaccccaaccggccgggggtgggcggcctgggcttcgatacgcgtgagagtggcaccagccagttcgtcgagctgggcgtggccgacctgtatgccagcctcagcggcacggtcagcaccacgcgctgggtgaacgtcaacgcgaccaacacctcggccttgtcgggcagcgccttctccggcgcctcgggcaacatcggcgtgaacgtggccgcgggcaccggcaacctgcaggccaacagcctggccctggcagtcgcccagcccagcaccggcggcggtggtggcagcggcgagtaa

SEQ ID NO: 500524 - DNA, 897 bp, Stenotrophomonas maltophilia
atgaagacccgccataccgaactcgccctggccctgatgctgagcctgccgctggccgcgacggctgttgccgctgatgcgccacacgccgtcgccgcgaaggcctccgccgccgccaatgtgaagccggtcgctgccgatgcacaacgggtgattccgctgcagggtgcctggaatgtacgtaccttcgccggcctgcaaggccgccacggtccgattccggccgatgcattcgtgcgcaccgccgatctcggccgcctgaccgaagccgaccgtgatgccctggtcgccgccggtgtgaagctggacatcgatctgcgcaccaccgatgaggaggcacagtcgccggacctgctggcccgcgatgatcgtttcgattatcagcgaatctccctgatgggcaccgagaagatggacctgcagaagatgatgaccagcttccccgattcgctgggcgaagcctatgtgcagtggctgggccacagccagccgcagttcaagcaggtgttccagcgcattgccgcgcagcaggacggtgcggtgctgttccattgcacggccggcaaggaccgcaccggcatcatcgccggcctgctgctggacctggccggcgtgccgaaggccgagatcgtgcacaactacgcgatctccgcgcattacctggaagggcagccgaaggatagcgcgatgagcgcgcagatcatggcgctggcaaagcagaacccggagatcggccgcaagttggcgggcatggccggtactgcgccggacaacatggagcagttcctggcggcgctgcacagtcagtacggtggtgcggaagggtacctgaagtcgatcggggtcagcgagcaggagatccagcagttgaaggtgcggctgggtcaggccggctga

SEQ ID NO: 500525 - DNA, 2289 bp, Stenotrophomonas maltophilia
atgcgccacgccatgctgcaccgcccgctgctcaccctcgccatcgccgccgccctgccggcgctggcccatgccgaagacagccccagcgccgacgccagcgcgtccgccgatgccgcacgtaccgtggtcgccctcgaccagataatggtgaccgcccagaaacgcgccaccaacctgcaggaaaccccgatctcggtatcggtagtcgatgccgaagcgctgaaggaccgcagcgcgatttcgctgggcagactttccgatggctccattccgtcgctgcgggtcacgccattcgctacccgcagttcggcgctcaacatcggcatccgtggcatcggcgcctccggcgacgccaaccagcctgcgcgtgatgccggcgtcggcatctacgtcgatggcgtgttcatgggccgcgcgcagggcctgggcagcatgctctacgacgtggagcgcatcgaagtgctgaagggcccgcaggggacgctgttcggccgcaataccgaaggcggcgcggtgagcatcgtgaccaaggcgccgaccggcgagtttggcggcagcgtcagcgccggggtgtccaacttcagtgggtacaacagtgcgctgcacctggacctgcccaaggtgggcgatgtcagcttcaagatcgacgccgtacaggccaagcgcggcggcaccaccgaaaatcccatgcgcggcgagcgcgacttcaacagctacgacaagcgcggcgcacgcctgagcgcgctgtggcagccgagcgatgacttttcgctgctgtacgccttcgaccgctcctacgatgccaccacgccgtatcacacccaggtgctggtgccaggcgcctacctcagcccactgcagaaggccggtgccagcctggaccgccgcgacagtgccatcctcggtggaccgctggaagacaacatcggccgcaccagtggccatctgttgaacctgtcgtgggtgttgaatgacacccttgaactgaagtcgatcagttcctaccgcgaactcacccagggccagttcgacatgggcctggtcgatgcgatttctgcttacggtggcgcagggacgccgttcggtcgttacagcctggcgcaggtctaccagcaccagtacagccaggaattgcagctgatcggtaacacctcgcaggtgcagttccttggcggtgcgttctactaccacgagaccgctggcgacaatgcacagaccccgaacatgctggtgtgggggccgggtggcaacagctacacggtgaacccggcgaccaatccgctggatctttcccgggtgcgtatcgaccgtgccagcaaggcgtggaccgacagcctgggcgtgttcggccaggccacgtggacaccggaagcactgcagcgcctgcacttgaccgccggcggtcgctacacccgtgatgacaagaagggcaacctgtacatcgtcaacggtgccgccaccaaccttgcgttcaaggaccgctggagccgcttcgacccgatggtcaacatcgcctacgacctgggtgagcacgcgatggtctatgccaggtacagcaccggcttcaaggcgggcggcgccaactcacgttcgaccaattacgcggccttcggtccggaggaagtgacggcctatgagctcggcttcaaatcgcagttctgggacaaccgtgcacgcctgaacctggccgtgttcgattcgaccatcgcgcacaagcagatggacttctcgctgccgttcgacccgaacagcggtgaaacacgcaccaccatggtcaccaccaacgcactgagcgatggcaagtcccggggtgcggagctggaattcaacgtgatgccggtggacaacctcaccctcggcctcaactacgcctacacgaagatcgaagcgcagaccgcgacggacccgttcggcgctggcgtgcaggtgaccgtgcagccgctgctggcaccgaagaatgcgggcagcctgtcggtcgactatctggtgccattcgccaacttctcggcactgaagttccatgtggacggcaactggtccgacggctactacaccagcgagtacgaccagatgctgaccgacagctcgtttgtggtgaacgcacgggtggcgctggtggacgttccggtcaacagcaccggcaccacgatgtcgttctcgctgtgggcacgcaacctgctggacgagcagcacctgttctacaagatcaacagcgcggcactgggccagagcggcatcttcaacgacccgcgcaccttcggcctggatgtggccgtcaacttctga

SEQ ID NO: 500526 - DNA, 642 bp, Stenotrophomonas maltophilia
atgacgccgaaaaccgccgtaaccacctccgaagatcctgctgccgcccatgccgaggcacagcgacggcgcattctggacgccgcccagaagtgcttcatcactcgtggatttcacgccgggtccatcggcgatatcgccgccgaggccgagatcagccaaggcttgatgtaccgctatttcgccaacaagcgcgccctgatcctggcgctgatcgagcgccaactgcgtcacgaccaggcctcgatcagcgagatgccggcggcctcggacctagtcgatggcctgctcgcgtgctaccagcaatgggcacgcggcgaggtgctgccgatccacggcaatgccatcgccagcgttgcgctgtacgcggaaatcaatgccgaagcccatcgcgatccggagctggccggtgtgctgcgtacccatgacaagcagaccagtgcggccatccaggcctggctgcgccagcgcgacctcaatctgggccagcgcgttgacgaggaaggcatcgccagacgcaccctgttgctgcggttgctggtggagggcctggccatgcgcgccgtgcgcgatcccgacctgccaccggaacgggtacgcgccctgctggccgatgcaattgggcgggtgatggcggattga

SEQ ID NO: 500527 - DNA, 1263 bp, Stenotrophomonas maltophilia
atgcggctgcctgcaaagatcgaacattcaagcaaagcgcactgcagccgatacttcttcttggaactcccccatggaagaaccagattgtctttctcaccgccctacccctacacgaccccgccaccgccccgcccactttggccagcgatttcaaagttgcttgttgaaatctacacgcacaagtggctgttcctgctgctcggcaccctcgtaatggtcgcgttcttctggcgtgttcgctatctgcctgcaatgacgctgaccgacctcgggctggttgcaattgctattgtcgcattctcggcattgatgatagttctgctcgttgtttacgcgttgctacccgtcgctttgttgcgcgagtggcatgcggccggggccatcacagacaagctcagccccaggaatagcaatggaccttgggttgcacccactggactcagcttggtgctgctactggtgggcggcgtcatcgctctaattttcctctgggccgcgttgttcactgaaactggcgagcaaaatttgtgggcacttccgctactcctgcttcttggcgcgctgctttcgttcgcccctatccttctaaagcgcgatgcatccacaccggtcagccgcatcgcatggtcattgagactggttgcgttctcgacagggctctacctcttcttctttcctttcttgacccttgtagttttcggcacgcattcagccgcagagaatctaacaaccgccgaactggtgtgtatctatctcgcgctccctttgctccacttcctctttctgtctcttcgcgctctgcccatgcagcagaggcttatcgccgcatccattacaatcatctatctgctctcaatggcaggcactatgttcgaggcacttgatcgtgctgcggcgacgttccaactgggcctgcgcccgcatcagaatgtcgttgtatcaagtgaaggctgccgcatcgccaaggccgcttcggtcatcgcttcatgcagcacggtgcaaggctcagggaaggaactctatgagattcacgacgtcttcgttctcaatcgccttggtagccacatggtcattgcagagtccggttggacgccaaagaagccatctcgctctgttccgatcccggccagcgatgtggtgacatggtacgcaacgcctccctcagcgacacctttggccgagtatgcgccacgttcttcgacgccccctcccaagatcgcgccaaaggaaaaactgccaaagaaaatgcatggcggctga

SEQ ID NO: 500528 - DNA, 1719 bp, Stenotrophomonas maltophilia
atggacgaagccgaacgactgctcgaaatcgaacgactgcacctgttggatacgccgccggagccggtgttcgatgccatcgtcgcctccgcccgcgccgcaaccggcatgaccatgggcctgatcagcgtggtagccgaagaccgccagtggttcaaggccaacatcggccttgagggcgtccgcgaaacggcccgcgaaatttccttctgcacccatgccatacgccaggacgagctgttcgagatacccgatgcgcgccaggacccacgtttctccaccaatcccctggtgacgggtgggccgcgcatccgccactacgctggcatccctctgggctcggcgcacggcgcacgtatcggcacgctgtgcctgctcgacccgatgcccggtgtgctgtccccctcccagcgcgaactgatggtgcatctggcgcgggtcaccacccaggtgctggaacagcgcagcaccctgatggcgcaggtgggccaggccaaggcgctgcaccgcgagctgaaacgcagcgaggacttcctggagcgtaccaaccgtgccgcacgggtaggcggctgggagatggacctgctgaccaacgaggtgcgctggacacgggaaaccaagcagttgcatggcgtacgcagcaacttcgagcctacgttggagaccgcactctcgttctatcgcgaagacagccgcaatatcatccaggctgcggtaaagcgctgtatcgacgaaggcgcttcctgggaagtacagctaccgatgaccaccgccgacggtcgtgcgatctggacccgggtcgttggcagccggcaacaggtcgacggccatccgcgcctggtcggggcgatccaggacatcacggacgaacgagccgcgctggacgcgctggaagcgagcgaaacccgctaccggcggttgttccactacagcctgggcctgatctgcacccacacgctggacggcacattgacctcggtgaatcccgcggcggtgcagtcgctgggcttcgaggaaagccagatgatcgggcgcagcctgtgtgacctgatgccgccggaaaaacgcgagtgcttcaaggcctacctcgctcggatccgggcaaatcacaccgacgctggcgtgatcgagctgattgccgccgatggtacgcgtcactactgggcgtaccacaacgtgctcgacaacgaagccagcccgccctacgtgctggggcatgcacaggacgtcaccgcgctgaggatgcaggagcagcagctgcgcgagatgtccttcaaggatccgctcacccagtgctacaaccggcgttacctgcaccggctggatgaactgattgacgagcgctgggcctgcgtgatgttcgacctggaccacttcaagcacatcaacgacacccaaggccaccggcgtggcgacgccgtcctggtcgagttcgccacgttcctgcgctcaccgctgggcaaggatgagacagtggtgcgactgggcggcgacgaattcatggtggtactggtcgcgcctgcggacggccggttgagcgaactggagcattggtaccaggaccacgccgcgctctcgcccagcgcgttctcgatgggcgcggccatcaacacgcccggcgagccggtggccgacaccatccagaaagcggacagccgcctgtatcgcacccgcgcacgggtacgccgcgagcgacgcgaggaccccgccgcgcgttga

SEQ ID NO: 500529 - DNA, 867 bp, Stenotrophomonas maltophilia
atggccctgcccgactacccacgcccgcccttcccggcccagcagcaatccttccccggcaagactgcgcagatgcagccccggccggaccacggcgaggacagttatcgcgggcatggcctgctgcagggcaagaaggcactgatcaccggcggtgacagcggtatcggcgcggcggtggcgatcgctttcgcgcgcgaaggcgccgacgttgccatcgcattcctcgatggcgagcaggacgacgcccgccatgtgcagcagcagatcgaacaggccgggcgcaaggccgtgctggtgccctgtgacatcagcgacccggcgcaggcgcgatcgctcgtagaccgcgtggccagcgaactggacggtctcgacatcctggtcaacaacgcggcctaccagcgctactacgagcacttcgatgacatcaccctggatgactggaagcggacgttcgataccaacgtgcatgccgtgttcaatctgacccggctgtgcgtgccacacctgcgcggtggtggtgcgatcatcaacacggcgtcggtcaattccaagcgaccgacgccgaacatccttccctattctgcaaccaaaggtgccgtcgccaacctgacgctggggctggccggcctgctcgccgagcatcagatccgcgtcaatgccgtgctgcccggcccgatctggacgccgttcattcccgcaggcatggccgccgaagaggtcgaacagttcggcgcacagacgccgttcggccgccccggacagccggccgagctggcctcggcctatgtgatgctggcttcggacagcgccagctacacctccggtgcgctgctgaccatctccggcggcgcggcaacactgtga

SEQ ID NO: 500530 - DNA, 2316 bp, Stenotrophomonas maltophilia
atgcgttcggcgccacctcgtcatctccttgccgcctcattggccggcatcctgtttcacatcccgctggccatggcacagcatgttgtcgctgatggcagcatcgcgggtgaggacttcaaaatgcctgcagcgggtgactatgtcaccactgatcctgcccagcacgccttccatgcacttaatggcggcatgatcttgggcgacgacggcatccacttgtcaacccagggtgagaaagctgccggcgtgcgcgtggagggagcgggcagcgccgtgttcctgggtcgctccagcagcattctgaccacgggtcatgacgcggcgggtattgcggcagtggcggcggggttcgatggaacgcagatcgccattgaaacccgcggtgacgccgcaaggggtgtcgacctggacaacgcgcagctcgcgttgtcgcaggcgacagtgcagacctcgggaaatgcggcacacggtatcgtcgccacaggaggcagccacgtccagttgcaacgcactgatgtgatggctctgggggcaggcgcgtggggcgcggtactgcgcgatgccagccagctgcagctggatggcacggtggttttcagtgaaaagcatggcgcagtgcgcattgaaggtagcggcgacacccgtattgaactgtccaacggcgcattcctgtatggcgggaatggcacagcggtatcccgggatccagcagctaccggacgcgtcgatgtcgtgctgagcggaggctcggaaatccgcggcgatattgtttcggcaccgggcgttacctcgagccctgtcggcgcggcggcggatctgcacgtgcggctgtccggtgcgtcaacgtggacgggacgttcggacgccgtgcgttcgttgtggctggagaatggtagtacctgggcgttgagtggagattcgcgtgtcggatcgcttgatgtccgcagcagtgcgctgcatctttccgagggagcgcgcttcaactcgctgacggttgagggtgatctgcatacggaggatgcgcacctctacttccgtggggcgctggaaggcgatgactcggccgtggatcgcctgcatgtggtgggtgacacccatggcgatgcgcgcgtctacgtgtccaacgtcggcggtgtgggtgcagcgacgcttgaaggcatcaccgtgatccaggtcgatggcaggtcggatgcgagctatacgcttgctgggcgtaccgttgccggcaccaacgagtatttcctgcacaagggtggtgtggccggcggtgaaggcaactggttcctgcgttccgaattgccgacgacgcccgatccgtgccaggtcgatccgttggcgccgggctgtgcgccgatcgagccggttgacccggttgacccggtcactccgccgtctgtgctgcgcccggaggccggtgtctacctggccaatcaaatcgctgcgctgggcatgttcagccaccggctgagtgatcggctgggcagcctggatggaggtgatgcacgcaatgcctgggcacggttcgggcatggtcaggccaacttcaccgtggtgggtggccagctgttggccaacggcaacacctcggtgctgcagatcggtactgacctgctgcggcgtggcaacgcggctgccggggtgatgctgggcagtggtcgcgccgacagcagcgcagtgtctgatctgactggctacagtgccaagggtcgggtgcgtggcagcgcggtgggcgtgtacggcacctggttgcaggaggccgatggcacgcgaggcgcgtatgtggatgcgaccctgcaatacggccgattcgacaaccgggtgcagggcatcggcctggcgccggagcactacgattcgcgcatggccagtgcgtcgctggagaccggctacaccttcaacgtgtggcagggtgccgcaagcgcactgtatgtgcagccgcagctgcagctgagtcatgttgacttccgcgccgatcgccacttggagagcaatggcacggtgatcgaccacgccgatgccggtggcctgagcgggcgcctgggcgtgcgcgtgttcggtcatggcactgccgccggcaacaccgtgcagccgtacctgggcgtgaactggctgcgtggcagcggcaccagtacgttgcagttcaacggtgacacactgggggcggacgtgccgcgcaaccgctacgaagtgcaggccggtgccgagctgaagctgggccagcgctggggggcgtggggcggcctgagcgtgcagcgcggtgaccgcggctatcgcaacgtgggcggcgaagtgggtttgcgcatggcctggtaa

SEQ ID NO: 500531 - DNA, 222 bp, Stenotrophomonas maltophilia
atggacgacagcccggtcgagactagagggatgatgtccgacgccgtggtgatggccagcaaccatgtggacggcgcaaggatcggccggtcgcacctgcggatctccggcgaggcttcgacggggctgtacgcaggcaacatttcgccggacgcgtcaggtcttatcgccaaggcgaatacgaccacaccgcctacgaagtgcaggccggcgccgagctga

SEQ ID NO: 500532 - DNA, 288 bp, Stenotrophomonas maltophilia
atgaacaacctcacccgacagcctctggcggcagcactggtgctggccctggttctgcccgcagcatcggtggccgccgctcctcccggcgtgccttgcccgagcattccgcgcccggcagatccgggtgatccggctgtagaggtgtcctacctgtgcggcgttgagattgccgcacacggtctctggttcgatcggtcgctggaggtctacgacgccaccgtgatcggcagtcgcgatcgctggcctggcgtggagatggacatcatcaccatggctatctggtga

SEQ ID NO: 500533 - DNA, 1389 bp, Stenotrophomonas maltophilia
atgcgccttccagcctttccctcgttcaccacgtcgttgcgacatgtgctgctcgcaacactcctgctcgtacccccgctggcaaccgccgcctcggtctgcgtcatgcgctcgggtgagcgcctgctgctggtgcaggatgtcacctcgcgctggcagctgcctggcggaacggcagaacacggtgaattgccgcaacagaccgccgcccgcgaagcgctggaagaagctgggtttgccgtcgccaccaccgacctgctggacgacagggcgggtgtgcatgtgttcgcctgccgtgccctcgaacccgtccaggtgcacggcaatgcggtgaatgtgctggatgcgccgcacctcgggcgggagatcatccaggcgcgctgggtcagccgtgacgaagcccgccagctgcgcacgcgcttcccgcagcagctggagcacgcgtatcagcgcctgcacgcagtagccgagagtgaagtacgccccgtcgcgcgcttcggggccgcctcggccttccgccaagcggagctggatcgcgtgcaccgcacccagcagtggccggtgcgcgggctggcgatgatcggcaacgtcctgggcgaattctggttctatctgctggcaatgcccgtgttgtgggttgcgttcggcgcgcaggcatcccgcctgatgctgatggcgttgatggtggtcacgctggccgtgcagagcatcaaggtcttcgcaccggtgccacgccccttcagcttcgacgccacgctcagcccggccggtgccgccggcccttccctgcccagcgggcacaccaccagcgccacctgcttcttcgtgctggtcgcgctgtggttgttggcacgccaacacatcaccggaaggttcaaacgctcggcagtgctgggtatcgcgctgctggccggggtgatcgccggaatggcccgggtctggctgggggttcactattggagcgatgttgctgcagggttgctgttgggtggtgcgatcgcggctggaatccatgcgctggggacatcgctggcacgccacgaacacccggcggtgcgcgagcggatctgctgggctgccattgcctgcgtcagcctggccgtgggtgtggcctggcaggccatgccgctgctattgccgttctgcgtagcagccgcctgcgcggtactgccgcgtgcaacccgggagcgagcgtcgatgcgctcggcagcatggctgctggccggcctgctggtgctgggtggcgtgtgcctgccgatggcacagcgcgccgaaccgttcgtgcttgcggccggcctgcaggcgctggtctacgcggggctgggcgcgtgggtggcgtggggtgccagtgcggctgccgcgtggtggccgatgaggcacccgcggtag

SEQ ID NO: 500534 - DNA, 873 bp, Stenotrophomonas maltophilia
atgcaccttcgcctctcgtcgctcgccctggccgccacgctcatcaccttcgacggcgccgccgccgacgcatcgctgccacagctgcaggcctacacggtggacccttcctggctgcaaccgatggcgccgttgcagatcgccgatcacacctggcagatcggcacgcatgacctgacggcactgctggtccagacggctgatggcctcgtcctgatcgatggtggcatgccgcaaatggcctcttacctcctgaccaacatgaaggccagcggaaccaataccggtcccctgcgcatggtcctgctcagccacgcgcacaccgaccacgccggccctgtggccgagatcaagcgccgcacgggggcgcaggtggtcgtgaacgccgaaaccgcagtgctgctggcccgaggcggcagcgacgaccttcatttcggcgacgaaatcacgtttccaccggtcaatgcagaccgcatcgtcatggatcgggaggtcgttaagctgggcggcatcgagttcaccgcctacttcatgcccgggcacaccccgggcagcaccgcctggacctggaccgatacgcgcgatggcaagccggtgcgcatcgcctatgccgacagcctgagcgcgccgggctaccagctgcagggcaatgcccgctatccccgcctggtcgaggactaccgacgcagcttcgctacggtgcgcggcctgccctgcgacctgttgctgaccccgcatccgggcgccagcaactggaactatgctgctggcagcaacgccagcgagaaggtactgagctgcaaagcctacgcggatgcggccgagaagaagttcgacgcgcagctggccaaggaaacggccacggcacgctga

SEQ ID NO: 500535 - DNA, 540 bp, Stenotrophomonas maltophilia
atgcaccgtactctctccctcggcctgctgctgggcaccgtgtttgccacgaccgcctgtgcacgtgccgccgaagaatccgccgccgcaccgatcgccagcgcagcatcggtggcaccgatccaggccagcccggccaaggtcgatccggccttgccggtggccatcgtgcacaagaccgccagctgtggttgctgcggcatctgggtcgaccacctgaaggccgcgggcttccaggtcgaggtgcgcgacaccgatgacatgaatccgatcaaggttcgcctgggcgtgccggtcggcaaggcctcctgccataccgccgagatcggcgggtatgtggtcgagggccacataccggccgaggacatcaagcgcctgctggccgaacgcccggccgcgcgcgggctggtgctgcccgacatgccggccggttcgccgggcatggaaatgccggatggctacgtgcagccgtataccgtcgagctggtgcgcaccgacggcagcaccgagccgtttgcccggcacggacagggtggctga

SEQ ID NO: 500536 - DNA, 537 bp, Stenotrophomonas maltophilia
atgtcccgtgtccccctgatcgatgccgccaacaccaccgccgaacgccaggccctgctgggccaggtcaacgccgcctttggcgccaccccggccatgttccgcgccgtagccaattcgccggccgtgctgaagagcatgtggggttcgttcggcgcactcggtggcggtcgcctgtcgccgctgctgggcgagcagatcgccgtggccattgccaaccgcaatgcctgcgagtactgcctggccgcgcacacggcactgggccgcaaggccggcgccagcagcgagcggatggctgccgcgcagatcggccagtccagtgacccggcgaccgccgctgccctggacttcgcgctgaaggtggtcgagcagcgtgcgcagatcgccgatggcgacgtgcaggcgctgcgcgcggctggcttcgatgatgagcagatcgtggagatcctcgcgcatgtggcgctcaacctgttcaccaactacgtcaacgtcgcgttcgacgtgccggtggacttcccgaaggtcgcgctgcgctga

SEQ ID NO: 500537 - DNA, 1533 bp, Stenotrophomonas maltophilia
atggctctgtcccagcccttggccggcgctccggccctgtcgcgtgcccgtcgctgggcactgttgttcaccgtcgccgccggcctgctgctggtcacgctggataactcggtgctctacaccgcactgcccacactgactggggaactctcggccagcgccggccaggcgctgtggatcatcaatgcctatccactggtgatggccggcctgctgctgggggcgggcacgctgggcgaccgcatcggccaccgccgcatgttcctgatcggcctggtggtgttcggcgtcgcctcgctggcagcggcgttcgccgactccgcagcgcagctgattgccgcacgtgcgttgctggcggtcggcgcggccgcgatgatgccggccacgctggcgctgatcggcctgagcttccacgaagagcgcgaacgcaacatcgcgattgccatttggggttcggtggccatcgtcggtgcggcgctcggcccgatcatcggtggctggctgctgcagcatttctggtggggctcggtgttcctgatcaacgtgccggtggtcgtggtcgcgttcgtggccacgctgctgctggcaccggaaggccagcgcgacacctcgcggccgtgggacctggtttcgtcgctgctggctctggcggcactgtccggcctggtgctggcgatcaagtcgctgatcgcgacgccgccgtcgtatgcgctgggcgcaggcgcgctgctgctggccgtcatcagtggtgcggcgttcgcacgccgccagcagcagttgccgtacccgctgctggacttcgcgatcttccgtaatccggcgttcctggccggcacgctgtcggcggtgttcaccctgttcgcgatggccggcctgcagctggtcaccacccagcgcttccagctggtggcaggcttttcgccgctgcaggcgggcctgctggtgtcggtggccgcgctgggcagcctgcccagtgcgctgctgggcggcagcatcctgcaccgggtgggcctgcgcccattgatctgcggtggcctggctgcgggcgcgctgggcgtcggcgtggtggcgttcggcttcccgcacggccttggctgggtggtcgccggtatggccatcaccggcttcggtatgggcgcggccatctcggtggcgtccacggccatcctcaacaatgtgccggcgcaccgtgcgggcatggcgtcttccgtggaagaagtgtcctacgagttcggtggcctgttggctgtggcgatgctgggcagcctgagcgcagcgatgtacagcgcgttcctgccggtctcggccgatatgcccgcgcttgcccgcgagggtttcacccaggcgctgcatgccgcgcgcgagagcgggcagggtgattggttcgcactggctgcggcggcatatgaccgtggctaccagagcgtgctgctggtgatcacggcggtactggcgctgggcgcgacgatcctggcgcacctgctgcgtggccgggccggcagccgtgagggcgccgccgatcgcgtaaaatga

SEQ ID NO: 500538 - DNA, 315 bp, Stenotrophomonas maltophilia
atgcgtgactacccggcggcggagcccgccggcgcggacgtggaagctcaggcgggctggctgctgctcgagttcggtgcaccctggtgtggccattgccaggccgcgcagcccacactccaggcgtttgtcgacgcccatgatctggtgcattggaagatcgaagatggcaagggaaagccactggggcgtgctttcaaggtaaaactgtggccgacagtggtgctgctgcatgacggccaggaagtggcgcgggtggtgaggccggtcgacagcgccgacctcgccacgttgcagggcgcattgccgggttga

SEQ ID NO: 500539 - DNA, 618 bp, Stenotrophomonas maltophilia
atgcacggacctgcgatgttccgctccacttcgatctgcctggcgcttgctgcgctggcgctgtccagcttgacggcggtggctgcgccggccgcgtccaagcgggtggtggcgccgcccagcctggtacaagcgtatcgggccgccgaagccaatctgcggctgattcccggcgacgacattgaatccgagttccgtccggtgtggaccgctgttgccgatctcgatggcgacggccgtgccgaggtcgtgtatttctacacgtccacctacaccggcggcagcttcgcccagcgcaacgttgttgcggtgatgaccgcgttggccgagaacgatccgcggggccaggagaacccgaagagcctgtcgccggtggaggcagaggactatgccgccatccgcaggtatggctatggcgacgacgcggtcgaacagattccaggcgccatccatgccatccgcatccagggtgatcgcatcattgtcgatttcaccgtcagtgccggggcgacggtctgcgaatggaagagcccagatcgccacgtctgtccgccggacgggaactacacctggacgctgcgttggacgccgggaaagctggcgcgcatcaagacgtag

SEQ ID NO: 500540 - DNA, 1587 bp, Stenotrophomonas maltophilia
atgtcgcgccgcaccgaaggcctccgggccgttgagcgcccggcgggcatgccgccgtcgctgcaggcgcatgcgcgccatgacggcatggccgcccgtattgcccggcacgactggtcaggcacgccactgggtgcgatcgagcaatggccgccgcacctgcgcgccaccgtcgacctgatgcttgcgcacggctttccgatgatcgtgctgtggggcgagcagctggtgcagctctacaacgatggctatgccgagatcctggctgacaagcatcctggcggactgggccagccgacgcgcgaatgctggcccgaggtctggcacatcaacggcccgatctaccagcgtgtgtggcagggcgagaccatcacctatgaggacaagctctatccgctggcgcggcgggggcgcttggaggatgtctggttcaccatcacctacagccccatacgcggagaggacgggtgcatcaacggcgtgctggtgaccatgttcgaaacgacagccgcgcacgttgcgcaggcggcccgcgaacgcgaggaacagaagcgccgtgagagcgaccgccggttggcgctggccttcaaggtgctgccggtgggtgtctgcattgtcgatgccgacggcaacctgcaactgtccaacgaccagatgcggacctatcttcccaccggcaaggtgccctccacggatcgccccaaccactaccggtggcagggtacgcatcccgatggctcgcgcatcgaaccccacgatttcgccatcgcccgcgccctgcggggggagacgatggtcccaggcctggagttccagttcatccatgacgatgggcgcgcgcgctggacgcgtgtcgccgccgcaccgctgcgtgatgccgatggcggggtgagtggcgtgttcgcgatcgccgtggacatcgacgacctcaagcgtgccaccgagcgccaatcggtgctgctggccgaactgcagcatcgcgtgcgcaacatcatgtcgaccatccatgcccttgcctggcggacccgcgcatcggtcggcagcgtggacgagtatgccgagcgcctgtgcgcgcggctgatgtcactggcgcgcacgcagagcctgttgacccgtggcgccaatgtaggggtctgcctgcgcggcatgctcgagcaggagatcgcggcgcagacaccggccgccgccgcctatcacctgcagggtgaggatgtgctgttgccaccgaaggcggccgaagtactgtcgctggccatccatgagctggccaccaatgcgttgcggtatggcgcgctggcccacgaggacggccggatcgatgtctgctggcacctgcaggtgcaggatgggcagccgtggctgggcctgcactggtgcgagcgccatgccgaggtggaggggtgggagatgccacgccagcgtggcctgggccgggtcctgatcgagcagcgggtgccctatgaactggccggcagcggcgagctgcgctttaccccgcaaggcctggatgcctggatccgcttcccgctgcgcgagcgtgacagcctgctgcagaccgacgccccggacgctggggcgccggggtga

SEQ ID NO: 500541 - DNA, 1455 bp, Stenotrophomonas maltophilia
atgcgccaccccatcttccttgtgttcctgctgctggttgccgccgacgtgtgcgcccagcaggacgatctgcgccgcgtgctcgaacagggcagcgaactgcgccaccagcagcaggaccagcagcgcctgcagcaagccgaatcacagcggccgacgctcaccatcgatggcaagaccgtgcgggtggagcgcaccgttgatgatctcggccaggccctctacctgtcgttgcagcaccagcagtggccggccgccgcggcgttcctggccgaatacatcgagcttccggggcacgatccgctgctgcgccactacgcgcagggtgcgttggcccgcgtggccggtgaccatccgcgcgctgcacaggagtacgaagcgctgctggcagcgcagccggacttcctgcccgcccgccttgaactggcacgcgtctatgccgaagaccagcgcgaccgcgaggcggtggcattgttcggtgcaatcaaggccggtatcgacagcaacgatccggccaccgcaggtgtccgcgctcgtgtggacagctatctggacgcgttgcaggcacgcaggcgctggaaggcggcggtcgccgccgggcctgcatggagcgacaacatcaaccgcagttcggccagccgcacctgcctgttcgtcgtcggcgacacctgcctcatcgaacgcacgctgcccgaagcgcagcgcgccaccggcctggactacgacgccaacctggaacggcgctgggcgttggccggccatcatggactttacgtgcgcggtctcgctttcggtcaggcatggcgcgggtacagtgcatacaacgagctcaacgccagcgtgcaggccggttacagctggcgcagtgcacggcacaccctgcagctggcgccgagctatgacttccaggcgctgggcaaccacgctctgcagggcggcagcggcgtacacggcgagtggcagtacgccctggacgggcgcagcctgctcaagctggaggccgactggaagcgccagcgctatcggcagccgggcctggctgacaactacgatggcgatctggcagcgctgtatgccacctggttccgcgcgctcaatccgcgctggaccctgttcgcgggcatggacctgagcgacagcagcgctgccgacccggccaacggctaccgccagcgcggcctgcggctgggcgcggcgcgccagtggagtggcaccacggccacggtgttcgtgtcgttgcgtcaccgtcactacgatgcctggagtccgttgctggaggcgcgcaggcaggacgacgaacagaacctgatcgccatcgtgcgcagcgagcggctggcggtgggcgggctggtgcccagcctgagcctgcgctacgcccgtatcgacagcaacgtcggttggctgtacagccatgaccgcggcctgctcagcctgaaatgggagcgtgcgttctga

SEQ ID NO: 500542 - DNA, 558 bp, Stenotrophomonas maltophilia
atgctggagctggatcgccacctgagccagtcactggagcaggcacggcacacgcccctgaacgtgcagcgttacgggcgctcgtgggtctgggtgctgtccagtgacgcctgggcggatgcggcgcgctgggcggcactggacagcagttcgcatccactggcggcacttcgaaaggccctcgacctgcggctgtggccctggcccgacgcggccatgagcgcgctgccacttggcgcagccgatgcgcgactgctgcaacgtgcggccttgctggtgatcgtgcgtgacctcaacagtgcgcagcgtgtgtacgacgacctgcgctaccaccaggcctaccgcatgttcatcggcctcgaccacggcaccgcgtggtcgccgacacagtgcgtgcgcctgctgcaggcgtgcgtgcatccgttgctgcgcgagtgcatcgaccaaacactggccagcgtgccgccgcacctgctcgaggcggcacgcgtgccggctgcacgtgcgcccgcacaggcaaccgcgcagcgaatcgcaggcggatgtttatcgtactga

SEQ ID NO: 500543 - DNA, 261 bp, Stenotrophomonas maltophilia
atgtgcgcgcacgccgtacgacctacgcccgacccgatcctcgaatccatccgcgaacgcctgcagcagcacttcgcgctgcaccggcgcagtgcgtcgttctggagtgcctaccagggcctgcagctggaactggtgcgcggccagccgcgcgatcacgagcgactgtgcaacgcgatggccaccatggccgagcagatgggggcggtcgagcacgcgcaactgatcagcaatcgccacaccggctccacatcccgctga

SEQ ID NO: 500544 - DNA, 273 bp, Stenotrophomonas maltophilia
atgcctgaccatctgcactggctgatgcagctgcgcgacggatcactggcgcgcatgatgggaacggtgaaatcccgcagcagccggttgctggggcagcagttcggcatacagacgcctttgtggcagacgagctatttcgatcacgcggtacgcagcgaggaagccttgaggcgccatgcgttgtacatcctggtcaaccccatccgagcagggttgaccctgcatctcgatgaatatccgtttgcatggtgccgttggcccatgcggtag

SEQ ID NO: 500545 - DNA, 660 bp, Stenotrophomonas maltophilia
atggcccgcaagaccaaagaggacacccaggcaacccgggaaggcatccttgacgccgccgaagcctgcttccatgaacacggcgtggcccgtaccacgctggagatgatcggtgcccgcgccggctatacccgcggtgcggtctactggcacttcaagaacaagagcgaggtgctggccgcgatcgtcgagcgcgtgcatctgcctttcatgcaggagctggagcgcacctcgaccgaccagcgcgacacgccggtgcacgacctgcgcgcagtgatgatccactcgttcatcgaactgtccgaggacgagcgcctgcgcaagaccatggagatcatgctgcgcagcgatgcgtcggctgacaccaaggtgctgaccgaaatgcagcaggccggtttccgcgatgcgttggaccggatggagcgcgccctgcgccgcgcccgcgatctgggccagctgcgcgagggtgcagacccgaagatcgccgcacgcatgctgcacgccaccgtgctcggcgtactgcacggtgcgatggtcgaaccggaactgatggacctcaagcgcgatggcatgctcgcactggacatgaccctggccgcctacgtgaaggacggcgtgttcgttcccggcaccgtgcccgagccgctgcccgaggcatga

SEQ ID NO: 500546 - DNA, 300 bp, Stenotrophomonas maltophilia
atgaacacacgttccgtccgtcaccctgcaactgaacgcatcatcgaacgcgccgacccgcgcctgctgcgtggcgtgcggcaactggtgctggccggactggcgctggtactggtctggccagcggcacgtggcagcagcgcgtggttgggctggctgccgatgtggctgatcggcatgccgctcgcggcctggtgggcgctgttgcgcttcccgctgccgcgcctgtcgcggctgccgaaggtgcggcgtaccggtggacaggcgcgtcgccggcgcggcccggcggccacggcctga

SEQ ID NO: 500547 - DNA, 300 bp, Stenotrophomonas maltophilia
atgaagccaaccaacaatcgcatgcgggccatccatcccggcgagatcctgcgagaggagttcctttccccgctggctctgagcgtgaatgcactggcgagggaactggatgttccggccacccgcctgcatgccatcgtccatggcgaacgtgcgatcaccgccgacactgctgcccggctggcgcgccatttcggaggtgatgccgcatcgtggctggcgctgcaggcgacttacgacttgaagacgctgcccacgcttggcgagatcgagcgccgcgtgcagccgcgggcggcgtaa

SEQ ID NO: 500548 - DNA, 279 bp, Stenotrophomonas maltophilia
atgatccggtccttccgttgcaagcacacccgcgccttgtttgaaggccactgcgtgcgcgcctggctgccgattcgacgggcagcggaacgcaagctgcagatgcttgactcggcacagacgctggcgttcctgcgcagtccgcccggcaaccggttggaggcactggctggcgaccgcaaagggcagcacagcctgcgaatcaacgatcagtggcggctgtgtttcatctggaccgacagcggtccgcaatccgtggaaatcgttgactaccactga

SEQ ID NO: 500549 - DNA, 237 bp, Stenotrophomonas maltophilia
atgaccgaccacctactccgcaacctcgggagagcccttagagcgcgacgtgaagccgctggctacagccaggagagctatgcggacatcatagggatgcatcgcacctactacagcgctattgagaggggagagaaaaacctccagctggacaccctgcaacgaatttgcgcagggctcaggtgccatatgtgggaggcactgaaggacgcggagaccttgacccagaagcaatag

SEQ ID NO: 500550 - DNA, 630 bp, Stenotrophomonas maltophilia
atgaagagctacccacagagagtgcgcgacaacattctcccgttgtcagttggctcaacattgccagaggcatttgaagaatggtcgttcactgagcggactgaggatcacgaagagccagtcgagacttgccagctctgcgagcaagaggatttgcgctaccactttgaaatcaggaatgcgctgacgggaaagaccttatgggtcggctcgcagtgcattctcaagtttggattgtcagtcttcgaaagtggactgcgcctgtcgccagccggggcgaagaagaagcttgatcgcctgatgcagcagatgcgacttgaatcgtgcatcaaagcactcgagcgactggcagccgctgaggacaacagcatcctccggaatgcactagcctactatcggaagaacaagtatctaactccgaagttcgccttcgtcgtgatgtggcgcctgcaaaaaaatggaattgaccacagcccctcgttcttcaaggtcagcctgaagaagtcgaagtacaaggaagacctgaaagccatgccggcgagtcaagttcacgcgatatggaaggcgcttacatccactcagcgtcgcatggctattgctatggggcaccctccgcccgtcgctgagtga

SEQ ID NO: 500551 - DNA, 1209 bp, Stenotrophomonas maltophilia
atgatcactcggcttcgtcttcgttgccttgcgtgccagtgtgcagtaactgcgcgcgtacaagttggacatgaaagcgttcaacgagttgcttctgtctgccctgagtgccacaccccctttcgacttcggctgatccttgaccatccgccaaatgttggggtcgagttcgacgagaactgtgaacgcacggatgaagaggggcgagtgctaaacattagtgctggttttgttattccccgtgcgcgcgtgcatgaggaccagtacttccctgtccatgacctgcctgagcctgatgaagccacgctgcgggctatccagaactcgcgtcccgagggcgtcgacggtccaatcatggttgacctcacagttttgttgggaggtttaccaaatgcgacggagtactggcgcctgctaagaaatgcgtaccgctttagccgaaccgggcagcaagatcttatgcgtgcgcatctgcgtcagttggctggcgatgaagttccagacgacgagctgactatcgaacgagccttggttggcttctttgtgcgagtactagagccgtacggggaaggaggcttacacaggttgacgacagagtttgcacgggcacgcgagttaaacgagcaagagtttgagcgatttcaggctgagttccggcagtctcgctgggatcgaatggatgagtacgttgacgtattcgatcacttctttcgcgcttatgacgagttcaatcaaactttcatgtacgttaggcgcgctaccaatctgccagatgacccgtacgcgccatcaactgactttgagcgaactcgcatgtactacggtgaggcgtttgaagttcttgggtctcacatcgatctgctagctgccgcgaacaatattgtttccgggaggcaatttgaccaactaagtcgaatttctttgcgggactaccgtggtagcgataagggtcggcgcaacgagactctaggcgcaaatcctgagctggcatggcttgtggcggaatatgacaatcgtcttagaaatgcatcgcatcatagatggttgcgcctcagtcacgatcgttcggtaattacataccgcgaagggggtgatggtgcggtccgaacgcttagctacgcggagtacctgtttcgatgctgtgcgatcacagcgcagttaatggtgcttgccgcagccgaggcgttggtacttgaggttggcgcatga

SEQ ID NO: 500552 - DNA, 387 bp, Stenotrophomonas maltophilia
atgcgtgcctgccgggtgctgttgatggcactgctgccactgccggcgctggccggcggtggcagctcgcagacgctggaatggcgccaggatgatgcccgcctggcgctgcgctcgaccgagggccaggtacgggtggaagccgcgcgtccggaagcccgcttcggcgtgcgcagcggcgaccgcatcctgcgcctggacgatacggctgtgcggcggatcgagcatcttgccgatgcgctgcggcattccagtgccccgactgcgtacctgttgctgcgccgcgacaaacgcgagctcaccgtcccggtggacgccgcctcatggcggctggcgctggtcgctccgccaccgccggcaccaccgcctccaccagcgcggcgctga

SEQ ID NO: 500553 - DNA, 225 bp, Stenotrophomonas maltophilia
atgaacgcgttaattttctgtgacgggcatctgcggcggctccgccgggcagcgcaccgtgactctctttcgaggtgctggagccgtcttgccggggccggtggcgggtccgatgcgctgccggacaacccgccggacgagcgcggcaattcgccgatcctgccgtggcgcaacattgatgagctggccgggcagctgcgtgtgctggggttgctgcaccgctga

SEQ ID NO: 500554 - DNA, 420 bp, Stenotrophomonas maltophilia
atgacgatcgatattgaatcgctcagccttcgcgagctgggtgccctggtggttgccgctgaacagcggaaacagctcatttccagccgccgtccggccagtgcggtgcggcggatgctgaaggccgccgccgccgaagccggctacaccctcgaagaactcttcggcggccaagcctcggaaacacctgcgcccgcccgcaaacccgcccgccgtaaatccggcaaagtcgcgcccaagtatcgcgacccggaatacaagcgcctgacctggaccggtcgcgggcgcatgccgcgctggttggcgtccaaggtgtcgatgggccacaaggtcaccgatttcctgattcctggcttggccaggccgaccgctggcaagaccagcaccatcggcaagcggaccgtcatcaagaagggatga

SEQ ID NO: 500555 - DNA, 1458 bp, Stenotrophomonas maltophilia
atgcgggaggcactggaccaggacgatcaacggctgaccgcgacttctgtcattgctgacggctggccaacctcgtcagggaatcgtctcaacgtgaagcacacagtgcaggacacgcaggatccgctgcagccaccgcgatcggtcagcttccgggaggccgttgccttctggctgaagctcggcttcatcagttttggcggtcccgccggtcagatttcgatcatgcaccaggagctggtcgagcgtcggcgctggatttccgaacggcgcttcctgcatgcactgaactactgcatgttgttgcccgggccggaagcccagcaactcgccacttacattggctggctgatgcaccgtacctggggcggggtggttgccgggatgctgttcgtgctgccctcgctgctcatcctgatcgggctgtcatggctctatgtgacgttcggtgaaatgcccgtggtggccgggttgttctacgggatcaagccggccgtcacggccatcgtggtgcatgccgcctatcgcatcggcacgcgcgtgctgaagaatgcttggttgcaggtgatcgccgctgcctcgtttctggccattttcgccttcggtctgcccttcccgctgatcgtactgggtgctgcgctgatcggttattgcggcggacgattcgccccacggatgttcggcgccgatggtgaccaacgtgccccgcggcagacgttcggacctgcgctgatcgacgacgatacccctgcgccggcgcatgcgcgctttcgctggcggcgcctgatcgtgctggcggccacaggcgcggcgctatgggcgttgcccatgggcgtgttgaccgcgctgtttggttgggaaggcacgttgacccagatgggctggttcttcaccaaggccgcagtgctgacctttggcggcgcctatgcggtgctgccctatgtctaccagggcgcggtggtccactacggctgggtgacacccacgcagatgattgacggcctggccttgggcgagaccacgccggggccgctgatcatggtggtggcctttgtcggcttcgtcggtgggcatgccgctgatgcagtgggtactggtcaggcattcctggctggcgcggtggctgccagcgtggtcacctggttcaccttcctgccctctttcctgctcattctcgcgggtggcccgctggtggaatcgacgcacaacgaactgaagttcaccgcgccgttgacggccatcaccgccgccgtggtcggcgtgatcctcaacctggccctgttttttggctaccacgtgttctggccgcaggggtttgtcggcccgttcgattggccatcggcgctgctcacgctgttcgccgtcgtggccctgttccgtttcaaacggggtgtcatccaggtattggcctgctgcgcgctgctgggtttggctgtgtacctgatgcggaactggtga

SEQ ID NO: 500556 - DNA, 312 bp, Stenotrophomonas maltophilia
atgaatgatgtggagcacgatctgtctgattcccggcagactgatttttcgtcgctgcttgattgggatgaggtgatgcaggatgagcgtgaggatcggctggggtttgcccgccgcacgacgtatgcgttgctgacgctgtctggtgcggaactggtcgagggctttgacggcggcaaccagaaggcactggaagaggccaggaggacggtggcgctgttccaggcacatctgcggcggcagatgtggtttgcggacgtggcggagaagcggttggggcgtgttggtgaggctcttgcagctgccgggtag

SEQ ID NO: 500557 - DNA, 741 bp, Stenotrophomonas maltophilia
atgagcacgcccattcccgcggaacggctgcgtgcactcaacagcggtggtgccgctgccacgcatctggccgaatgcctggcagtggatttcgccgcgctgttgcagggggtggcacctgtgctcgagccggaagcgctgcaacgtatgcgcgacgcctccggcaagggcatcacccagcgcatggcgctggcggcgcggttgctgcacgaagccgggcagggtgatcccgcgcactggcaggcacacgcatcagacaccgtgcgtggctgggcctgctacctgattggcagcgatgccggcgcggcgctgccggccaagctgcaggcgatgcgtccgctggctgacgacccgcacttcggcgtgcgcgaatgggcatggctggcgctgcgcagcgacatcgttgccgcaccgttgcaggcgcttgagtacctgcaggtgtggacgcaggaagcatcgccttacctgcgccgcttcgcctgcgaagcgctgcgcccacgaggcgtgtggtccacgcatatcgcgctgttcaagcagcatccagaactcgcgttgccgatgctggaagcaatggccaacgacccggagcgctacgtgcaggactcggtcgggaactggctcaacgatgccggcaagactcagccgcagtggctgcatgagctgtgcacgcggtggcaacagcagcaccctggcgatgccaatgcctacatccgcaaacgcgccatgcgctcgttgcggtag

SEQ ID NO: 500558 - DNA, 924 bp, Stenotrophomonas maltophilia
ttgcgcctgttcctgctgcccctgttcgccatccccttgccgacgctcgcctccgatgccgccgagcacgtcctgccgatgtggatgcagggcggtcatccggcagtggccgtctcgctggacgggcgttcagagccgctgcgcttcgtggtcgacagtgccgccggggcaaccctggtcgatgcacgcgtagtgcggcgctatggtttgcaggatgcggaagcggcaatgtcgcaggcccagggcgcgagcgcgaaggcggcgcggttgcagcgcatgcgcagcacagcgtggcagctgggcagttggcaattgaaggccagcggcatgcaggtcgacctgtcatcgctggcgaagggcgatgatccggccattgacggcttgatcggcaacgacctgaccgggcgctgggacacccgttgggacttcggccgcaatcaactggcgctgtggacacccggcggcttggacctggaaggaccgggttgccaacccaatgcgctgcccggccgcgatgacggcctgcgccagttcggcttcatcacgcttgccttgggtacgcccggcgtggacgccatcgccgtggtcgacaccggtgccgcgcagaccgtcctcaacgccgaagcagcccgcgcactgggcctgcgcaccgacggcagcgatgctcgggtgcgtgcacgtgaagagggcaccgaggggctgggtggcggtgcacaggcaacctggctgtacaccctgcccggcatgaccggcggcatctggcagcacccgccgatggaggtccggatcagcgaactgccggtgttcagggtgatcggcctggaggcgcgaccggccttgatcctcggtgccgacgcgatgcgcggtggccaggtggacatcggtgcgggtgccgcgcggatctgcctgcgccgacccggctga

SEQ ID NO: 500559 - DNA, 921 bp, Stenotrophomonas maltophilia
gtgtctacgctcattgccgatcccgttgcacaggtccgagccttcaaccgcttctacacccgcaggatcgccgtgctcgaggagcggttgctgcacagcgacttcaccctcaccgaagcgcgggtgctgttcgaactggcgacgggccagggcatcacagctgcgcagctgggccatcagctggacctcaacgcgggctacctcagccggctgttgagcgggctgcaggcgcgcggtctggttcaacgcgagccatcggtgatggacgcgcgcgcgaaccggctggtgttgaccgaggcgggccgggccgccttcgcacagctggatgcagcgtccagcgaaagcatcggtgccatgctgggagatatcagtgaagcgggatgccagcgccttctggaggcgatgggacacatccaggcgctgctgggaggtgcatcgtcgggttgcgtgctgcgcgatccccgccccggcgacatgggctgggtgatccagaagcacggcgcgctgtatgcacgcgaattcgggtggaacgcggagtttgaagcgctggtggccgacatcgtcacccgctacctgcgcgagcatgacccgcagaccgagcgctgctggatcgccgaactggatggcaccgcggtgggctcggtgttcgtggtccggcacgacgcgcacaatgccaagctgcggctgctgcacgtcgatgccagtgcgcgcaggcggggcatcgggcagcggctggtggaggaggcgatgagtttcgcgcgcgcggtgggctacaagcgcatggtgctgtggaccaatgccgcgctcaccgaagcgcgcggcctgtacgaacgggccggtttcgagttgatagcagagcagaacgaacagctgttcggccagccgcaggtgtcccagctgtgggcgcgcccgctggtctga

SEQ ID NO: 500560 - DNA, 2544 bp, Stenotrophomonas maltophilia
atggtggccctcgccaccgcgctgctgtccaccagccccgctgcatgggcgcaggacagcagcacatcgacgacgcccgacgcggccaccaccctggataccgtttcggtgctgggcagccgcaccaaaccgcgcacggtgtcgtcgtcggcggtgccgatcgacatcatcagcggtgaagagttccgcaaccagggcgcgaccgacgccctcgaccagctcaaggtgctggtgccttccttcaacgtcagcacgatccccatcgacgatgcggccagcctggtgcgtccggccaacctgcgtggcctgccgccggacaacaccctgctgctggtcaacggcaagcgtttccaccgctcggcggtgatcaccttcctcggccatggcctctccgatggtgcgcagggccctgacctttcggtgttcccgtcactggcactggagcaggtcgacgtcctgcgcgacggtgccgccgcgcagtatggatcggacgccatcgccggcgtgctcaacttcggcctgaagaagctgcgcgaaggcggtactgccgaggtcttcgccgggcagtactacaagggcgacgggcttaccacccagtactcggcgcagatcggccttccgctgaccgagcacggtttcgccaccctgacggctgagtggcgcaaggccgacgacacttcgcgcagcgtgcagcgcgatgatgccgccgcggtggcggcggccggctaccccggggtgaacgacccggcgcagatctggggatcgccgaaggtggacgacgacctcaagctggtcgccaacctcggctacaacaccgaaaacgtggagttctacctgttcggcaactatgccaagcgcaaggtggacggcgggttctactaccgcgaccccaccgcgcgttcgggcgtgtactccaatgatgggggggagacgctgctggtgggcaacctgaccggcgtgggcagctgcccttccatcgccctgcgcgacggcgccggcagcctgctgccctacagcaccgtaagtggcgccgtgggtgcgctgccggccaactgcttcaccttcctctccagtctgcccggtggcttcaccccacgcttcggcggcgaactggaggacgcttcggtgttcgctggcgccaagggcacgtggggccagtggtactgggacgtaagcggctcatggggccgcaacgatattgaattcaccatctacaacaccgtcaacgcgtcgctcgggcctgaccagccggccgggttgctgttccgacccggcggtaacacccagaccgaaaagaacctcaacgtggacgtaagccgggacataccggccagcttcagcagccagccgctgcgcctggcgatgggcgccgaatggcgcgaggagagcttcaggatcagccccggtgatggcccatccaccgccatcggcccgctgaccgaacagggcttcgcgcttggctccaacggtttcaatggtttcagcacgcgcaccgccggcacctttgatcgccgcaactgggcggcctatgccgacctggaagcccagctcaccgacaagctgctgctggccggtgcgctgcgctacgaggactacgattcgttcggcagcaccactaccggcaagttcaccgcgcgtttcgacttcaacgagcacttcgccctgcgcggtgcctacaacaccggcttccgcgcaccgactcccggccaagccaacgtcagccagatcagcaccgtgttcggcggcaccgcgctggaggacattgccacgcttccgcccaccaacccgatcgcgcaactgaagggcgcccagccgctcagtccggaagagtccaggaatgtgtcactgggagcggtgtggaccgcgggcgactggctgatcaccctggacggctaccagatcaaggtggaagaccgcatcgcgttgagcaccagctttgcggtcaccccggaagagcgcgcggcgctggtggccggcggcaatgcggaggccgcctccatttcgcaggtgacctacttcggcaacgccttcgataccaccacgaccggcgtggatctggtgaccagcttcaagagcgatcacttcggcggggtaaccacctactcgcttgccgccaactggaaccgcaccagggtggatcgctacgacaccgacttcatcgacgaagcccgcgtctacaagctggagaaatcgctgcccaggaccaagggctacttcagcatccaccaccagcggcagatcttccatgccaacctgcgcttcaattactacagcagctggtacgaagaccatctggacagcggcgtgatctccgccgaggacgggggcctgccgatctacgacggcagcgcgctgatcgtggatgcagaggtgggctggaagttcgattcgggcctgtatttcagcctcggcgcgcagaacctgttcgaccgcacgccggccgacaacccctggagcggggtggccggcgcgcagtaccccgtgcactcgccctatggattcaacggcggcttctattacgcgcgggtaggctggaagttctga

SEQ ID NO: 500561 - DNA, 729 bp, Stenotrophomonas maltophilia
atgcacccggacccgcagcccctcatcgacgcgggcgacgatgacgcccactgggccgacctgctttcgcccgcccgccggcgcctgatcgcgtcggccggcctggcagccggcggcctggccagcgcgtccaccgccaccgccgccgcgcgcgtcggcagcgccgtgaacaccaccgagcccgggcgacccggcttccgcgccatcgttccgccagcgtccaagggccgcagcccctggggccaggccacggccagcgaaccgaccccgcgcccggtcagcgtgcgccccggcgaggccacgttgcccaccgccccgcgcgcctacaccgacatcaagagctaccacgcccatatctatttcgatgaggacagcttcgagaaggcagccctgctgcggcgctgggccgccgagcgcttcccggtggagctgggcaactggaacctggagccgcgtggcccgcacgtcaccccctctttctacttcggcttcaccaacgacctgctgccggtgctggtgccctggctgcagctcaacagcctgggcctgaccatcctgatccaccccaataccggcgatggccgcgccgatcacctgtactacgcgttgtgggtgaaccgcgcgcagccggtgaacgcctacaactggccggcgccgcaaccgggggaacaggagccgttggaggaggtattcccgaacgtggtgccgacggtatcgttggagacctga

SEQ ID NO: 500562 - DNA, 438 bp, Stenotrophomonas maltophilia
atgagtgccgttcccgatctggcgaccatgcagctgctgctgcgccagggacgctggcccgcgctgctgtcactggggctgctgctggtggcgctgctgctgctgggcatcgaaccggggctggcgatgatcgccgccgggctgttgctgctcagtgtgggcgctgggctcatgcaggcctaccatgcatggcgggtcgggctggacgcgagcctgctgcagctgttgcgcgatgaaggcctggacggcgaagccgctgcacgccgtaccgaccagctgctgcaggacagtggcctgcgccgcacaccggccgatgcgccgctgcgcggctgggacgtgcgttgggccggcatgcgccggctgctgctgcgccagtacctgctgacagcagtgcaggccgcactactggtgctggccgtagtgtggccgcagacgtga

SEQ ID NO: 500563 - DNA, 1752 bp, Stenotrophomonas maltophilia
atgcgtcaggcgcaggaacgggaattccacagcttcgaccaggtaccgctgttctaccggtactgggccggcaccaccgccaccccggccacccgggccatcgtgctgctgcaccgcgggcacgagcactccgggcgtgttacccatctggtcgatgagctggacctgcctgacaccgccttcttcgcctgggatgcgcgcggcaatggccgttcgccgggcgcgcgtggcgatgcaccgggctttccggcgctggtgcgcgatctggacagcttcatcgcccacatcggcgccgagcatgggatcgcggtggaagacatcgtggtgatcgcgcagagcgtgggtgccgtggtcgccgccacctgggtgcacgactacgcgccacgtctgcgcgcgctggtgatggcctcgccggcgttcaaggtgaagctgtacgtgccgttcgcacgcccgggcctggccttgatgcagaagctgcgcggcaacttcttcgtcaacagttacgtcaagccgcaatggctgacccacgatccggcgcgggtggaaagctaccgcaccgatccgctgatcacccggccaatctcggtgcgggtgctgctgggcctgtacgaggcggccgatcgcatcgtcgccgatgcgcaggcgatcagcgtgccggtgcagctgctggtgtccggctcggacttcgtcgtgcaccgtggcccgcaggaccgcttctacgagcgcctgtccagcccgatcaaggagcgcgtgcatctgccgggcttcttccacgacacgctgggcgagcgtgatcgggcaccggcactggcgcgcatccgcagcttcatccaggcgcgattcgccgagccgttgcgcgagttgtcgcgccgcgatgcgcaccgccatgggccgacatttgaagagtctgaaatcctggcctggccgcccgagcgcaacagcctggccgatcttcgctggcgcgtggtgcgcggtggcctgcgctttggcggcagactgtccgaaggcattgcactgggcctgcagaccggtttcgattcgggcagcacgctggactacatctatcgcgacgaagcacgtggcaaaggcccgttgggtcgcctggtcgaccgcaactacctggatgcgatcggctggcgcggcatccgcattcgcggtcggcacctgcaggaactgctgcgcgatgccgcccagcgcctgcgtgggcagggcatgccggtgcgcgtgctggacgtggccgctggccatggccgttatgtactggaagcgctgggccagggcgagcaacgcgccgagcgcatcgtgctgcgcgacttcagcggtctgaacgtgacccagggccaggcgttgatcgagcgcctcggtgcgtccgacatcgcccgtttcgagcagggcgatgcgttcgatccggtgcagctggcgcaggtcgacccggcgccgacactggcggtggtatcggggctgtacgaactgttccccgacaacgacgccgtgctgcgctcgctgcagggcatcgccgcaacggtgccggtgggtggctacctggcctacaccggccagccctggcacccgcagctggagttcatcgcccgcgcgctgaccagtcatcgtggtggcgctgcgtgggtgatgcgccgccgcacccagcaggaaatggatgaactggtgcgcctggccgggttcgagaaagtggcgcagcgcatcgatgacttcggcatcttcactgtgtcgctggcacgccggaccgcgtga

SEQ ID NO: 500564 - DNA, 333 bp, Stenotrophomonas maltophilia
atgacgaagacccctgagcgacggcgcgcgaaaagtgcgcttcttgaagcggtgcatgatgctgctgtgagtctgcacgcgcatggcttcatcgataaacgtcggttgagcagctacgaagcactttgccttgagccggtccctgagtacagcagtgcccagatccgtgccctgcgtacgtcactgcagctcagtcagccggtctttgcgggggttctcaataccagcgtttccaccgtacgcagctgggagcagggcgaaaagaaacccagcggaccgtcactgaagttgcttaacctgattgatcggaagggtctcgaagcagtcctgtag

SEQ ID NO: 500565 - DNA, 294 bp, Stenotrophomonas maltophilia
atggaagcgggtctggtggatgctgatcttggcggcggaatcttcaagaagcgcgttccgttgccggggcgaggaaagcgtgggagcgttcgaatcatcgtcgccacacagcgaggcgggcattggttcttccttttcggctacgagaagaatgaacgtgctgcgatcacgaatgcggaacgggatgcgctgcagttgtacgcatcggagttcctgagaatgagtacggcgcagctgaatcgcgccgtggagtacggggatctacaggagatcggccatgacgaagacccctga

SEQ ID NO: 500566 - DNA, 744 bp, Stenotrophomonas maltophilia
atggcatccgtaccctgttacgacacattcgatctgcactacgcacagcacgtggcggcctctgcgtcccgtccgctggaacgccggacgctgctggagctggccggtccattgcaggggcgggatgtcatcgacctggcctgcggctccggtgacttcggccgtcaccttctgcttcacggtgcacgaagcgccctcggcgtcgatctgtccgcagcgatgatcgaacaggcgcgccagctttcggcgcagggtggtgacgccatgcagttcctgcacggcgatgcgacccggctggacctgccagcccgttttgatattgccgtggcggtctggctgttcaaccatgccgatacgctgcaggaactggagcgcatgtaccgggcagcagcgagcgtgctcaaaccgggcggtcggctgctgggcatcgtcacccatcctgccttccggctggccaacggtgacttttcgcgttacggcgcgcgcatcgtccggcagcaggcccggaatgaccatcacctggtagaggtggagttcgccgatgcagccgtggcacgcgtcaccgaccatcaatggcgtgcggaccagcatgagcaggcggcagcccgcgcggggctgcccgggctgcagtggcgggtgccggcgccgacagcggcggagtgccggggccggcctcccggcttctgggatgaataccgggacaacaacgcgctggtggtactgcacgcccgcagggaggggtag

SEQ ID NO: 500567 - DNA, 456 bp, Stenotrophomonas maltophilia
atggccagtcccgcactccgttatggtcgttggtcgcataccggcaatgtctatgcacttaccacggtgacgcatgcgcgtcgtccctggttcagtgacaaggccaacgtcgatctgctgatcgaagccctgcggaccgtagagcggacggggcgcacctcctccctcgcctgggtggtcatgccggatcatctgcattggctgttcgaactccgtaccggcacgcttgccggctgcatgcagatcctcaaatcacggagcgggcgttccatcggcaggcgcgctgaggccaacgcgccgatctggcagccgggatactacgatcatgcgctgcgcggcgatgagtgcctgcgcacgcaggcgatgtacatcgcggccaatccagtgcgtgctgggctggccacgcgcatcggggaatacccctatgtgtggagtcgatggccgcttgaggagtga

SEQ ID NO: 500568 - DNA, 339 bp, Stenotrophomonas maltophilia
atgcgccggatcacccgccaactgcgtacgtacctgatgatgctgctgatggcggcattcgtggtcgttccggtggccgacgtgctggcctgcgcggtcgaaccgcacgacaccactgcggtgcacgtggaaagcaacaccaacgatgccgagggtgacagtgaccgcaagcacgccggtgcctgcagccacaaccactgccaccactccaacctgagccttccggccagcaccctcgccgccttcggtgcgccactgccggcgcgctggatgaatgccggcgacgcggcgacctatgcggtcgcccaggatgaattgacgcgtcccccccgggcgtga

SEQ ID NO: 500569 - DNA, 927 bp, Stenotrophomonas maltophilia
gtgagtaccgccttgcaggccagcccgttgcccgcgcgggtactgattctcgggctgggctggagcggacgcgtgctggccgcgcagctgcaggcgcacggcgtaggcgtggccggcacggtgcgcgatccctcgttcgcgccggacgatggcctgccgcggcatcagctgcacgccgacacgccaccgtcgcctgccctgctcgatgagatcgcacaggccgatgccgtgctgtgcagcgtgccaccggatgctgaaggggacccggcactgcgcctgctgctgcccgcgctgcaggccagcccggcattgcgctgggtcggctatctgtcgtcggcctcggtgtatgccgaccgcgccggcggttggatcgacgagcgcagcgcggccgacgccactgaagcggctggcgtgcagcgcctgctcgcggaagcccagtggcgtgcactggccggacaacgcggcatcgcctcggcggtgttccgcctgcccggcctgtacgggccgggtcgcaatgcgctggtgcagttggcgctgggccgtgcacgccacgtggttcgcccgggccaggtgttcaaccgactgcacgtggatgacctggcaaccgtcgtcatcgccgcaatgcagcgaccgacgcacaagggcctgtacctgcccagcgacgacgaaccggcaccgccacaggatgtgctggccttcgctgcgcagctgggtgggtttgcgctgccgcccgccgtggcctgggatgacccggcactgagcccgacgctgcggcgcttctacgagagcaacaagcgcatcgacagccgtggcacgcgtgaagcgctggggtggcagccgcgcttcccgagttaccgtgaaggcctgacggaccttgccgcttcgctcgccgggcatggcccggcgctaccggacagcgctttgtag

SEQ ID NO: 500570 - DNA, 486 bp, Stenotrophomonas maltophilia
atgcacacgtggtacctcggtggcatcgaccatcgccccttcctgcacctgttcgagatgagcgacagcgcgctcgccgcgctcggcatccagcgtcgctgggccggcgccaacggcggacatccctgccggatcagcctgagcgatcccgcgcctggcagcgagctgctcctgctgtcccacgtccacctgccgctgcattcgccgtaccgcgccgccggcccgatcttcgtgcagcgcggcgtgacccgttgcgtcctgacgccgggcgaggtgcccccgtatgtgcagcgccggatgatttcgatgcgtgcctatgaccacgccgcgctgatgtgcggtgcccaggtctgtgcgggcaccgaggtggccgaccatctggatgcactgtttgccgacccgtcggtggcgttcgtccagctgcacaacgcggcgcatggctgtttctcgtgccaggcagatcgggtgggtaccgggaccgcgtag

SEQ ID NO: 500571 - DNA, 792 bp, Stenotrophomonas maltophilia
atggatatggcagatcagacatcacccgcgttgattgaccccgctttggcgaacgccgaaggcggtcccctcgtcctggcctcgcagctgcgggtgccgggacggcgccgcaccgcacgccaccagcacgtgcgcggccaagtgctgggtgcccaccacggcctgctgcggatcgaggccggcgatctgcactggttgctgccggcggggcacgttgcctggataccgcccttgctgcctcacgccctggtaggggcagaggcattcgatggctggagcctgtacttcaacgccgaagcctgtctggagctgcccgccgtgccgcgcattttccagccgaacgtgctgttgcaggcggcgatgatgcgcgcactgagttggccacatcaggcgctggacgccgcgcaggcacgcctggccggcgtgatcaccgatgagatcgccgccagcacgcctttgccgcttgccttgccacaaccgcaggatcgacggttgcggcggatcgcggcggcgctggcacggtcgccggacgaccttcgcagcgtcgaagcgtgggcagccgccaccggactgtccggccgcagcctcgcccgccggtggcaggccgaaacaggcatgaccctgggccattggcggcagcgcctgcgcgtgctgctgtcgctgccacgcctgcttgccggcgagccggtgatcagcgttgcgctgtcgatgggctacgacaccccgagcgcgttcatcaccgtgttcaagcgcgagatgggggtgacgcctgcgcggtacagggtgggctga

SEQ ID NO: 500572 - DNA, 2226 bp, Stenotrophomonas maltophilia
atgcgccatctgttcgcttcgctcgccctcatgctcgccaccagtaccgccgcccacgccgaaaagctgaccctggaagccatcaccggcccgctgccgctgtccggcccgaccctgatgaagcccaaggtggcgccggacggttcgcaggtcagcttcctgcgcggcaaggacagcgaccgcaaccagctggacctgtggacctacgacatcggcagcggccagacccgcctgctggttgattccaaggtggtgctgcccggcaccgagaccctcagcgatgaggaaaaggcccgacgcgagcgccagcgcatcgccgcgatgaccggcatcgtcgattaccagtggtcgccggacgcgcagcgcctgctgttcccgttgggcggcgaactctacctgtacgacctcaagcagcagggccaggcggccgtgcgccagctgactcacggtgaaggcttcgccaccgacgccaagctgtcgcccaagggcggtttcgtcagcttcatccgcggccgcaacctgtgggtgatcgatctggccagtggcaagcagctgcagctgacccgcgacggcagcaccaccatcggcaacggcgtggccgagttcgtcgccgacgaggaaatggatcgccataccggttactggtgggcgccggatgactcggccattgcctttgcccgcatcgacgaggcgccggtgccggtgcagaagcgctacgaggtctacgccgaccgcaccgatgtgatcgaacagcgttacccggccgccggcgacgccaacgtgcgcgtgcagctgggcgtgatcgcaccagccgccgatgcgcagccgcgctggatcgacctgggcaaggaacaggacatctacctggcccgcgtcgattggcgcgatgcgcagcacctgagtttccagcgccagtcgcgtgaccagaagcagctggacctggtcgaagtggcgctcgactccaaccgccagcgcgtgctcgcccacgagaccagcccgacctgggtgccgctgcacaacagcctgcgcttccttgaagatggcagcgtgctgtggtcgtccgagcgcaccggcttccagcacctgtaccgcatcgacagcaagggcaaggccactgcgctgacccatggcaactggccggtggacgaactgctggcggtcgatgagaaggccggcaaggcctacttccgtgctggcatcgagacctcgcgcgaaagccagatctacgcggtgtcgctgcagggcggtgagccgcagcgcctgtcgaaggcgccgggcatgcacagcgccagcttcgcccgcaatgccagcgtctacgtggacagctggtccaacagcaccacgccgccgcagatcgaactgttccgcgccaacggcgagaagatcgccacgctggtcgagaacgacctggccgatcccaggcacccgtatgcgcgctaccgcgatgcgcagcgcccggtcgagttcggcacgttgatggctgccgacggcaagaccccgttgaactacagcctgatcaagccggccggcttcgatccgtccaagcgctacccggtggcggtgtacgtctacggtggcccggccagccagaccgtcactgacagttggcccggccgtggcgaccatctgttcaaccagtacctggcccagcagggctacgtcgtgttctcgctggacaaccgcggcaccccgcgccgcggccgcgacttcggtggtgcgctgtacgggaagcagggcacggtggaagtgaccgaccagctgcgcggcgtggcctggctgaagcagcagccgtgggtggacccggcgcgcatcggcgtgcagggctggtccaacggcggttacatgaccctgatgctgctggccaaggcatcgaaccagtacgcctgtggcgtggccggcgcaccggtcaccgattggggcctgtatgacagccactacaccgaacgctacatggacctgccggcgcgcaacgaagcggggtaccgcgaagcgcgcgtgctgacccatatcgacggcctgcgttcgccgttgctgctgatccacggcatggccgatgacaacgtgctgttcagcaactcgaccagcctgatgagcgcgctgcagaagcgcgggcagccgttcgagctgatgacctatccgggtgccaagcatggcctgtccggcgccgatgccctgcatcgctaccgtgtggccgaagccttcctgggacgctgcctgaagccctga

SEQ ID NO: 500573 - DNA, 243 bp, Stenotrophomonas maltophilia
atgatgtctgaattagatcagatgtgcgccttcgaggtagtttatatgcctgtggaaacaaatgatgtcgtgcgcctgctagaagacattccttcggaggagatttgtcgtggcagtaccggggtagtggttgccctcttctccgagccagaggaggcctatgaggttgagttttgcgacgagcatggcgcctcaactgtacaggttgcactgcggccatcgcagtttgagatcgtgatgtag

SEQ ID NO: 500574 - DNA, 588 bp, Stenotrophomonas maltophilia
gtgagcctgcacatcggcatcggttcctccagctccagtgccagccagaccagcgacgaccagttggcggtggaccgcaccatccgcagccagggctacttcagcatcgtcgccactgccggtgacctgaacagcgcgctgtcggccgttgacctgcgcaagatgcaggagcgtgccgaggtgatgcagctgggtgggcagctgctgttcaagggcgtgggtgacctgggcggctacctgagccagaaggcggagaccgaggaaggcaaggcgttctgggccgacggcggcaatggccgcgcgctgctgcacggcatggccggtgcagcgatggccgcattgggtggtgcggatgcgctgaagggcgcggtgagtgctgccggtgcggagaaggccaagatcgcgatctcggaattcctcgagagcaacaagggcaacctgagctgcaggcgctgtcagccccgctttcccgcgaaccgtgcctcgatctcctccagtgacttgcccttggtctccggcagccagaacgcggctaccaagaagaacacgaaggtgcacgccgcccagaacacgaacatgctggcgtag

SEQ ID NO: 500575 - DNA, 1017 bp, Stenotrophomonas maltophilia
atggccgcacccgctgcatcaccgcgcacgttcagtggcgagctgcagagggccccgtggcgcctggacgttccggctgactggaacggtgacctggtaatgctggcgcacggctacgagccggtaggcatgccacgtgctacgccgatggctgccaatgacggcaccgcgccactgctggcggcaggctacgccgtcgcgcagagcgcctatgccagccagggctgggcggtggccgatgcgatcaccgacatggaacgcctgcgccggcatgcagtggctgaactcaagcatgtgcgccatatctggatgctgggattttcgatgggcggcgccgtgaccctcgccagcctcgaacggttcccgcaacactacgctggtggcgtgtcgctatgcggcgccaatcttagtggcgaacagatcgcgagtgatatgctgaccacgctggtcgctttcgattacttctttgccaaggccgaaggcctgccggctgcgggactggtctcacgcgacgcggctgcgctgccacagggcgaactgtaccagggcatctccaatgcgctgcaacgcagcccctcgcatgccgcgttgctggcacagcggctgcaggtgtccgctgatgcactggccggcacgatcagcctgcatgcactggtcctgcacgaactggccacgcgcagtggcggcatgccggtgggcaacagaggtgtggcttacagcggcttcggtgacgacatggcgttcaatgccggcgtgcaacgtgtcgacgccgtgcctgccgcgcaggccgctgtccgcagggagctggcattgagcggtgcgttgaggcgaccgctggtgatccagttcaacaactacgacccgacgatcgtgccgcgcatgcagacggtgtatccgcagacggccgcacgggccggcgcccgtccgctgccacaggtgctgccgcccgttggcgaaggccattgtggcttctccggcgcgcagatcatcgaggcgttgaaggccgcgcagcgttga

SEQ ID NO: 500576 - DNA, 1284 bp, Stenotrophomonas maltophilia
atgcctgaacaggtgaaggtcttctacgaagggtggggagagcgatggcactggggaacgctgatctccagcatcgccctgaccggtcgcccgctggtcgcgttcgagtacagcaacgaggcccggcgaaggggactggaactgtcttcgtacaagctgccgctggccggccctccgttgcggcgggattttccggaccatcagctgcaactgcccgggcctgtgtatgacgcgttgccagacggctggggcatgctgctgatggaccgcatgttcaggcgccgcggaatcaacgcagcacgcattggcccgctccagcggctggcctatgtcggtggcaacgcgatgggggccatgacgtttgagcccgtggcgcccgaaggtgaggcgccgaaggtccatataccgctagagcagctttccgcggaagtgcagcaggtgctccacggagaaggcggtgaattcctgcagaccttgctgctggtgggtggttcgccccaaggtgcaaggcccaaggccctggtctatcgcgatccgcgatcgggcgcgttcaccacggccgtcacgcccggcttcgaagcctggttgatcaagttcccggccagagaagagcatgccgaggtgtgcgccatcgaaatggtctacgccgagtgtctgcgcaggtgtggcatcgagaccccggacacgcagtacttcagcctgcccaacggactggccgcgttcgccagcaagcgctttgatcgccacgatgggttgcgtgtgccgatgcagagtcttgctgcattcacgggcgccaactaccagacggcggggtcgttggactatgtcaacttcctgcgcgcgacccggttgtgcaccaatgacgtgcggcaaatggccgtggccttcgaacgtgcggtcttcaacgttgcgttcaacaaccgggacgatcatccgaaaaactttgcctacatcatgtcgccagatgggcaatggcgtttggctccggcctacgacgtgaccttctgcgaaggacccaacggatatcaccagatggacgtcatgggggaggcactggagatttcccgtgctgacctgcttcgccttgccgaagaggcagaagtgcagcacggggacgccagcctggcgattggcagcatttgcgacgtggccagccaattcacggaaatcgccaacagcatgtactcaaacgttattgctcaagataccttgatcatgatccaggggcgcatcaacgagaacgtagctctgttgcgggaagtccggcgtggcctgcggacctga

SEQ ID NO: 500577 - DNA, 327 bp, Stenotrophomonas maltophilia
atgcacgctatgttggatttaagcctcagcaagcccagcgaggtcgtcaagcgactctgcgggcgcttgcgtacagaacgcatggcgttgggcatgacacagtcggatctggccgggcgtgccggcattggtaccaacaccgtgtccaacctggaggccgggcgcaatgttggcttcgaggcggtggtccgcgtggcgatggtccttggtcggatcaacgagctcgaaggcctgttccagccaaagttggacagcatcgaagacattcggcgctacgaagaggccgcgaaccgcctccggacgaagaggaagccccgtaatgcctga

SEQ ID NO: 500578 - DNA, 723 bp, Stenotrophomonas maltophilia
atgtcacttcgcacaacccattgggcctcgacaggacctctcatcttggcaaccggccgcaccaccctttcactgctattggtttcgatggcattaatcacatcgggatgccggacggcagctgtcatcagcaaggaaattgcactttccacgaccaagcgcgcatcttcgagaacattcaacttgacagcccaactgccggcacagctgcacatgactcttgtcgcacactatgcaccacgagatgcgaaagatctgaactgcagcggagtaacttcctttgtgagcaacatccccggcccgagatctgtcacaaaggcatttcatctatccagcccggatgaatccaagccatcacgtgtaaacatccccgtgcattactccatcggagcttgcaaactgccactggaagcggtcggactaacactccagaacgaacctagaaagagcgcaatcaattcaggggagtaccgcttccatctacatgtccgagatgcaacagaagacgctacttatctgaatgcggggatcaaggagcttcgactcacccagcactgcaagcaactcgttcatcaaagcagctcttccaaggaagagttgaggaagttactgatctgcgacgggaaaaaagaggtcaatcttgatcgtaagaatcttaaagaaatgagcgttcgcctacacgttacgctggacccgatcgaagctcctctctatcagaaatga

SEQ ID NO: 500579 - DNA, 273 bp, Stenotrophomonas maltophilia
gtgggtcgcctgcatgtggatcgcactctcaaggcgaagagtgtcgacgcggtgttcgccaccggggactgcgcgcatgccgccaccgatgacgagggcaacgtggcgatgatgtcctgccagcacgcgatgaacctggggcgctccgccggacacaacgccgcggctgacctgaccggggaagcgatgattccgtatgcgcagcccaagtacgtgacctgcctggacctggggccgtggggtgctgtctacaccgagggctgggatcgctag

SEQ ID NO: 500580 - DNA, 222 bp, Stenotrophomonas maltophilia
gtgtgcgtcatccacgcggtgatgatcaatgcgcagaaggccatgcgcgaagaactggcacgttccaagctgccctcgattgccgagggcgtgcagggcaagggacgcccggcgagtttcgccggtgatgtgcaggagtggttcgcggaccgccaggtggcatgcgttggcgcgcgacggcgcaggacaatgattgatctgcgcgggtaccgccgcgcataa

SEQ ID NO: 500581 - DNA, 303 bp, Stenotrophomonas maltophilia
atgccgatgcttgccctgatcctgctgttctccagcctgttcggcgacggctgcgggcccaccgaggatgccctgcgcagccagatcctgcgcaccgaggatcggcaggccatacatgaagcgcagccccttcagctctatcacctgcgccaggaccgcgtgctgcggctgggcagccagcaatcgccagacgacactggcgccagccctcatccggcactggtccgggtaggtgtggcgcagctgtgggaacgcgtcgacggccagtggcgcatccagcgttcgatcagcattacccactga

SEQ ID NO: 500582 - DNA, 1365 bp, Stenotrophomonas maltophilia
atgaccgtcgagatcgtcgacccggccaccggccaggtgacctaccgccatgaactgatgggcgctgccgacatcgagcagcgcctgcaggccgccgccgatgcgttccccggctgggccgagcgttcgctgcaggagcgcggcgcgatcctgcgccagatcgcggcgcagctgcgcacgcgccgcgacgacctgcagcaggcgatgacccacgagatgggcaagctcaaggccgaagcgctggccgaggtcgacaagtgcgcggcggcctgcgagtactacgccgaccatgcggccgactatctcaagccgcagctgatcgacaccgaagcgcagcgcagctatgtgcgctacgagccgatcggctgcgtgttcgcggtgatgccgtggaatttcccgatctggcaggtgttccgcttcctcgcaccggcgttcatggccggcaacgtggccctgctcaagcacgccagcaacgtgccgcagtgtgccgacctgatcctggcggtgtgccgtgatggcggcctgccggacggcgtgttcgacgtgctgcacatcgacaacgaccaggccgccgacgtgctgcgcgacgcacgggtgaaggcggtgacgctgaccggcagcgagcgggcagggcgctcgatcgcctccaacgccggcagccagttgaagaagtcggtgatggagctgggtggcagcgatgccttcgtggtgctcgacgatgccgacctcgacaagacggttgcggcagcagtgaagtcgcgcttcgacaacagcgggcagacctgcatcgcggccaagcgcttcatcgtggtcgaggcggtggccgatgaattcacccgtcgcttcgttgaagctgcggccgagcgccagtacggcgatcccgatgagcggggcaccacgctggcgccgatggcccgtgccgacctgcgcgatgaactgcacaagcaggtacaggccagcgtggccaagggtgcgcgggtgctgataggcggcgagccgattgccggcacccacgccggctatccggccacggtgctcgaccaggtcggcccgggcatgccggcctacgaggaggaactgttcggtccggtggctgcggtgatccgggtcgctgatgagagcgaggcactgcgcgtggccaacgacacccccttcggcctgggcggcagcgtgtggacgcgcgatccggtgcgcggcgaagccttcgcgcaacgcatggagtgcggcgccgcgttcgtcaacgcgatcgtcaagagcgatgcgcggctgccgttcggcggcagcaagcagtctgggtttggccgggaactggccgaccacggcatccatgagttcatgaacatcaagaccgtttacgtggcctga

SEQ ID NO: 500583 - DNA, 1371 bp, Stenotrophomonas maltophilia
gtgatttccccggacagcccctcccctttcccgccccgcctgccgggctgcctgcctgcacggctgccgctggtcatcatcggcgccggccaggccgggttgtccctcagcgcgctcctgcaggaggtccgcgtcgagcatcgcgtgctggaggccgaaaccgtgggcgccagctggcggcggcgctgggattcgttccagaccaacaccgccaacgcgacgatggccctgcatggccatgcctatgccggggatgacccggaagggttcatgggggccccggaagtgatccgacggctgcgcgactatgccgacgagcgcgcgttgccgatcagcgaggggtgcgtggtccatcgggtcgggccggagtccggtggctatgccatcgacagcagccgggggctgatccatgcccaggcggtggtggtcgccaccggtgaataccgccgggcgcggttgccccgggcccctttcgcgcccgcaacaggcctcaccgtgctgcactccagcgactaccgcagtcccggccagctacccgagggcgcggtgctggtcatcggcggcggccagtccggcgcgcagatcgcccaggacctgcgcgacggtggtcgcagcgtgtactggtcattggccgatcgtcattcgcacacccgtcggctgcgcggcaaggactcgatgacctggtgggacatggccgggcgcatccatcaacacgtaagccaatcggcggccgtactggcaggcgagccggacgcgctgcgcaaggcccgcaccgcggagttccccctgatttccggcaagggacgcgccggcctgggcagttcgatcagcctgctggcgatgcaccgcgcagggatcaggttgctgggccggttgcaggaattcaatggaaacaccgcccgcttcgccgatgtccgcccgcaacttcgcaccgcgatcgaggcgacgcgcgccgagtacgcctatctcgattcgctggccagcgcgtactacgccacgcggcccgagccgcgcaccgacgatgcccgctacattcccgaagaggtctatctgcactgggagccggacatagccccggatgaactggatctgcagacggcaggcatccgctcggtggtgctggccaccggtttcgtcgccgaatggccctggctcgatgtgcagggcgcgctggatgcccacggctatccgctgggcgagtttggcgtttccccgcaaccgggcttgttcttcatcggcatgcacaacctgcagcggatgagttcgtcgttcctgtgcaacggcggccgcgatgcacgcgacctgctgccggccatcctgaggcaccttgaccaggccgacggtaccgattccggcacggtgaagcggtga

SEQ ID NO: 500584 - DNA, 1287 bp, Stenotrophomonas maltophilia
atgacgcctgcccacgatccgcgccgcgcccagctgcggcgcctgaaagccctcgcactgggcctgctgctgttgatgctggccggattcgcggtcagccattggcacggcgaacgcggcatctgggcctgggtttcggccttctgcgaggccgctgcggtcggcgcgctggccgactggttcgcagtcgttgcgctgttccggcggccaatgggcctgccgattccgcacaccgcgatcatcccgcgcagcaaggagcgcatcggcgacagcctggcgctgttcgtgcgcgaccagttcctggagccaggtgtgctgctggccaagctgcaggtgttcgatccggccagccgtctcggcagctggctgtccgacccggcacgctcgcggatgctggccgacatggcccgcagctgggcgctgcaggcactggatttcttcgacgaaaccgcggtacgccggcaactgcacgccttcgtggtgcagcagctgcggcagtggaatgccgctgccaccgccggtgaactgctggccctgctgaccgccgatggacgccaccagcgcgtgctggacgagggcctgcagcggctggggcgctggctggagcagccggaggtgaaggaacgcgcctcgcagctgatcgtgcgctacatccagcgcgaatggccgacgctgtcgagcacggtgaactgggtcaagccgatcgacgagatcggcgacagcctggccgagcgcctggcgcgggcggtgctggaagaactgcaacaggtgctggccgagccgcagcatccgctgcgccaggactatgagacctggctgcagaactacgtgcagcgcctgcgcgaagacccggcgctggccgagcgcatcgaacagctcaagcaggacatgatcgaccaccccgccctgcaggactacgtgcaggggctgtgggcgcgcatccatgccagcctgcgcgccgacctgcaacgcgaggactcggcactggtcggccacctgcagcgcagcctggcgtcgctgggcagcagcctgcaggccgacccggccctgcgcgaggccctcaaccagcacctgctggaaggtgcgcagcgcctgaccgggcgcctgcgcgagggcgtgaccacgcatatcgcgcagaccgtgaagggctgggacgagcggcacctggtcgagcaactggaactgagcgtgggtcgcgacctgcagttcatccgcttcaacggcaccctggtgggcgggttgatcggcctgctgctgcatgcggcaaccgtggtgttcaggttctag

SEQ ID NO: 500585 - DNA, 474 bp, Stenotrophomonas maltophilia
atggcgtggatctacaatgcccgtatggatagcatgctgcagcggatgtctggaatcggctttttttcccggttgggtgaaacactgcccataacggccggcgtcgtcgccgttcggtcgctggccgaagcactgcggaccatcgataccgatggtttcgaatggatgcccacgacactgggcgattcggatccgtttcacgccgccctgccccatcccgccgaactcgccgacgcccgacgcgaactcaaccgcacgttgatgcgcgcggtttcggcactggatctgccggcactgcgctgtggtgcacatgacctgcagctggtggcgcgcgatggggcgatgttcgccttccggcaacgcctgctggagatgcatctcggcctgccggcacactgggagcctgtgcttgcgctgtacgaacagggccattggcccctggcccatgcgccggggcgattgttggtgctttag

SEQ ID NO: 500586 - DNA, 2139 bp, Stenotrophomonas maltophilia
gtgaaattcttcgtctcctgcgccaagggcctggaatacctgcttgccgatgaactgtcggccctgggccttggcaaggccaccgccaccattgccggcgtcaacgccgacggcgaactggcgcaggcgctgcggatcgtgatgtggtcgcgcctggccagccgggtgctgtggccgatcgacgagttcgactgcccggacgagcaggccctgtatgacggcgtgcgtgcactgccgtggcacgagcacatctcgccggagatgaccctggcggtggatgcgcacgtgtccggcgacaagatcacccatgcacgcttcgccgcgcagcggatcaaggatgcgatcgtcgaccgcatgcgcgacgaaggcctggagcggccctcggtcaataccgatctgcccgacgtgcgcgtcaacctctcgctgcgcaagggccgcgcctcgctgtcgatcgacctcggcggtggcccgctgcatcgccgcggctggcgcggtgccgcccacgaggcgccgctgaaggaaaacctggccgccgcgctgctgctgcgcgcgcaatggccgcgcctgcatgccgccggcggtgggctgctggacccgatgtgtggcagcggcacgctgctgatcgaaggcgcgctgatggccgccgacgttgctccaggcctgatgcggcatggcagcctgccgccgagccgttggctgggcttcgacaaggcggcctggaagtccatccagagcgaagcacgtgagcgcgaagcggccggcctggccgcgctgaagccggtcatccacggcagcgacatcgacccggctgcgatccaggcggcccgcgagaatgccgaggtcgccggcgtcgcccacgcgatccgtttcacccgcgccgatgtcgccgacctggccgcgccggaacaggagatcggtgcggtggtctgcaacccgccgtacgacgagcgcctggccgccgatccggcgttgtatcgtgcactgggcaatgccttgcagaaggcggtgccgcagtggcgcgccagcctgctgtgtggcaatgacgaactggcctttgccaccggcctgcgcgccagcaagaagtaccagatgttcaacggtgcgctggaatgcgcgctgatcgtctgcgatccgatcgctgtgccaggccgtgatccggcacagccccgcgagctgagcgaaggcgcgcagatggtggccaaccgcctgcgcaagaacctgaagaagttcaagagctggcgtgcccgcgaggacatcacctgcttccgcgcctacgacgccgacctgccggagtacgcggcggccatcgacgtctacgaggaagagggtggcaggcggcgtaccttcctgcatgtgcaggaatatgcggcaccggcggcgattcccgagaacgacgtgcgccgccgccgcaatgagctgctggccgccgcgcgcgaagtattcggcgtgccgccggagcaggtgtcgatgaaatcgcgcgagcgcggcaagggcggcagcaagtacggccgcttcgagcagcgcgacgagttcatcgtggtgcgagagaacaacgcgctgctgcaggtgaacctgttcgactacctcgataccggcctgttccttgaccaccgcccgctgcgccggatgatggccgagcaggtgcgtggcaagcgtttcctgaacctgttctgctacaccggcgtggccagcgtgcaggccgccgtggcgggtgccgccagcacgaccagcgtcgacctgtcggctacctacctgcaatggtgctacgacaacctggcgttgaacggacaggggggcaaccagcacctgctggtccaggccgacgcgatggcctggctggaaggcgaccgtggccagtacgacgtgatcttctgtgacccgccgactttctccaactccgcacgcgccgacgacttcgacgtgcagcgcgaacaactgaagctgctgcgtgcggcggtggcgcggctggcaccgggtggcgtgctgtacttctccaacaacttccgccgcttcaagctggaagagaacgccatcgccgagttcgcccagtgccgcgagatcaccgcacgcacgattggtccggacttcgagcgcaacgcgcgcatccaccgcgcgtgggaactgaagcggttggggtaa

SEQ ID NO: 500587 - DNA, 360 bp, Stenotrophomonas maltophilia
atgagcagttccaacaagaccctgtccctgctgaccgctaccgccctggccgccggcctgggcatgaccgccagcgcctcggccctgagcatgagcgacctcgcccagggttacctggtggcgggccaggcggcaaaggctgccgatgccaagcacgccgaaggcaagtgcggcgccgacggcaagaccgctgaaggcaagtgcggcggtgacaagggcaaggctgccgaaggcaagtgcggcgaaggcaagtgtggcgccgacaagggcaaggccgctggtgcagcggctgccaagaccggcgacaagaagtcggctgaaggcaagtgcggcgaaggcaagtgcggtggcaagcactga

SEQ ID NO: 500588 - DNA, 3027 bp, Stenotrophomonas maltophilia
atgggcgggcagggggacaagaggcgctgggtggagcgccgcgcatcaggattcaggcgggcactgcggcagggcctgttgtggctgctgctggcccttgcgctgccgttggctgcgcaggaagacgcgcccccgctgcgcgactacgccatcgatgtatggacctcgcgcaacggcctgccgcacaactcgctgcgcgacatcgcgcagacgccggaaggccatctctggttcgccacctgggaagggctggtgcgctacaacggcctggatttcaccgtgttcgaccgcagcacgcgcccgggcctgcgcgacaacggcatcggcgccctgttcgtcgaccgccagggcggactgtggatcagtgattcgcgcggcaacgtcagccaccgtggcagtgatggccaatggcgggtatgggagcaccaggccgatacgccgcaggtgctgatccagtccatgcagatggacagccagggccggctgtggctgctgtacgaaggcaagggaatcggctacctgacgccggacagcggcattgtctaccaggcgccggcggcggacctgccgatggcgatgagcttcaccaggctggtggtcgatgcgcaggaccgggtctgggtcggtacgctggacgggctggtgctgcgcgacaacgatggcgtgctcaagcgcgcccccgccgcatgggggctgggtgccggcagtggcctgtcgtggccctaccgtgcgccggatggcgcgttgtggattgtcgccggtgagcgcctgtaccgggtggaggatgaccagctcgtgctggtgcaccgcctgccgggccagctgcacatgacctcgatgctgcaggaccggcacggtgacctgtggctgggcaccgagaaccagggcctgctgcgcatctccgcacatggcctggagcgactgccggccggcctgaacctgccgggcggacgcgtggtcagcctgcgcgaggatgccgaaggcagcatctgggtgggcgccaacggcgggctctatcgcctgcgcgaaacactgttcagcagctacaccgagcgcgatgggctcagtggcgactacgtgcgcacggtattcgaggatcgagatcgccagctgtgggtcggcagcgccagtggcttggacctgcagacgccggatggccggttccgtgccgtgccgctgcacaaccgcggtggcaaggcaccgtccgtcctgagcctggcgcaggggccggacggtgacctgtgggcgggcaccttcggcgacggggtctaccggctcggccgcgacggccacctgcgccacaactacgcggcagccgacggcatgccgggtggcaacatccgtgcgatcagcgttgattcgcagggcgtggtctgggccggcacgcagaagggcgtggtgcgcatcgacggcgaccaagtgcaggtctcgaacgtgccgggcatgcccggcggcctgatcaccgcgcttgagcatgaccatcagggcaacctgtggatcggcaccatcgaaggcatccgcgtgctgcgcggcgaccacgtgcagtcgatcgacctggcgccgctgggcggtggccgcagcgtgttcggcttccaccagctgggcgacgcgatgtggatcagcagtgatcgcgggctgtatcgctggcgcaacggcaggctggcgcgggtggggctcgagcagggcatgccggtggatgcggtgttccagctggtgccggatcgccttggcaatgtgtggatcagcagcaatcgcggcgtgctgcgcaccgatatggccaccctcaacgccgtggccgatggccgcacgccgcgggtgggggtggagcgttacaacgagatcgacggcatggccaatgcacaggccaacggcagctccagcccatcggcgatcctgcgccaggacggcacgttctgggtggtcaccgcaggcggcctgagcacggtcgacccgcagcgcctgcagcgtttccgcgagcggccatcgccgccggccgcgatcgagagcgtgcaggtggatggcgcgccggtgcattgggaagggccggatcgcaaccatattccaggggggcgccggttggcggtgagttatgtcggcctgagctacctgatgtccgaccggatccgctaccgcacgcggctggacgggctggatgccggctgggtcgagcgcggcccgcagcgcagcgttgagttcgtcggcctgccgccgggcgactacaccctgcatgtggcggccgcccatcccggcggcagctggggccagcaggaggcggtgtggagcttcaccgtggagccgttctggtggcagcgccgcagcgtgcaggtgctggcggggatgctgctgctggctggactggtggcgctgtaccggctgctgctgcagcagctgaaggccagcaacctgcgcctggcacggcgggtggacgaagcgaccttcgatctgcaggccaagacggtgcacctgcaggcgctgaaccaggaaaagaccgaactggccgagcgcctggcgcgccaggccgaagccttcgagcggcaggcccgcgaggatgcactgaccggcctggccaatcgccgcgccttcgacgaaacgctggcgcgtgacttcgcccggtcacagcgcagtggtcatccgctgtgcctggtggtgctcgacatcgatcacttcaaggaggtcaacgaccgccacagccacagcatcggcgatgccgtgctggtgcaggtggcgtcattgatcgcagcggcctgccgcgactccgacctgccggcgcgcaccggcggcgaagagttcgcgctgctgctcaacgacacccgcctggaggaagccgcacagctgtgcgcgcgcctgcgcggcctgttccatgatcatcccgattggggcggcgtggcgggcctgcgtgtcaccttcagcgcgggcctggtagagctggatgccgacgaccgcaccccggcgctgctgtaccagcgcgccgaccgcgcgctgtaccgcgccaagagcgacggccgcgatcgcacgagcatcggttga

SEQ ID NO: 500589 - DNA, 645 bp, Stenotrophomonas maltophilia
atggaaatgcaacaccgcactggacgcagcgccgcgctggccgccctgccctgtctgggcctggccgcctgccagaccctgctccggccgtcgcccctgccgccggctcagctgcggggcctggaacaacgcggcaccgacggcagcttcgagggtgcctttgataccgcgcagaccttcgaacacttcaacgatccgcgcgccatcgactactacgagcgcgccgcagcggtcacgccctcgaccctccacaacaccagggcggaagaagcactgggcaggatctggatctccggcacgctgcgccatgccgacagcccccacatcaacccggcaccggtgctgcgcgcgtcctggcgatgcggtgaacgtgcctatctggcggccgccgaccacggcaatccctatgcgttccacgaactcgccaaggcctatcgccagcaaggcgacgcgcaacaggcactgcgctgggacctgcgcggaatgatctacgagcgctatccgggttcatcgtcacgacggccggatgcggtcgccgcacagggtgacaccgtgcatccacgggttgcgcagatccagcgtcgcgccgacgtggcgatgccgacgcacaggtcgatctgggcgcgctgctggaaaagggcgtag

SEQ ID NO: 500590 - DNA, 177 bp, Stenotrophomonas maltophilia
gtgttcggccagtacttcgccgggctgctgctgggccgcggtgcgccgggcgtggagaaggacaccgacgcagcggcgctctggttcgccggggccgaagcgcaggacttctacatggccgcgccgagttactggaagaaggcggtcgagccgccgttcttcctcttttcggaatag

SEQ ID NO: 500591 - DNA, 867 bp, Stenotrophomonas maltophilia
gtgagtgcgccggaggacctggcgcagtccgcgatctacctgcatccgtccgacaacgcgctcggacggatgctgccgcgcctgctgcacgctccgcgctggacccggttgcgccgggcactgtcgcggcgctggccgatgccggtgctggccagcgacgtgcgcgacgtgatctacgcgagctggtgggtcgatgtgcgccatgccccgccagtgccacctggccatcactacgtggtccatgctggacgcacgccttacaccgttctcagctatcgccatggccatttcgggccggtgctggcgggaccgttgcgctgcttgatgccgtcgccaaggcagagcaactggcgctggtacctgcgccgtgacgatgatccaggcggggccccggtggtgctgttcgatcgcaacgtgatggaccagctggccttcgtcgccggcgcgcgcgctttcagcgatgccatgcagccccacctgtccacgcgcttcgagcatgtggtgcgcgccgatggcgatgggcacaccctgatcgaaggcgggcagggcagtgcgcctgccctgcacctgcagtggcgggccgctgcgggctgggaggacggggcgtggcggggggccttcggtggccatcaggccctgctgcgcttcctgacctgccaggatgaggccgttgcgcgcacctgtgaccggcgctgggccagcacccgcatcgcgctgccggtggatgtcgacagcctgcagccgctgcagctggaaggcgaactgcagtgcccgcgcctgcaggcgatggacgtggcgctgcacgaggggatggccttccggctgccaagggtaccgttccgggtcgtgtccgagcgcctgttgtga

SEQ ID NO: 500592 - DNA, 219 bp, Stenotrophomonas maltophilia
atgctggtcgccagcacgccggcccgcgccgaaccgcgcagcagcacgctgcagatccggctgaccgtggtcgaatcctgcagcgacgatgccggcgctccccgttgcgcggcgccacaccagcgcagtgacgcccccaaggtgccgccccaggtccgcgacctcgcaccaccggcgacagacgacagcgcaatgccctccgtgaccctcatctactga

SEQ ID NO: 500593 - DNA, 699 bp, Stenotrophomonas maltophilia
atgcgcgcgctgctgatcctgcttggactgctgctggcgcagccctcggcggcgctggagctgttgccgaccaccctgcagctacccgccgaaggcggccgcgccgaactatggctgcgcaatccggggcccggccgctggcagggccaggtgcaggtgctggcctgggagcagcaactggacgccgaacgactgcagcccagcgaccggatccgggtcagccccgcgcggctggacctggcccctggcagcacccagcgcgtctggctgctgccaggcggtccgccagcatcggtgggtgaacaggcctatcggatcgtactggcgccggccttgccgggattgccccgctactcgctgccgttgttccgcggcccagcggcgccagcgctgcaggcccggctgcaggcccgcgtcgaggcacatgggcctcaggccatgctgcgactcagcaattccagtacgctgcatggccgcctgcacgatctgcggttcacagcggccgacggccaatcgtcgctgctggtggccgggctggccggctacatcctcgcaggccatgaacgccgctggcccctgcctgcccgccccgatggctatgtgggcggccacttccgggcccgcctgcaggacggccgcgaggtcgatctggccgcatctgaccctgccattgcagcggacgcccccagcgggctataa

SEQ ID NO: 500594 - DNA, 1317 bp, Stenotrophomonas maltophilia
atgccagcccccgatctggcaaccctcacccggaagtacattgagaccctcggtaccatcctggacgcccggattgggccagaggtgaacggcgcctatgagcactgggacaaggtgcgccacagagcgccaccggcaggcctgaacgcggagcagtggtggctgggtatcacgtggacgcgcgcagcattgctgaagccgctgccgctgttgctggacaagacgcagcaacccttcaagctcgcacttaccgattcaatgcagcggcacctgcactacattgaccgggaggccgcaggctcggtgaagggtgtggatgctgccagcggccaaggacggttcatgatccggtcgctgatcgaggaagcgatgacctcatcgcagttggagggcgcctcgaccacgcgggccgtggcaaaggaaatgttgagcacgggccgcgcgccgcgcgaccagtccgagcgcatgatctacaacaactacgtggcaatgaacgtgatccgcgagcgcggcatacgcccgatcactcccggcgagattctggaactgcacagcatcctcaccgacggcacgctggagctgccaaccgacagcgggcgtttcagaaccgccgaagacaacgttgcgatcttcgaccgcggctcaccgcctacgcttctgcacacccctcctccggccgaggaagtgcctgcacggattgagcggctgtgcacgttcatcaatgaagaaagcacaccgttcgtgcatccagtcgccaaagccatcgcactacatttccagattggctatgaccaccctttcgtggatggaaatggccgtacggcgcgcgcactgttctactgggcaatgatgaatgccgggtactggatgaccgagtacttctccatttccagcgtgctgaagaagtctccaggcaagtacatgcgggcctacctgtacaccgaaagtgacaaccgggatcttggctacttcgttgcgcaacaactggaggccattgagcaatcgatccagggactgcatgcctacatcgccaggaagcatgcagaggatcaagcggcgcgacgtatgttgcgaaccgcccggcttggcggtatacagctcaatcaccgtcagcgcgcgttgctggccaacgcgctgaaagatcctgaccggacctacaccgtcgccagccaccaggcggcacacaccattacctatccgaccgcattgaaggatctgaatggattggtggctgccggacttgtcagcaaagagcgcgtcgggaaggcttccgagtatctcgtgcttcccggcctttcggaacgcttggtgttgtag

SEQ ID NO: 500595 - DNA, 363 bp, Stenotrophomonas maltophilia
atgaaccgactgatcgccatcgctttcatcgccacgccgctggccctgctgagcccgcaggccgtcgcgcagtacactgggccgggggcaggggctgctgccagcactgtcgccgacgctcgcgcgcaacgtgatgaccatccggtggtgctgcgcggcaccctcatcgccaggatcggtgacgagcgctaccagttccgtgatgccagcggccagatcgacgttgagatcgatgacgaagatctgccgccgcaggccatcggcgccgacaccgtggtcgaactgcgtggcaaggtcgacacgcatcgcttcaagccgaccgacatcgatgttgatcacgtcaccgtcgtgccggcaggttga

SEQ ID NO: 500596 - DNA, 510 bp, Stenotrophomonas maltophilia
atgcacgccattctcaagaaggccgcgctcgctgcagcgctggctaccgcttcgctgtccgcgcacgctgttgaaaccaagatctccgtctacgccgacgtcgacccgaccctggccctgctgcgtgatgacggcagcgcactgccggacgccgtcaccctgacccacgatccgctgcgcggccttgtgccgagcacccagcatgtgcgcatccactccaacgatgagaaggccgatatcgaagccaagatcggcggtgccttcgcgctggtcaacggtgacggcaaggtcaccgtgccgatgaccgtcagcctcaaccgccgcgcactggcggagagcccgatcgaattcaaggctgccgatctgttcaccggcgccggctccacccccggtgcttcgatctcgatgccgctgacgattgcccagaccaccccggcgccgatcaccaccaagggtgcctacaccggcatcgtcaacatcgtgctgaaccagaaggccaccacgccgtaa

SEQ ID NO: 500597 - DNA, 708 bp, Stenotrophomonas maltophilia
atgaaaaaactgctgttctgcctgttgccgttgagcgcgctgctggcccagccggcacaggccaacctgtccatctatccgatgcgtgcagcggtggatgccaggcacggcacgcagatccgcgtgtactcgcaatccacccagccgcagtacgtgcaggcacggctgttgcgcatcaccaacccggcacagctggatgaggaagagatcgaagtagaagccgccgacgcggcgattgccatcacgcccggaaagttcgcactcagcggtggtggcaatcgcctgatccgggtgattccgctgcagaccgtggaaaaggaggcggcgtaccgcatctacttcgagggtgtcaaaggcccggatgaagcccctctggaagacgctgaacagaccgcgcaggccaatgtcggcgtcagcctggtctggggggcactggtgaacgtggtgccgaccaagggcagcgtggatctgcaactgcagggtgacaccctgcgcaacaccggcacgctgcgtgtcggcattaccggtgcatccgagtgcaatgccagtggcgtgtgcacaccgcttgagctgtcgaagagcctctaccccgacgctgcgctgaccctgccggtccagctccagcccggcagcaccctgcaactgcagtaccgcctgtcgaacgacggctatcgcgatcacgtaacgaccctggcgccgagcgcctga

SEQ ID NO: 500598 - DNA, 5082 bp, Stenotrophomonas maltophilia
atgaatcgaatctatcgacgtatctggagtgtggccaagcagtgctgggtggttgcgggcgaggtcgcaagagtccgcggcaagcgcagcgcaaacctgagcgccaacgtggcagttttatctacattgcccgtcctgctgctgttcatgggcaatgtcagcgccgacaattttggctcgaaatgcacaatcaatcagtatccggattggatctcatgtctgccatatgcggggctggacgacaagttcacccaggcgagcgtgggtcccaatagcgccagagtcctggcaatggggaacggagcctatgtgcagggcagggaatccacggtctttggacatcaggccaagagtgtgggtgaccggagcgtggcattcggctacggcgcccagaacaagcagggttacagcaccgcctttggcgcacatgctcttacaaatggaattggcgctgtcgcattgggcaatggggcaagttcaacttacatcgatgccatttctattgggagcggatctgctgcggggaggtcaggatattccggtgcgatcgcggtgggtggaaacagcagtgcagacttcaatggtgtggcccttggtttcaaggcgaaggtatcggctgcaaattccgttgcacttgggacagattctgaagctcatgagcagggtactgtttccgtcggcacaagtggaaacaagcggcggattgtcaacgtggctgacgcgcgcttgaatgcaacaagtacagatgcggtcaccggtaagcagttgtacgccacgcatgtgttggcgcaatcagcatctaaccgcatcaatgccgactcactttcactcggcaagggagctgtcgctgagtcagatgcgtactatggcgcaagcacagcgttgggcaacaatgcaaagggttataacggcgcgagcgttgccctcggtgacgatgcacgggcaggtgtggatgccgctgggaacaaggccaatggaagctcggggggcgtctcggtcggctccggtacccggagtgcacacggtgccgttgccatgggacacaaggccatcgcgggaggaaatttctccgttgcgatcggcaccgatgccgtggccaatcaagagttgagtacggccttcggaaagagcagtatcgcgggcgctcagcagacgacggccttggggcgagggacacaagcaacggcgaaatttgcaaccgcagtgggcaatctagccagggcaacgggcatcagttcgctcgcccttggacacagcgcacatgctgggcatgaggacgccgttgcgattggcgccggttcggtaaccgcttcagccagctccgtttcggtcggtagcgccagcaggaagcggaagatccagtacgttgctgatggtgtagtgggttcaggcagcaccgatgccatcacgggtaaccagctgttccagaccaatacccgtctctcggccgtggagaagactgcaggcgatgtcacgggtgaactggccacggtgaagtcaatcgcacaggctgccacgaaccgcatcgacgccaccaatgtcgcactcggtaaaggcgccactgcagagaatgcgagcttcggcatcagcactgcactcggcaacaacgccaaagcgtacaacggccgcagcgtagcgctgggcgacgacgcacgcgctggtgtggatgcggacggtaacaaggtggccaaccagaacgcgggtgtctcggttggtgccgggacccgcagcgccaacggcgccgtcgcaaccggcttccgtgccaacgcaagcggcaacttctctattgctgtaggcggcgacgccaaggccgaggcagagcatggtacggcggttggttatctgagcaaggccagtgccagccaggccacctcactggggcgtggcagcgaggcgacggcgcagttcgccagcgcgctgggcaatctggccaaggctacgaacaccagctccgtggcattgggtgaccgtgcccaggcctctcatgagaacgctgttgcgctgggtgcaggcgcagtgacggcttcggccaattcgatatcagttggcagcgccagcaggaagcgcaagatccagtacatcgccgatggcgcggtgggagccggcagtaccgatgccatcaccggcaaccagcttcatgccaccaatcaggccgtgaccaaggcccagacagccgctgacgcggcgaccaccaccgccaatgaagcaaaggtggaatcgggcaaggcgctggccgaggcggtcgcgctgggtggcctggtcaaccagaccgctgtcaatggcaacgttcgtattggcgagaagaacagcggcaccgtgctggatgtgcgcaatagcgcgaacgcgaatcggaacctgaccggtgtggccgacggcgtggtcggcgccagcagctatgacgccgtcaacggcaggcagctcaatgccaccaatgacaaggtgacgacggtggagggcgtggccaggtctgcgggcgaagacgctgctgtggcgaaaactgatgcaaccaaggcactggccgagacagctgcgctgggcgggctggtggcgcaggtatctgcgtctggcgatgtgcgcctgggcgggaagaacagcggtacgactttggatgtgcgtaacagcgccaatgctaaccggaagatcagtggcgtttcagacgcagatctaggggagactagtacggatgccgtatcgggaaggcagctacatgcgacgaacgagtcaatctcaaaggttcagtcttcagtagagggcgctgagcgccgtgttgaagtagtagaagaaacgaccagattcttgtcgatcggctcttcaagtgatcgagatgctgccaagagcggggttctgggtattgctctgggagagtcatccgaggcgtcgattctatctgagggggcggtggcgattggcgcgttctctcgtgcacagggtgaagcatcgatcgcgatcggtcgagcctcgtgggtccatagctctgcaagcggtggctttgcacttggtactcgatcaattgttgaggagacgaatggagttgccattggcgctgggagctctgtgacgaagggggcgctcaatagcgttgccttgggggatagctcggtggctaacgaaagtcgaacagtatcttttggagatggagtgcttcagcgccgtttggtgaaccttgccaatggcactgccgaccacaacgccaccaccgtctctcagctcaaggactccctcgccaccctcggcggcggcgcaggcatggatgccagcggcagcatcatcgccccgacctacgcggtgcagggtggaacgcagaacaccgtcgaggatgcactgatggcactcgatggcgctgtcatcaccgcgggccgacgcgcggacaaggtggaaggtcagctcagctcgatcttccaggattcgccgtcggcccgtgccgatggcatgaaccagatcgcgctgaatggcgtgaatggcatggtgctgaccaacctggctgacggccgagtggcgccaggaagccgtgatgccgtaaccggcagtcagttgtacgccgcagagcagaagatctcgcagaatcggaatgatctggaggcgatgcgcaaggagcgggagatgggcgcgcaggcaatgcgtggattggatgcgagcgtcatcgattacggtggtgcgcgtttgactggcgtggccgaggcgactctgtcggctgatagctcggatgttgtgcgtggcagtcagctctatgagaccaacagccgtgtttcggagcttgaggatgtcgcacagtttgtgagtatcggatcagcgcccttcagtgaacgcgccgaagcaggtgtggcaggcgttgcggttggaaattcagcaaagacgggactggaggggggaactgcggtaggcacgtttgcggaggcgatggggaagaactccaccgcaattggtagagcggcggctgtctctgtggactctgcgaatggattcgcaatgggggtcggtgcacaggtcggtggaggcgcgggcggtgcgaatgaaggtatcgcgattggtgctgccgcaagagttgaaggcggagctcatggctccctagcacttggaaacggttccctggcagatgaagaaggagtcgcgtcatttggcggtgttggcatgaagcgccgcctcgtaaacatcgccaacggcaccgccaaccataacgccgccaccgtcggccagctgcgcggcgcactctccgctctcggcagcgaagtcgatgccaacggcaacatcgttggccccagcttcaacgtgcagggccagtcccaatccaccctcaatggtgcattggaagcgctcgacggcgcggtcgtcagcaccacctcgcgcgtgaaccaggtcgagtcccagctccgctccgtgttccaggaaaccccctcggtccgcgcagacggtacccaacagctcaccctggccggtgccaacggcatggtcatctccaacgtggccaacggcctgatcgcggctggcagccgcgatgcggtcaacggtggccagctgcactcgatgcagcagcagctcaacggccgcatggatgggctggagcagcgcatcgacgatcagccgcaggcccgcgccatggccgcggcatccacgccgtcgccatccaccgaagagatcgcgccgacgccggaaaccagcggttcgccgcagatcgcctctaccggtgaaggtgacaagcccacgccgcagccgaagtcgaagcaggacgacacgcccaagccgcaggtcgacaccgccgagctggagaagatgctggcccgtgccaacgagtacaccgatggtgcgatcagcaatttcgagcgccgcctggacaagatggacaagcgcttcaaccgcatggcggcgatgagcagcgcgcagagcgcgatggcgatgaacaccgccggcctggccacctacaaccgcctgggtgcgggcgtgggctacagcgagggtgagtcggcgatggcggtgggctaccagcgcgtgctcaacgagaagggctcggccaccttcagcctcaatggggcgttcaccaacagcggtgagcgcagcatgggcgtcggcgtcagcatcggctggtaa

SEQ ID NO: 500599 - DNA, 1839 bp, Stenotrophomonas maltophilia
atgatcgcgtttgcttcgaatcttcccgactggaacgcgctgcacttcctgcggcccgagtggttgtgggcgctgctggcgctgccgctgatcatcgcgttggcgctgcaccggcagcgacgcagtgatgcgtggcggcaggcggtggatgcacatctgttgccacatctgctggccgccggtgcgaagcgtcgcgtgcgcctgccatgggcgctgctgctgggctggacactggcatcgctggcgatggccgggccgagctggcggcagcaggcgcagccgatgttccaggccagcgcgccgctgctggtggtactggacctgtccagccggatcagcgcaaccgatctgccaccgtcgcgcctgctgcaggcgcgcgcgaaagtaggccagctgctgcgcgctcgccagggcgggcaggtggggctggtggtgtatgccgatgatgcctacaccgtggcgccgctgaccgacgacggcagcaacgtcgcgctgtatctggatgcgctgtcgccggacgtgatgccgcgcgatggccagcgtgccgaccgcggcatcgactgggcaacacggctgatgcggcagatcggtgcgctgcaggggcagatcctgctggtcagcgaccaggcggatggtgaagctgcactggcggcagcgcaggcacgcagcctgggcctgcaggtgtcggtgctgggcctgggcacgcctgccggtgcggcctaccgcgatggcagcgggcagatccgccaggctgcgctggatgagggcagcctgcgcgcggtggccactgcaggcggcggccgctatgcacgcatcgccgccgatgacagcgatctgcgtgcgctcggtgtactcgacgcgcgcgaaggcacggcggcgcagcggccgggcgaaggcaagcagtggcgtgacgaaggcttctggctgctgccgccggtgatgctgctggcattgctggccttccgccgtcgtgcgctgctggcggcggtgctcgcggtcggcctcgtgccatggatgaatgacgcgcaggcgcaggcacctgcgacgcaggcctcgcaacccgcgcagggcacgctgtggaagcgtagcgaccaggcgcagcatcagcgcctggccgagggggtccaggcttaccgcaacggcgacttcaccactgcacgcaaacgcttcgaaggcatcgacaacgatgccggttggtacaacctgggcaacacgctggcacgcgaaggcaactacgacgaagcgatcgccgcctacgaccgcgcgctggcgttgcatcccggcatggccgatgcggttgccaaccgtgccgtggtcgatgccgcgcgcaagcgcaggcagtcgggtggcaaaggccaggatcatcagaagccaccgcagagcgggcagcataagcagcagaacgatacctcgggccagcagaacccgcagggccagaagccgcagcagggccagcagaatcccggccagggccagccgccgtcgggccagcaggggcagcccagggcgggtgacgacaagaacccgtcgagcccgcagcccggccagcgcggccgcgatggccagcaggcgccaccacaggtggaggatgccaaggcacaggcccaggccgatgagcagcagcgccagcgcatgcagcaggcgatgcagcaggcacgcgaaggcgaggctggcaaggacggcaaacccgtaccgggggctgagggccgcacaccgcgcgagcgcgaggagcaacaggcggtggaagcgtggatgcggcgtgtgccggatgatccgggcgcgttgctgcgggccaagttccagctggaaaacgaacgcaggaagagggaagggcgatga

SEQ ID NO: 500600 - DNA, 423 bp, Stenotrophomonas maltophilia
atgaggatttcgtacgtgatggtcgccgccctgggcctgctggctttcgacgccagtgcccagaaggcctgtgaaaccaactacaccaagaccggcagcttcttcgccgggcgcaccttcaccacctgggacgtggtgcccaacgttaccccggccgacgctctcaagcgtatccagatcgagggcgtgaagtcgggcctgaaggtcgccagcgtggacaaggacctgggcatgctgaccctggaacagaacgtccagttcaatggtggccagaccaccctgccgtggaacgtgctggttgaagccgagggcaagggttccaagatcaccgtgaccaagaccaccccggctacctacgccactggcgaggacttccagaagaagtcgatgtgtggcgtgatcgaggctgccgcgcccaagtaa

SEQ ID NO: 500601 - DNA, 549 bp, Stenotrophomonas maltophilia
atgaaagacgactcccgtttcctgcgtgacctgcagcagcgccaggccgcaggcgaagacctgcgttacctctgcttctggggccaccagccgccgcgcatcggtgtgtccgcctcgtgcttcagccagtggtatgacgcaggcttcgacatcgatggcatgcactaccgcaccgccgagcactacatgatggccggcaaggcgcgcctgttcggtgccaccggcctgctcgacacgatcatcgccagcgccacgccggacaaggccaaggcgctcggccgcaagatcgaaggcttcgacgaggcgctctggacgcaggcacgctacgacctagtcgtggagggcaacaaggccaagttcgcgcagaacccggaactgggcgcgttcctgcgctctaccgaaggctgggtgctggtcgaagccagcccggtggacgtcatctggggcatcggcctggccaaggaccacgccgacgcgcacaacccggcacagtggcgcggattgaacctgctggggttcgcgttaatggacgtgcgcgaggcgatgtag

SEQ ID NO: 500602 - DNA, 558 bp, Stenotrophomonas maltophilia
atgaaagcgcttcccaagaaggaattcccggtcgagcaggcccgccgcttcctcgaacccggcccgatcgtgctggtcagcaccgcctggcgcggccagcacaacctgatgacgatgggctggcacatggtgatgggcttctcgccgtcgctggtcgccacctacctgtggaatgaaaaccacagccatgcactggccgtcggcagtggcgagtgcgtgatcaacgtacccggcgtggaactgctcgataccgtggtggacatcggcaactgcagcggccgcgaggtcgacaagttcgcccgtttcgggctcgatgcgctgcccgcgcgcgaggtcggcgcgccgctggtcgggcagtgccactcgaacttcgaatgccgcttgtacgacgacagccaggtggcgtcgagcaatctgttcatctgggagatcgtgcgcgcccatgttgcgccccggccgaaactgccgcgcacggtgcattaccgcggcgatgggcagttcatggtgtccggcgcagaagtctcgcgtcgacggcggttcaagcccgacatgctgtaa

SEQ ID NO: 500603 - DNA, 1203 bp, Stenotrophomonas maltophilia
atgactgagctgctcggtggactgtggcaggccagcgtgtggctggccatgggggtgatcctgctggccgtgctgcgaccgctgctggtgtggatggggggcgctggactggcttatcgcagctggtggttgttgccgatgctgctggtgaccttgctgctgccgttgccgcaggctgcgctgttgcagcacgtgccgacagtgccgctgaaagtcgagccaggggcggtggacgaactggcagggccgtcgctgccatgggcaccgctgttgctgctggcatgggcgctgggcatgggcatctgcctgctgcgcgacctgcgcgcacagcgtcgtttcgaacggcgcatgggcccgctgaagccgcgcgccgatggcagctggcaggccagtagtgatccaggcctgccagcactggttggcctgtggcggccgcgaatcgtggttggcccggacttcgatcaacagttcagcgcacaggaacaggggctgatcctgcagcacgagcgcagccaccgtcgcaatggcgatcactgggccaacggcgcgttgctgctggcgcgcgcggtgttctggttccacccgctgctgtcctgggccgcacgccgcttcctgcgcgaccaggaactggcctgcgatgcccgtaccatcgccccgcagcctgcgctgcgcggcctttatgccggcacgctgctgaaggcgcagctggtccacccggttgcgccagcggtctgccattggcgcagccaacccgtgttgaaggagcgtatcgccatgttgaagcagtccaagcggaaggcattgccgtgggtatcggggcaggtgctggtcgtcgggttgtgcctgggaatgggcgcagtagcgtgggccagccagggcggtgcgatggccggccgcccggcagcggcggtcacggatcgggagatccaggtcgtcaagatgccaccgccctcctatcccaggtccgcgttcgagcaacgccaggtgggcgtggtgaacctgcgcgtggaagtggacgccagcggccaacccaccgatgtcagagtgctcagtgccaccaatccgggcgtgttcgacgcggtgtcgatcaccgcagcgcgcagctggacctatcggccggcgatgaagaacggcaagccggtggcaggcgcagtgaagattccgatcacctttgcgatggacaacagcgaggacgcccagtga

SEQ ID NO: 500604 - DNA, 462 bp, Stenotrophomonas maltophilia
atgtcgaaaatggagcaacttgcacagaagctgcagcagtccgcacacgcggagcaggccagggccgccgctgtcgaaaagcagtaccaggactggatccaatcgctgcatgtgttgttcgacaccctcgaacggtggctgcaaccgttggtgcaggcggaggtggccacgctgcgtcgggacacggtcaccatcaccgagaatccgtcatccggggaactgaaaacctacgcggcccccgcactgaccctgaacgtcaatggcaaggccgccgcgatcaagcctctggcccgcttctgcttcggctgccagggacgggtggatattctggcccgggaaaaccagtggcacctgacacggcacttggagccggacgaggtctggtacctgcacacgcatgatcgcgcccagggacgcgtgctggacgccgacgcgttggccgcggtgttcgcggcgtactga

SEQ ID NO: 500605 - DNA, 243 bp, Stenotrophomonas maltophilia
atgaactgccggaacgacgtcgtcgagcgcatccatcggatctttctttcagccggcgtcggctcgaacaagcagcttgaggccgtgcgcgcgctcgggcgtgccggtggtcccaaggccgcggaactgctcgaacagatctaccagcaggcgttcagcaattctgccctgcagatggcctgcgtggcggcgctgggcgaagcggcccgtggcttccaggccagtgctgaacgggacagctga

SEQ ID NO: 500606 - DNA, 462 bp, Stenotrophomonas maltophilia
atgtaccgcatcactacgctcgccctgatgctgtcgctcggcctggtgaccaccgtgcaggccaaggcgcagaaggacaccgtgcagatggatgccttcaccccggtatccgaacagatccgccgcgttgaaacggccatgggcagcgaggactacagcgagatcgggctggaggacaagagccgcgtgcagcaggcgctgaaccggatccggatcaagatgaatggccgcgagaaggtggatgagctggccccgcaggagcgcaacgacctgttcaacgagcaggagatcgtcaacaccatcatgacccgcgcccaggccgacagccgcatgatctgccgccgcgagcgcctgaccggcagcaacatgccgaccagtgtctgcctgaccgtggcccagcgtcgcaaggcccaggaagacagccgccaggcgctgaccgaccagcagcgcatcagccgctga

SEQ ID NO: 500607 - DNA, 4371 bp, Stenotrophomonas maltophilia
atggtcagtggctatatggcatatatgcagtcactgttcccggagtgtacgcatgtcagtcgtggagtgtcaggcgaacacctgcaaccgtactcgagcataacgtcccactacggctacgggactgcagttttttactctctcgccagcccgcgtgaactgcactatgaggtctactgtcctggctggggtactggagtgcctgatcagaggaagaacagtatcgggagatttcagtactttgactgtccagttggctatcgggtcatcgatggtgggcatcctcagtacaatccgaattcaacgctcattgattggccaaatgtatgccgggccgttgatgcacatgaatccatctacatctacaacgtcactcagactgagtcgactccaggcaactgcaatccctgttttcctgcaacgggtgataaggcgcgatttgaggtggacttccagtttgccgggaaggacttcgttcgctcctatcactcgctggggcagattcaaatttcgccagatgtgggtaccaactggtcgcattcctatatgggttcattcacgtcctcctatggggagggacgcttcacggagcgaggctatctggaagcctactcatccggacgtggtgagcgcgcttctgcggagacgctcaagaagctccctggcggtgaattcgagctcgttgaggagtcaggttcaacgcggcgcttcaccgcgcaggggcgtttgattgcgatcggcgacccggatccaaagaacggagtgtcgctcagctacgatgtgaatggcaggctgcagcgagccgttgatgggttgggccggtcgctggtcttcgcctacgaacgtggcaggctgatctcaattacgctccccgacggctcagcggcttcatacacctacgatgacttcgataacctcacaagggtcgtgaggcccgatggcacctctcgacaatatctgtacgcggagcctgggctcgccccggcggcggggcgtaacctgttgactggcatcgtcgaaggcggcgcgcgtcacgcaacgttctcgtacaacgagaaggccaaggtcacggggagccatctctggtcggcggggcagtctgtggatgccatcaccatcagctacaacaatgatggctcggcgacgaccgtgaacagcttgggtgaggtacgtcagaacttcattggcggtgagaagttccggcagatcacccaaaccacagattccaaggggagcaagtcgttcggtttcacgccatatggccgcccctcctatacgcaggacgcgctggggaatcgcacttcgtacgcctacgccgactccagcagcggcccggtttcgcaggtgctgacgacgacagaggaatcattggggcgggtgacgcggacggtccgtgattcgggcaacagggtgattgaacaacgtgtgagccagaagaacgctggcgatgaacagctcgtttcgcttgatagagaagtgctggatacagcggggcgtgctctctattcatgccagtacgatgcaacgcagagcacggattacgtgtgtggctccctacccgttgcgcctggcaatgtccggcagacggcacgtgcgtattgcacggatgcagatgtggccgccaatgcaatgctatgccccctcgtgggccttcagcgctcgatcaaggatccggcgggcaatgtcacgcagtttgagtacttcggcgcaaatgatccgggctgtgacgcagggggcgcatgttcccatcgcaagggcgacctgcgggcaatcgtcaatgcgttgggtcagcgcaccgagttgctggagtatgacgcgctcggtaacccggttcagatccgtggcatcgatggttccgtagtcgagcggttgttcgattcgatggggcgcgttctgacggaggcgctcaagggcgatgtgccggccaatgatcgcatcagcctttacgagtacagctctactggcaagcggactcgtgtcaccgggccagatggtgtgtgggttcgcatggtctatgacacggccgatcgactggtggccatcgaggatgccgctggcaatcgtgtttcgtataccttggatgctgcaggcaaccgtatccgcgaagaggtccgggacagtagtggtgcgttgaagcggttcggggatcgtcagttcgacacccatagccagatgacccgacaggcgggtgctgacggacagcctttcctcttccgtcatgatgccaatggcaacgtgctggagaccgagagtccgctgggtgtcatctcaatgagtacctacgatggtgcagatcgccccaaagtgcagattcaagacgcgggtgggatcaatgccgaagtccgctatgcctattccgccaacgggcaggtagagcaggtcgtcgatcccaaggggcttgcgacacggtacgtatacgatggatttggcactcctcaaggccagctcagcccggatactggcactgatgcctttacggtggatgccatgggcaaccgcaccacgcgcactgatgcgcgtggtgtgaaagcgtcctacagctacgatgtgatcaatcgcctcaagagcatcacttatgcggacccgaatcttgatgtggtctacgcctatgatgctgcccctgcggtctgcccggctggtgagcgcttcggcgaggggcgcgtgggtcaggtgctgcatgcgggtggcagtacggcatactgctatgaccgtttcggtcagttggtacgcaaggtacagacggtcgatggggttggtttgactctgcgctactcctacaccaaggcggggaggctggagcggttgacctatccggatggcagtatcaccgactatgcctacgacaatctgggccgtgccagtgaggtaggactgacgcttccagggcaggctcggaaggtggtcgttaccaacatcacgtacgcaccgtttggcccgatgacgggttgggcgtacggtaacggccgccatctgcttcgggagttggatgccgattaccgtccgactcgggtgtatgacgcggcgcccggaggcttgtccatcggattcggctacgacgcggatgggaatattgttgaagtcaaggacggcaccgggacgaccaggctggcgcgatatggctacgatgcgctgggccgcctgactcagacccgggatggtgcaaccggcacgccgattgaaacctatgcctatgacgccaccggtaatcggaccgcgctgaccacctcggcaggcaccgccagctacacctatccagcaaccagccaccggttgaccgcggtggatggcgaggcacgtagccatgacgcagcgggtaacaccaccagcatcggcagcaagatgttcacctacaacgatgccaaccgcatgaatgcggtgaagcaggacgatgccgtactggaaagctacggttataaccatcgcggtgagcgcgtgctgcgcaccccagccggtggcgctgctcagatcaccctgtatgacgaagcggggaagtggctgggcaactattcggccacgggccaggcacagcagcaagccatctggctggaaaactatccggtggcgctgatcagcatgccggctaccggcgtgccggacctggcctacgtccagccggatcatctgggcacgccgcgcgtggtaatcgacccggcgcgcgattcggcgatctgggagtggagcagtaagagtgaagtgttcggcaaccagattccgaatgccgatccggacggagacggtgtggcgttcgagctggcgctgcgctttcctgggcaacagaccacggatgcaaatggactcttctacaactaccgccgcgactatgattctgagacgggacgatatctgcagagtgatcccattggactatggggtgggttgtcaacgttttcctatgtcgaaggagatccgttgtcactagtggacccactggggctgagaggcggagtcccgccgaacatgaatagacatgggggcgggaactcagcacagagaaggcgggcgcttcgtgcgcaagtaagagcggttcaatcgaactcactctcctcgcccatctattcacgggggctttcgcctgaggacgtggggtcattggagaacgcggcaagtcttgtgagtgagcatgactacacccagtattgtgccgttgaaatttgcagggcatctcaggaccgctgtaccagtggcgacgtaatggtgggcggatttccgtctgatccaactgtggcgcaggttcatgcgcgcggctgctcttgtgcgagcgcctactatacaaatccgtatccgccacttctatcaaggcccgaggtcgagtctgccgatatcattgagatagtgcgcgacacgttaatcaattggaaggggcgcagataa

SEQ ID NO: 500608 - DNA, 1260 bp, Stenotrophomonas maltophilia
atgtctgtcagtcgcagtgcgatcaagaaggagcccgtggcgcgcagcaccacggagctgcagccgtttgtctgggtggggaccgacaagcggggcgtgaagatgaaaggcgagcaggccgcaaagaatgcgaacctgctgcgggctgagttgcgccggcaaggcattacgccaggcacggtcaagctcaagcccaaaccgttgttcggtggctccggcagccgaatctcgccgaaggacatcgctttcttcagccggcagatggccaccatgatgaagtccggtgtgcctatcgtcagttcgctagaaatcattgccagcgggcacaagaacccgcgcatgaagaaaatggtggatggcctgcgcaccgatatcgagggcggatcatcgctctacgaagcggtcagcaagtatccggtgcagttcgacgagctctaccgcaatctggtcaaggcgggcgagggtgccggcgttctggaaacagtgctggacactgtcgccaactataaagagaacattgaagccctgaagggcaagatcaagaaggcaatgttctatcccgccatggtgctggcagttgccctgctggtcagtggcatcctgctggtctgggtggttcctcagttcgaagatgtattcaagggttttggcgcggacctgcccgcgttcacccagatgatcgtcaatctgtcccgcttcatggtctcgtggtggtggctgatcctgctggtcatcatcggatcaatcgtcggcttcattgccgcatataaacggtcgccgaagatgcagcacagcatggaccggctggtcctgaagctgccggtcatcgggcagatcatgcacaacagctcgatcgcccgcttcgcccgtaccaccgctgtcaccttcaaggccggcgtacctttggtggaggccctgggcatcgtggccggcgccaccggcaatacggtttacgagcatgccgtattgcgcatgcgtgatgacgtatcggtcggttacccggtcaacatggccatgaagcagaccgccctgttcccgcacatggtcatccagatgaccggcatcggcgaagaggccggtgccctggacgccatgctgttcaaggtggccgagtactatgagcaggaggtcaacaatgccgttgacgccctgagcagcctgctggagccgatcatcatggtgatcattggtaccatcgtcggcggcatggtcatcggcatgtacctgccgatcttcaagctcgcttccgtcgtcggataa

SEQ ID NO: 500609 - DNA, 417 bp, Stenotrophomonas maltophilia
atgaagaaccagaagggcttcacccttatcgaactgatgatcgtcgttgcgatcatcgccatcctggccgccatcgccctgccgatgtaccaggactacgtggccaagtcgcaggtgactgctggcctggctgaaatcacccccggcaagacccagtacgaagttgccctgaacgaaggcaagaccaccgtcgccgacatcgccgaactgggtctgaaggactctgaccgttgcaccatctcgccgatcaccgccctgagcgcgacgggctcgatcgagtgcaccctgaagggcaacaccaagatcatcggcaagaagatccgtgtggaacgtgccgctgatggcacctgggcttgcaagaccgatatcaccgcagcggacaagaagtacatcccgagcggctgcgtcactggctaa

SEQ ID NO: 500610 - DNA, 408 bp, Stenotrophomonas maltophilia
atgagccgggagcgtgggttttctctgattgagctgatgatcgtcgtggcgatcattgcgatcattgcggcaattgcattgccgatctatcaggactatgtcgcgaagacgcagttgtcggcagcctttgccgatatccgaccgggcaagacgacaattgaaacgacagttcaggatagtcgcgatagttcgttgattgacgcgacctatataggcttgaggcctactgcacgctgctcggttgtatcggcagagttggcagccagtggcgtggccagcataggctgtaccgtcattggtggcccggcgatcaccggcaaagacctcatcctccgccgcgcagccgacggcacctggacctgcgacggcagcgccttcgaagcgcgctatcgcccaaccggctgttga

SEQ ID NO: 500611 - DNA, 180 bp, Stenotrophomonas maltophilia
atgtccagcccatcctgcgccgccctgctggtaatcgtcgcttgcgtcgtgctgcaggcatcgggcctgtccttgcggttgtggcccgacaacggccgcgcctgcctgcagcaggatcgccaggagctggtctgcctggcgtggtcaccgatggtcgaaaccccggcacgcgccgggtaa

SEQ ID NO: 500612 - DNA, 252 bp, Stenotrophomonas maltophilia
atgatccaacgcatcctcgccgccgcactcagcctgggcctggccaccgccgcccaggctgccgagttcagctgctacgccaagatcggcccgcccagtgccgcccagaacagcggcaccctgatgggcggtgtcagcgctgccagcctgcaggcagccgaggccgagtactaccggcgcacctcgaccaccaagccggtcagcgctggcaggtgggtgatccacgagctgtactgcgtgccgcgcgcataa

SEQ ID NO: 500613 - DNA, 2985 bp, Stenotrophomonas maltophilia
atgacgtacaaccgcccacctggccgtcacccgctcagcagcgccctgctcgtcggtctgctcgccgtggccgcagcacctgccttcgcgcaggaagcctcctccaatccgatcgacctcgatcgcgtcagtgtgaccggctcgcgcattgcgcgtacgggctttgtgaccccctcgccggtcacggccatcaccgccgaggagattcgtgccaccggtgcgaacaacatcggcgatctgatgacgcgcctgccagcgctgacaccgacctacacgctgggcaactcgacccgcttcatcggcaccgccggcgtgggtctgatggacctgcgtggcatgggcacctcgcgcactctggtgctggtcaatggccgccgccacgtcggcgcgacctcgggctcctcggccgtggacgtcaacaccatcccggtggaatggatcgagcgcgtggaagtgatcaccggtggtgcctcggccgtgtacggcgccgacgccgtggctggcgtggtcaacttcatcatgaagaaatccttcgacggcgccgaagtgcgcggtcagaccggcatggccagcgaaggcggcttcaaccgctccttcatcagcgcctcggccggcaccgacttcgctggtggccgcggcaacgccgccgtcgcccttgagtacagcaagcaggaccgcttcgtccgcaccgaccgcgccatcggcaacgagttcctggtgtcggtgcgcaacccgaactacgacagcagcaagccgtccagcgaaagcaacccggaaaccgtgctggcaggcccgggcggcaatcactcgatctccttcggcggtaccttcaacatcggcaccttcaacccgaacaatccggctacctggggcaaccgctaccagttcaacccggatggcaccttccgcaagcagcgctacgacggcaccgtggtcagcgcaaccagttgcgtgaactgtgatttcgccgacctgaactcggttgccgacctgcagccgaagttcgaccgcaagagtatcaacacggtcgtcaacttcgacctgaccgacaaccatcgcctgtacttcgaaggcaagtacaccgaaaccgagtcggacttcctggcacagccgtcgttcgaccagaccttgcgcatccagcgcgataacgcttacgtgtcgccgcaattgcgtgcactgatgaccagcgccggcctgagccagctaaccctgagccgcttcaacgtcgacgccggccagcgtggtgagcacgtggagcgcaacacccagcgctttgtgctgggcatggaaggcaacctgaccgagaactggacctacgacgtttacggcaactggggccagagcgaagtcaagcgctggaacctcaacaaccgtatcaacgagcgttggcaggctggcctggataccgtggtcaacccggccactggccagatcgtctgccgcaccacgctgaacccgaacgcgaccaaccccaacaacggcaaccgcgtgtactcgcagttcgcccgcgaaggctgcgtgccgttctcggtgttcggcaacggcgcggtgacccaagccgcacgtgactggatgaacgtcaattcgttcaactactcgcgcctgcagcagtcggtgttcagcgcgtcgctggccaacggctcgctcttcagcctgccggccggtgatgtcggcgtggccggtggtgtggaataccgccgcgaaaagagccgcgagatcaccgatccgctggccgcgcagggcctcaccttcctcaacgccattcccaaccgcatgggcaagtacgacgtgcgcgaggccttcgttgaaacgacagtgccgctactggctgacatcccgggcatctacaacctgaccctggacgccgcaggccgctggtcggactacagcagcatcggcaagaccaccacctggaaggtgggcctggactggaccatcatcccgtcgctgcgtgcccgcggcaccctgtcgcaagcggtgcgcgcaccgagcatcggtgagctgtacaacccgcagagcgagaacttcgccacggtcaacgacccctgcaactacctggccaccaacccgaaccgcccgaacaccgcggcggacccggcactgcgccaggccaactgctcggcgctgggcgtgccggtcggctgggtcgacacctacactgccacccgcccgggcgtcagcggcggcaatccggacctgaagccggaacgggcacgcagcttcacctatggcctggtctggcagcctgatttcctgcagggcttcggcatgtccgtcgactactggtggatcagtctgaaggacgccattggtgcggtgaccgcgcagaccaatgcaacccgttgcgtggattcgccgggggggatcaacaacagcttctgcggcttcatcgaacgcgcaccggtgggcggcaagaccgatgctggcggccgcaccttcccggaatactcgatcagccgctgggttgcgctgaacgaaaacctcgcccgctcgcgtcgcgtcggcgtcgatctggaaatggactaccgcttcaagctggccgagggtgacaccgtcatccgcctggtgggcacccgtctgctgcagtcgcgcgagtgggccttccaggccttcccgaacgagtacgacgagaacgtcacctgggtgaccgatccgcgctggcgtggccagttgcagaccaagtactcgctgggccagtggcgcgcgtcgtgggacatgacctacgtcggcccgaacctgcgtgtgcagccgaagagctaccaggccaacccgggacagaccagcccgatccgcaacggctcgtacacgtaccacaacttccagttcggctaccgcttcccgggtgacaagatcgacgtctacatgggcatcgacaatgccttcgacaaggatccgccggtgaactacttcggctccgacgtcggttcggcgatgtacgacaacatcggccgttacatgtacatgggcgccacctacaagttctga

SEQ ID NO: 500614 - DNA, 183 bp, Stenotrophomonas maltophilia
atgcgttcgatgagcccaagtgccagctccgctggggccgggaatgggcaggccctgttccaccagggcctgttcttccatccgctcaggccggatacggaaaagccccgccatggcggggctttttcgttactgcggttgcgggattacttcacgccgaacgcgtacttggcctgcacgtag

SEQ ID NO: 500615 - DNA, 2808 bp, Stenotrophomonas maltophilia
atgtctcgccaacgttccacgctctcgcgccaccctctgaccctcgccctgctcggcaccctcctggcctccggcaccgccttggcccaggacggcaatgcgccgacccagcttgatcgtgtgaccgtcaccgggtcgctgattccgcagaccgagatcgagaaccacacgcccgtcctgaccgtcaccgccgaggatatccagacccgcggtttcaccagcgtcgccgatgtcctgcagcagtcctcgctgtccacgggcggcctgcagggtggccagacctccgcatccttcacccagggcgccgaagcggcgggcatgttcggcctcagcccgggctataccaagtacctgatcaacggccgcccgatgctctcgtatccggcgctgtacaacggcggcgataccttcaacaacatcagcggcatcccgatcgacatcgtcgagcgcatcgagatcctgccgggtggccagtcgtcgctgtacggctcggacgcgatcgccggcgtggtcaacatcatcctcaaggagcgcatggatggcggcgtgctcaatgtgcgcggcggtgcctacagcgaaggaggcggcaacagcttccgcttcagcggcgcacgcggtttcaactccaaggatgaccgcttccatgcactggtcaacgtgcagtatgagaagaccagcccgatctggggttaccagcgcgacctgaccaaggtcaacaaccccgacggttacagcccgcagtacgtctccaacgatttcctggtgctactgccggccgccaacaaccgctacgcgatgatggacccgaaccggtgcgccaacgtggcgggccagttcgacggcaccaccgtgctcggtacccgtccgaccggccaggcctgcggctctgtctacggcaccgggtacaagaccatcaagaacggcaaggaaagcgggcagatctacagctcggccaccttcgacgtgaatgacaatttccagctgttcggcgacgcgctgtacagcctggaggaggtcaagtacgccaccggttccggctacacctggtggggcacctcctcgggctggggccgcttctacgaccaggccagcggccagtacatgaacctgcagcgcgtgttcgcgccggaggacatcggcggcggcggttaccgcgacatcatgaacaccgaccgcaacaaggcctaccaggtcaccctcggcggccgcggcaccgcaggcaactgggactacagcctcagcttcacccgtggcgagtacaagctgaccgagcgcaatttcgtgcgctggaacgacccgatcaacgactacttcgagcagcgtgtgctgggcccggtgctgggtaccaccagcaccggctacaacatctacagcccgaactgggaagcgttctacgcaccgctgcccgccggtgacttccagagcttcaccggctacagctacagcgaaagccgcacctggcagaacctggcccgcgcccaggtcaccaatggctcgctgttcaagctgccgggtggcgatgctggcttcgccgtggttctggaaggcggcagtgaaggctgggattacacgcccgacccgggcctgatggatggcagcgtgtgggggaccaccgccgtatccggtgccggccatcgcagcaactatgcggtgaccaccgaactgcgcatgccgctgctggaaacgctgaccgtcaccggctccggccgctatgacgccttcaagatcggcagcaacaccgtggacaaggccacctacagcgtcggcatcgagttccgcccgatcgaaagcctgttgttccgcggcaagtacggtacggcgttccgcgcaccgaccctgtccgatgccttccagggccgcagcggttactacgccaacggttccaccgactactaccgctgcggccagctgggctacgacccggccaacaccaccggctgcccgtacgacagcgtctcggtgttcggcacccgctcgggcaaccccgacctggagccgatcaccgccgacgtctggaatgcaggcgtcgtgtgggcaccgatcaacaacctgtcgctgtcggtcgactactacaactggaagatcaagaacgaggtcgatacgctcagctccgaccagctgctgctggccgagtactactgccgcaacggccagtccaacaacacctcggccagctgccagaacgtcgatgactggatcacccgtgatgcatcgggcgtgctcgacgagatctacacgccgaagatgaacgtcgcccgccagaacctggaagcactgaccgccagcttcaagtacgtgcaggacatcggtcgcttcggttcgctgcagttctcggccaactacaccgacatgctcaagcgcaagctgcagccgcagccgggtgacgagttcctggacctgctgcacgacccgtatgcgatgtgggtgtatgactcgtacgccaaggtacgcgcggacggctcgatcggctgggccaaggacaactggaccaccaccctgtatgccaactacatcggcaagacgccgaactacatggcttacgtgggcaacggctatgactacgtccacagctccggctacaaggcaggcaagtggggttcctacaccacctacaacctgagcgtgaactaccgcgcgatggaaaacctgaccctgtcgctgatggtcaacaacgtgttcaacaagatgccggacaatcagcgctacagcttcgccggcaccagcggccagccgtacaacaactacctgtacaacgcctacgggcgcgcgatctacgtgcaggccaagtacgcgttcggcgtgaagtaa

SEQ ID NO: 500616 - DNA, 573 bp, Stenotrophomonas maltophilia
atgagcatcaagagtgaccgttggatccgccgcatgtccgagcagcacggcatgatcgagccgttcgaggccgggcaggtcaagcaggccaacggccagcgcatcgtcagctacggcacgtccagctatggctatgacgtgcgctgctcgcgcgagttcaaggtgttcaccaacatcaactcgacgatcgtcgatcccaagcatttcgatccgggcagcttcgtggatatcgtcggcgatgagtgcatcatcccgccgaacagcttcgcgctggcgcgtaccgtggagtacttccgcattccgcgcgataccctggtggtgtgcctgggcaagagcacctacgcgcgctgcggcatcatcgtcaacgtgacgccgctggagccggaatgggaaggccacgtcaccctggaattcagcaacaccacgccgctgccggcgcgcatctacgccaacgaaggcgtggcgcagatgctgttcttccaggcggccgccgatgacatctgcgagacgtcgtaccgcgaccgtggcggcaagtaccagggccagaccggcgtgaccctgccgcggacctga

SEQ ID NO: 500617 - DNA, 675 bp, Stenotrophomonas maltophilia
atgcaggagttcctcaccgtcgtgttcggtttcccgaccctgccgtacagcatcgtgctggcggtggcggtgctgtattgggcactggcggccttcggcctggtcgacgacgggtttggcgatgccggcgccgatggggcgctgcatggcgacccacatgatctgcagggactgtccgcgctgctggcgcgctggggcctgggtggggttcccctcatgcttgtggtgacgctgctgggtttcttcgcctggatcgtcacctatttcgtccatctgttcgtgctgttgccgctgccggacctgctgcgctgggcgatcggtgcggtcgtggcccttctggcgccgttgccggcggttccgttcaccgcgctgctgctgcgccccgtccgcaggttcctgctgcgcctgcgcccggtggcgcaggcctcgctgctggggcgtaccggcgtggttgcctcgccgaaggtggatgcccgcggcggtcacgccaccttcgacgatggcggcgccggactggtgctgcaggtgcgcagcgagatcgaactgcagcgtggcgagcgcatcgtgctggtcgaacacgtggctgatcaacaccattaccgggtggtccgcgccgacgcggtcgccctcgacttccaggacaacctgcttccgggcaacaaggagaatcactga

SEQ ID NO: 500618 - DNA, 678 bp, Stenotrophomonas maltophilia
atgctgccggatacggtcgatgtcgctgcgctggccgactatggtgcgccgttgctgcaggcgctggcgcggcgcgaaacgccgttgccaccggatgcgggcgagcgcctggtggctgcgcttgcgcgcatcgcgctggccctgcaggccggcaacccggcgcagatccggcagcaggaaggctggtgggggcggctgctggggcgcgatgtcgctcgcgaagcagaagggcacgcgctgcagtcgcagctgggcgtactggccctgcaggcgcgtgagcaggcccagcacctgcagcagcacatgcagctgcgggccatggccatcattgagcattccgcggcggccgcggcgctggacggctgggccgaactggctgcgtcgcggctgacgacgctggatatcgccggtcaggccgcgctgtcgcaccggctggaccatcttcgccggctggcctcgctgcgccgcctggaagccggccaatggcagctgctgcaggaccaggacaacttgctgctgcaacgcttcgcgcgcatccatgacgtgctgctgccagcctggcggcaggctgcactggcgggccaggccgctgcgggcgctgcgttggccggcaaggctgccacgttgcacgcacagatcaatgacgaggtggccgcggctcaggctagactgccttga

SEQ ID NO: 500619 - DNA, 690 bp, Stenotrophomonas maltophilia
gtgaatcacgtgctgcgccacggcggggcgctggtgctggtgatcggcatgggcggctgcacgccgcccgatccaccggtgcttgctccggccccggccacccctgcggcgatcgccccggcacgcgaaccggccagcaacgacgatgaggccgcatatcgcccgatcgaggacgcggcgatgtccacggcaggcgatggcggcgaggaccaggcggcccgggcggtggtgtcggtggccctggaccatgccggtgaggtgctgatcggccagcccttcagcgaactgcagggcgaggcgcagtggcactcggccgggctgggcgagtcgaccgctgggcgttgcgagtactacgagcgcggcacgctgcccgagggcgtggcgatgatggtgcaggacggcgacgtggtgcgcttcgacctggcccccattgacgattccggccaggtggtgctgcagccggggccgtttggccttcatctgggcatgccacgcgcgcaggcactccagcagttgcccaagggcgtttccacgcaaccctatgacgatgatgcggaggccggtgagagcctgctctggcaggaccccggttccgacctggcgatccgcgtggagatcgtcgacggcaccatctcccgaatgtactggggcgccagcggcgccgttgacctgatcgaaggatgtacctga

SEQ ID NO: 500620 - DNA, 1146 bp, Stenotrophomonas maltophilia
atgaaccgtccgctgcgcatcctgcacaccgaagccgccaagggaatgggcgggcaggagatctacatcttccgccacatgcaggtgatgcgcgcgcgtggccatgaggtggcgctgctgtgccagcccgaagcgcgactggccaagctggcacgcgacgacggtttcaccgtgcacaccctgcgcatggggggcctgctgcgcctgctgcgcggcatctggtcggtctcgcgcctggtgcgtcgcgagcgctacgacgtggtcaacaccaccagccgccgtgacgcgctgatcgccgccgccggtgcacgcctgggcggcacaccgctggtaatacgctcgcgccacctgatgagcccggtcaactcgctgctgacctataccggcctgccgcaccgggtgatgaccgtcagcagcttcgtcaagcagctgctgaccgagcgcggcattccggccgagcacatcggtatcgtgccgccaattgcagtcccgccgcgctggagcgagatccgcaaggccgatccctggcaatgcctgcaggaggtgcgcgcggaggtgcgcgccgagctcggtttcggcgagcaggacatcgtggtcggttgcgtggcggtgctgcgcggacccaagggccatgccgacctcctgcaggcgatggtgccgctgtgcaggacgcatccgaacctgcacctggtggtgatcggcgatggccagccggtcatggatcggctgcaggcgctgcgcgacgagcatgggctgcagcaacaggtccacctgctcggctatcgtgacggcgcgtgccggctgatggccggcttcgacatcttcgcgctggcttcgcacaaggaagcggccggtaccgtgttcctggaggccgcctatgtcggggtaccgatcgtggccacgcgcgtaggtggcgtgccggagatggtggtcgagggcagcaatgcgatcctcacccgattgggcgacaatgcagccctgacaggcgcactgcgcctgctggtggaagatccggaacggcggcggcagatgggccgcgccgggtgggactggatgcacagcgcgcaccggttcacccccgatggccacggtgagaccaccgaacactactaccgccagtggctgaaggagctgggacatggctga

SEQ ID NO: 500621 - DNA, 702 bp, Stenotrophomonas maltophilia
atgtctgcagccgcccctgccgcactcgcccttgaaggctccacccggcgttggcgccggctggcctggtggtcgctgttcgtcgccggcaatgcggtcctggctgcggcgatcgcactgggcaacgtgccgctgcgggacaatccaggcggcagcgcgggcctggcctacctcgcgatcgccctgcccggccacctgctcgcgttcggcgcgctggccggcctgctgccgttgttgctggggctgtggccacgcactgcccgtacgctgagcatcagcgccgttctcctgcagggcctgtggctgtgcctgctgctggtcgacgccaaggtgttcaccctgtatcgcttccacctcaacgccatggtcgtgaacatggtgttcggcggcgccctgcaggaccaggtcgccctgtcctggaagacctggctgcaggtcgcgctgctggtcgccgcggtcttcgccgccgaaggcctgctggcctgggcgtgctggaagctgctgccggccgtgccgcgccggcgacgggtgctgcaggcgtgggcagcggtcgcgcttctgatggccggcggccaggtggccaccgcctactacgacgcccgcggcgaccgcgatgtgatcgcgcagtggaactacctgccgtgggcgcaaccgatcaccgccaagagcttcatgcggcgcctgggcgtggtcagccagtag

SEQ ID NO: 500622 - DNA, 2277 bp, Stenotrophomonas maltophilia
atggcagagaaggacattcccggcatccgtaagtacgacgcgccggctggtggttggggggcactgcgtgcaactgcaaaggcaatcagtgaacagatggtggcacctgaggcagccatcacgctgttccggacaaacaagccagaaggctttgattgcccagggtgtgcatggccagatcgtaagcacacatcgaccttccagttctgcgagaacggtgcaaaggccgtgacctgggaggccacgaagaagcgggtgaccccggaattcttcgccgccaacactgttacatcactgttggaatggacggactatcaactggaagatcagggccgcctaaccaatcccatggcctacaacccggaaaaggacatctttgaggcagttgattgggaccaggcactcagtcgaatcggcgagatactgcggtcgcaggcagatccgaacatggttgagttctacacatctggccgcgcttccaatgaagcggccttcctgtaccagatctttgcccgtgagtacgggaccaacaattttccggactgctccaacatgtgccatgaggcgaccagcgtcgggctccctcagtcgatcgggatcgggaaaggaaccgtttcgttggacgattttgattcctgcgaactgatcatcgccatgggacacaatcccggcacgaaccatccccgcatgatgggtaccctgcacgaagtatccaggcgtggcgcacccatcatcgtattcaatccattgcgcgagcgagcacttgagcgctttgccgatccgcaggacgcattggagatggcgaccttcggtgcaaccgagatcgcttcaacctatttgcagccacgtgtcggaggtgatgccgcggcgctgaagggcatcatgaaggccctccttgagatggatgccatccacggggaggccgccaacatcctcgatcgcgagttcatacgtgggcatacgcacggctttgaagcctttgctgacgatctgcgctctactgtgtggggcgatatcgtgacccagtccggcctatccgaagacgacttgcgcaaggtcgcggcagcctacgccaaatccaacgcaaccatcgttacctatgggatgggtgtgacccagcacagcacgggaaccgagaacgtccagcagattgcgaatctccttctgttgagggggaattttgggaagcctggcgcgggcatatgcccattgcgggggcattcaaacgtccaaggggatcgcagcgtcgggatcaccgaaaagcccagcgcagacatgatcgacaggatcgagaagcgattcggtttccgtgccccaagccaccacggtcacgacgcagttgctgccatgcaggccatcattgacggccgctcacgggcgctcatatgcctcggtggcaacctcgcggttgccctgccggactcagacgcttgctttgcaggcatgcgagggttggagctgtccgtgcatattgcgaccaaattgaatcgaagccatttgctggtcggaaagaacacattcatcctgccgtgcctgggcagaaccgagcaggatctgcaggcgacgggcccccaagccgtgacggtcgaagactccatgtccatggtgcacgcatcgcgcggaaagctgaaacccgcctccgatctattgcgatcggaacccgcaatcgttgcagggattgccagcgcgaccctgccgtccagcacggtgcggtggtcggacatggtcgcagactacgacgtgatacgcgacgcaattgaagccgtcttccccgaattctcggattacaacgccagaattcgcatccctggtggattccgccttcctctccctcccactgagcgggtgtggccaaccgcctcgggaaaggcagagttcatccggttccaagggttggccgaagatccgacaccaatcgactctgcagttctaaagctcgccaccctgcggagccatgaccaatacaacaccacgatctacagcctcgatgaccgctaccgtggcgtgtttggcaggcgcgacgttgtttttatgaatgaagaagacatgagcgagcgcggcatccagcaaggcgatcagattcgcataaccactgcgctcgacaatgagcaaagccgggtcctggagaacgtcattgccattggttacaagatctcccgcggctccgtggcaacgtactatcccgagggaaattgcctcattcctttgaactacattgatccggtaagcggcaccccctcttacaagtctgtaccggttcatatcactttggcgtag

SEQ ID NO: 500623 - DNA, 588 bp, Stenotrophomonas maltophilia
atgcctacatccatattgccagcacagcccgatcaccccattgccctcagcgccgccctgaaagcgcacacccgaacggcccacgatcgcctcgaccagcacctgttgcagcaacacatcttcgcgtcgcgccagcgttacctctgcttcctgcgcgtgcaatggcacttccatagcgccgttgcgccgctgtaccggatgcaggatccgggcgcgacccgcttgccgctgatcgaggaggatcttcgcgacctcggcgcttccatcccggtaccccatgcctggcaaccgcagcctcaagcattctcgaaagcgaccgttctgggctggcgctacgtggcggagggctcgacgctgggagcgtccgtgctgttgaagatggccgctgcgttgcagcttcatgccgggtacggggcgcgccacctgcgcccttccaacctcggtgtggccgagtactggagacgcgagcgggaggagctggatgcgctcgctttaagtggccaggagcgcgcacaggcatgcaggggcgcgacagacgccttccagttcatccgtcgctgcgtagatgaagaattcaggtttgaatga

SEQ ID NO: 500624 - DNA, 2241 bp, Stenotrophomonas maltophilia
ttgacgcctcctgccgaatccgtgcacgacactgccttgtcccgctgcgcgcgcgaaccgatccacacccccggcgcgatccagccctacggtgtgcttctggtcgttgaaccgcagtccctgcaggtacgcgagcgcgccatcagccaccccgggctgctgaaacagttcggcgaaccgttgatgaagcacgtcagtgaggtgctgggcggcgtgctcgcaccgttccagggcgcgttgcaacaggcgacggtgggcagcagcgcgcatgtcggtgccgtgcacctggatgggcacggccgccatcagctgctggtgcaccgctccgccacggaccttctggttgagctggaagcaccggttcccggccagcccggctcgctggaagaactgtatccagccatccgcgagctgatgaccggcattgaatcggcagcgacggtggaagacctgtgcaggcttgcggccgcgcacatgcggcggctcaccggctttgaccgcaccctggtctatcaattcgatgccggctggaatggcatcgtggtggccgaagatggcaatggcctgttgccatcctacctcgacctgcgcttcccggagtcggacattcccgcacaggcccgcgaactctaccgccggaaccgggtgcgcctgatcgcggacaacaactacacccctgccccgctgatgcgggccgaagaccaccgcgaggcgccaccgaccgacctgagcctggctgtgctgcgcagcgtgtcccccgtgcatcttcagtacatgcgcaacatggggaccggggcgtcgatgtcggtgtcacttgtacatgaggggcgattgtggggcctgatgtcctgccataccgtgcagccacgccgcctgccctaccacgtgcgtaccgcctgcgagttcatgggccagatcctgtcgctgcagatcgcgctgaaggagcgcgcccgtgcaatcgaagagcgcgtggcccggcgttcggtgctggtcaagctcttggcacgcatggccggtgatgaggacttcatggctgcactgcgccacgacgaggccagcctgctgtcgctgaccggcgcggccggtgcggccatcgtacacaagggcgactgcatgcgcgtgggtgagtgcccaccggccagcgacgtgctggccctggtcgattggctggctacccggcaggccgggcaggaaacctactgcaccgaccaccttgccgcccactggtcgcctgccgcacacctggccgatgtagccagcggcctgctggcagtgtccatttcgcagctgcatgacagctacctgatgtggttccggccggaggtggtgcgaaccgtgcgctgggggggagacccccgcaagaccgcagcgcccggcgtggcactgtccccgcggagctccttcgatgcctggaaagagaccgtgcggcagcgcagcctgccgtggaatgatgctgattgcgatgcggcgcacgagatgcgcacggccatcgtcgatatcgtgctgcgcaaggccgaggagatggcggagctgaacgagcagctcctgcgcagcaacaaggaactggaggccttttcctattcggtcagccacgacctgcgcgcccccttccgccacatcgtgcgctattcggagctgcttggcagctcggcgggcgaacgcctcaacgagaccgagcgccgcttcctggatacgatcgtcgattcggcaaagtccgccggcacactggtggacgacctgctcagcttctcgcagatgggacgctccacgctggggcgggtgcgtctggacatggctgcgctggccgaggacgtgcgccggagcctggcgctggattacgacggccgcgacgtgcagtggacgctcgcgccgctgccggaggtggaagccgacccgacgatgcttcgtctggtctggcagaacctgctggccaacgcgatcaagttcacccgcgagcgcgagcacgcgatgatcgagattgggcacgaccgcagcgacgacgaagatcacttcttcgtgcgcgacaacggctgcggcttcgacatgcgttacgtcgacaagctgttcggtgtgttccagcgcctgcatcacgtggaagaattcgaaggcaccggcatcggtctggccaacgtacgccgcatcatcggccgccatggcggccgtacctgggccgagggcgagcccggcaagggcgccaccattcacttcaccctaccccgctccacaggagaacacccatga

SEQ ID NO: 500625 - DNA, 693 bp, Stenotrophomonas maltophilia
atgaccgggaaaggtgcgttgaggattctgttgaccggtgctgcgggcctggtggggcagggtgttgcgctggcctgccagcgctcgccgcaggtggcccacctgactgccctggtgcgcaggccgggcagcctgaacgggcctggcagcgaactgatcgtccccgattttctgcatatgcaaggccggcatgagcaactggcaggcttcgacgcatgcttctactgtgccggtgcgccaccggtcggcacagcagaggccgagtatcgacgcgtcaccctggacatcacgctggcggttgcacgcgcctgggcggcggcgaatccagaggggcgctttctatatgtatccggtgcgggtgcggatccgcagagccgggtaatgccgctgagggtcaagggcgagaccgaagtggcattgcaggccctgccggtgcgcacggtgatgctgcgccccggaggcgttcgcccggtcccgggtaccggcacccgtcatgcactgctgaagccgctgtactggggcggtgcgccattgatgaaactggccggcgcggttgcgccttcgctggtgacgagcaatctggcgctgggccaggcgatggttgccttggccgccagggagcatccgccgggcacggtggaatgcgcggacatcaatcggatcgccgctggcgcgcgcgatccggcgtcctga

SEQ ID NO: 500626 - DNA, 768 bp, Stenotrophomonas maltophilia
atgcgcactgcctggctgctgctgtgcctgccccatgccgcgctggcggcgccctggctgcgcaacgagggcgtggccacatcggcgcagggcgaccttctctatcgtgaagtgcactggcggcgcggcccatcggagggtgccgagcgctgggtgctctatcagtgcccggatggccgccccttcgcccgcaagcatctaccggccagcacccgcccgcaggcccggggttattcgctgcaggacagccgtagcgggcaaaccgctgaagtcgacgcgagtggcgagtcggtgtcgatcgcctggaaagaagatgccgccagcgagctgcgtcagcgtcggcttgagctggcaccggatgcggtgatcgacacgggcttcgacgccgcggtgcgccagcattggccagcgctgctgcgaggtgaacgcatcagcctgtccttcctggtgccggggcggcagcgcttcttcccggtgcaggtgcggcgtaccggccctgttcgctggcagggcatcgacgcccaggccatcgaggtcagtctggacacgtggtacggcggcatcgcgccgcgcctgtcgctggtctatgccagcgccgaccgccgcctgctggaattccgcggaaccagcaacctgcgcgatacccgcggcacctacccacaggtcacggtgcgcttcagttcgccggtggccgagcggcccgccagcgaatggcaacaggcctgggcgcaaccgctggtcgaacgctgcagcgtgatgcccaagtga

SEQ ID NO: 500627 - DNA, 2205 bp, Stenotrophomonas maltophilia
atggccgatccgtcatcaccgccgacgctcgcccatggctacgccaacctggtggcgcgtcacgcccaactcagcttcctggaacacccctatccgacgaccgccgcatcaatcctcgctgtatgtcatcacgaggccgacctggtcatggtgtttggcggcgcgagacaccagaagctgccctgccccgacctcgccgcgtccagccgcttccggggtggcgccaccctgctggcagggcgcgccggcgaatggctgccacgggagatacgcgagctcgacggccgggtggtggccgtcgttgaaggcgggccctacgccggctggctgcgcgcgcatcatcctcagatccggctgcagcacctgcctgatcggtacgcagcattgacggcagttcaatccggcctggccgacgtggcgattggcctggaatccacgctgcgcccgctggttcgacgtcatttcaacggcagcctgcgcctgcagccattcgacagcgacttctccaccgacctctacctgctcgtccgccaggaagaccagcagctgcttgaacgcatcggacaggcgttgcgggagatcacgctggaggagcatgctagtctgctccacctgtgggcaggccagaccctgccagcggcggcgggaaacgcactggactggatgcaggcctcgcccccgcgcggctggctgctgctgccccctctgctggtcgccctgttgctgtggcccatgacccgtcacctgcgggtacgcggcgatcgccgcagcgcgcaggccatcgggatgatcagtcacgagatgcgcaattcggcacaggccgtactggcctcgatcgagctgcttggacaatcgacactgccgaaaggcgagcgcgatctgctcgccgctgccagcagcgccggccaatccctgcgcggcctgttgaatcgcgcactggacttttcgcgcctcgccagcggcgctttcaggccgcatgcacaagcctgtgatgcgacccagctttgccggcaggcactggaggccattcggccacaggcgcaacagaaaggcctgcaactgcatcttgatgccccgaccgaaccttcgccgatcattcgggtggacattgatgcgctacgccagattgccagcaatctgctggccaatgcggtgaagttcagtgatatcggcggcatcgaactgcgcctgcggctgcttccagcagcgcggccgcaagagctgctgctggaggtgatcgacagcgggatcgggatcgcgccagcacaggtagccgaactgttccagcctttccgtcaaggcagcggcgggcatcagcgtggcggtagtggcctcgggctttccattgcgcgcgagctggcacgtgcgatggggggcgatctgaccgtgcacagcgtcctcggtcgcggcagccgcttcatcctgcgcctgccggtatgcgctgctgactctgccgagagtgtccgggacatgcccgtggagggcacgccactggccgggctgcaactgctgctggtggaggaccacgcactcaatcgccacgtcattgccgaacagttgcggcgctggggcgccgaggtatgtgcccaggaagacgcggccagcgcgctggccgaacagatacgccacccccgcccagccgcactgatcgacattgggctgcgtggcatcgatggctacgcattggcacgcgaactgcgcgcccgtagcgggcatccggtccgcctgatcgccttgtctgcccgcagcgggcgacgtcaccacgcacgtagccgccgctcgggtttcgacgcggtgctggccaagccgctgcgcgccgccgagctgctcgctgcgctgggcattccggagccgcagagcctggacgcgcttgagcaggcgactgaaatggacgcggcctacagcgccgacatctgcgatgaactcggcaggatcgagcggattgtcgatcatgcagacgcatcggcgctcggtcatcacgcgcaccgattgcagggcgcgctacagatgcttggtcaatgcgagcacgccgccatcgcggccgagctggtcgatctggcgcaggacgccacgccagactggaccgacgcacgtcgcctgctgggcgtactgcaggccggacagggcacccgcgtcgcgggaaccctgcccacccccttgatcacgcggccaggcgctcgacctggcgacgggtcaggtcattga

SEQ ID NO: 500628 - DNA, 1278 bp, Stenotrophomonas maltophilia
atgcgcccgcgcaccctcgacgaaatggtcgggcagaagcgcctgctggcgccggacagcgcattgcgccgtgcagtcgaatccgggcgtgtgcactcgatgatcctgtgggggccgccgggctgcggcaagaccacgctgtcgctgctgctggccgagtactccgatgccgagttccgtgccatctccgccgtgctgtccgggctgccggaagtgcgtcaggtgctggccgaagccgcgcaacgcttcgccgagggccggcgcaccgtgctgttcgtggacgaggtgcaccgcttcaacaaggcgcagcaggatgcgttcctgccgcacatcgagcgcggcacgatcctgttcgtcggtgccaccaccgagaatccgtcgttcgagctgaactcggcgctgctgtcgcgttgccgcgtgcacgtgctggaagcggtatcgccaaccgatatcgtcgaagcgctggaacgcgcgctgggtgaccgcgaacgcggcctgggcgaggaaggtatcgaggttgcgcccgagctgctgctggaaatcgccactgccgctgatggtgacgtacgccgcgcactgacgcttcttgaaatcgccgccgagctggcgggcggggagggcggtcgcatcacgccgcagaccctgacccaggtgctggccgatcgtacccgccgcttcgataagggcggcgagcagttctacgaccagatctcagcactgcacaagtccgtgcgcagctccaaccccgatgctgcgctgtactggctgacccgcatgctggacggcggttgcgatccgtcctatctcgcgcgccggctgacccgcatggccatcgaggacatcggcctggccgatccgcgcgcgcagagcatggcgctggaagcctgggacatctacgagcggctcggtagcccggaaggcgagctcgcgttcgcccagctggtgctttacctggccagcaccgccaagtcgaacgcgggctacgccgcgttcaaccaggccaaggccgacgtgcgccagagcggtaccgaagaggtgccgctgcacctgcgcaatgcgccaaccaagctgatgaaggagctgggctatggcgccgaataccagtacgaccatgatgctgaaggtggcatcgcgctggaccagaccggtttcccggatgcgatgggcgaacgggtgtactacaacccggtgccgcggggcctggagatcaagctgaaggaaaagctggatcggctgcgcgccgagcgtgaggcggcaagggccgctaagggtcgctga

SEQ ID NO: 500629 - DNA, 288 bp, Stenotrophomonas maltophilia
atgattcatcaccatccacatccggggcagacgatcaaggcaatggtcttcgatccgatgggtctctcggtgaccgaagcggccgagcgcttggcaatgtcgcgggtggcattgtcgcgggtattgaacggcaaggcaggcatcagtcctgatctggccattcgtttggaaatggctggggtcagtacggcggctttctggatggggctgcaatccagctacgagctctggctggcgcggcagcacgagcagccgcgggtgcttccactggttgcgcccgtgcggtga

SEQ ID NO: 500630 - DNA, 279 bp, Stenotrophomonas maltophilia
atgatcatcagctttcgccacaagggtctcgagcggttctaccgttccggtagcagcagcgggatccggcatagtcacaccagcagggtgctgatgatcttgtccatcctggatgtagcgtcgggtcccgaggatctcgccatgcctggattgcgcctgcacaagctgcggggcgacctgaaggggcattggtctgtgtgggtcaatgggaactggcggatcaccttccgttttaccggtggcgacgtggaactgctggactacctggactatcactga

SEQ ID NO: 500631 - DNA, 789 bp, Stenotrophomonas maltophilia
atgccgcgcaaccgtgaacgactgaaccgggccatgaagcccctgatgcccctgtgctgggtggccctgctggccgcctgcaccccacctgccggcgaagccggcgctacggctccggctgcggccagcggacaggccagccccgcaggcaaggccgccgacgcgcccgccacggtcgccgacacgagcgctggctgcgccgatgcagcgtcgccggcacagaccctggtctgcaaggacccgaccctgaccggcctggatgcggacgtgggcaaggcggtcactgccgcacaggccacactcgatgcagcagggcagagcaagctgcacgccgaacagcagcgctggcaggagcacacccgcgacctgtgcaccgatgcgcagtgcctgcagcaggtgtacgccgatcgcctcaaggtgctgtccgctacgcgtgacggcctggtcgaccaggatgcatgcgaagcccctgacggccagcagcaatgcgtggacctgctggtgctgcgcgatcccaacagccagctggcgaacttcaacacgctgctgggtgagaacggccaggaaggccgcctgctgggctgcacggccgccacgaacatgggcggcggccccaacgccctgctcgcagccaactgcacccaggagacctccgccggcaggcgcaacgtgcagctgtgcagcaaccagatggttggccagttcgccctcgaaccggcgccggctgcttacggcacccaggccatccgccagctcctcggcttcacccagcagcactgcgccggctga

SEQ ID NO: 500632 - DNA, 486 bp, Stenotrophomonas maltophilia
atgcgctggccgtggtctgcggcggcgccgcccaggctggaagacgcgcaggccgatgtgctgctgcaggacctgctgtcgcgcgacgcgacgcgcatcaccgacgccgcccgcatcgtcgcacgactgttcagtgcaccgtcgctggacgcattggccgcgcatgtggacctgattgaacgtagctgccacagcatcaccctcggcggcatgctgatcagcaaccaggcgcatctggaggcggccctgaaacggctgcgtcactggcaggcgcacgcaggctgcctgtgcgcgctcaatcccggctacccgttcttcgatccgcgccgcttgatcgaacaagggcagatgcagctgctcgcgttgcaggaggccgaggatggttggggcgattgccacaacgttgcctgcatgcactgcggccagcattggcaggccatcgaccgcgagtaccactacccgtggtgggaatggaaagctgcctga

SEQ ID NO: 500633 - DNA, 1509 bp, Stenotrophomonas maltophilia
atggatgcactaccccgctccgcccgtcgtcgccgctggccgcgcgtgctggccttgctcctgctggtcccccccctgttgttcaccgccgccctgctctggccgctgtctgcaccaccgctgccccaccccggcaacagtcacgtgatcgtcaacgcacgcgtggtggacatcgcccgcggccaggccagcgaacccaccacggtgaccgtgcgcaacggcaccatcaccgccatcggtgaagacccgccggagaccacgttgccggttctcgatgcgggcggacgctggctgctgcccggtttctgggacatgcacacccatgcactgcagctgtcaccgcaactgcagtttccgttgatgctggccaacggcattaccggtacccgcgacatgatggactgcccacaggccaccgatccgctgatcgcctgcgtggccgacaaacgccgctggaccgcacaggccattgccgggcagcaggttgcgccgcgcttcgtgcaggtcgcaagcttctactttgaagatccgtcacttgcgccggaggccgccgccgagcgtgcacgcacgtacagcgcgcgcggcgtcgacgcgttgaaggtctacaaccggctgcgtgcggatacctaccagcggctggccaccgaggcgcagcagctgcgtcgcccgctggtcggccacctgcccaaagcggtaccgctggagggcgcactgcaggcaggccagcgcagcttcgagcatgcccatctgttcgtacgccactgcttcgacaacgcggcggcgtggcgcggtggcatgctcgacagcgaggatccaaccgcgctggccgaacgcatggtcggcggctaccggcccgcgctctgcaacgaggcgttcggtgtgatgcaggccagcggtgccgcgttcgtaccaacccatgtcactcgcgaagaggatgcgcgtgcgcgcgaccccgccttcatcaacgatccacgcctggcctatctcgatccgctttcacgctgggcgtggcgtgatgacctgcaggccaccgtggcgcgctaccccggcctgcgcggcgaagacgcactgaaggcctacttcgagcacgggctggcgctgaccggcaccgcgcatcgtgcgggcgtcaccgtgctggtcggcaccgataccgggctgggcggcttccgctaccacgatgaactgcagtggctgcggcaggccggcttgagccaggccgacgtgctgcgcgcagccacgctgcaggccgcgcgccatctggacctgcaggcattgcatggcagcgtcgaggtcggcaaggtggccgatctggtgctgctcgatggcaatccgctgcacgaaaccgccagtacccgccgcgtgcacgcggtgctgcttgccggccatctctacgaccgcccgcggctggatgcgctgctggcctatgcgcgcaagcaggcacgttcgcccgccgtgatggcgcggttgttgtggggcttcctcaccagccccgtcagtgccgagctgtag

SEQ ID NO: 500634 - DNA, 810 bp, Stenotrophomonas maltophilia
atgtttgaaaagggactgttcctgctgttcgcactggccgatgtgccagctcctgcagctgaagcgccgccacctgcagccattaccgaagccgatctgggcccggactatgtcggctacctgctgttcgatccggggttggtcgagttcaatcggctgcagtcggttcgcgattacggcaattacctgacctaccgcgcggcacgtgacgcgttggagagctacgaggcatgtctgcaggtgggggccgacaaccacgcgcagatcgaggcggcctaccagcagttggtgaacagccagcagcgatacgtcagcgcggcgcaatggcgcgacctgcggcaggccctgcgtgcgaggcgcgagccggtgcccgagcgcgcgtcgtggcaatgcgccgcattcgtggacaacgcgccctatttcgatgcggggttggacgatgcactgctgggcgccaccgaattggcgcgcgagcaggcgggggaaggggattcgcgtagcgacgcgctgcgcccggtcctcggcgttcagatggggggcgcgaccgtgatcgaatccgagcctgacgagggtccggcccatcgcgccggcctgcgcaagggggatggggtgctggccgtggcgggtacccgagtgaagaccgtcttcggtgtcggccaagcgttgaaagcctacgcgccgggcgatcgcgtggacgtgcgcgttcgccgcattgaatgggacggttcgcaaccgcaggtgcgggaattgatcgtagatgtggtgctagagtcgcgggcggtggtgatggcgagggcgaagggccgctag

SEQ ID NO: 500635 - DNA, 249 bp, Stenotrophomonas maltophilia
atggcattgacagcctaccttcaagctcatttcctgccaaaggatgcgttcgccgcattctgcaatgtgtcagaagaaagactcagtcgcctgattgcagtgggcgcggtgccgcagcccacctacacctgcgaggaaggcaccatctatgcgcgtgcgtcgatgccgttttcgccggccgagtatgaccgtagcagtagaaagcggttggtcgacgatcttcgccgggagctgggcgaaaagtcctga

SEQ ID NO: 500636 - DNA, 2934 bp, Stenotrophomonas maltophilia
atgcgatcccatcagatccaatactcggcgctggccctcgccttgacggcggcactcgccgttggcatccctgttcgtgcgcacgcacagcaggtcatcgcagacggcgatgcacagaccccggcagcgggggattacagcgcaaccggcgtgggcaaccacgccttccatgcgctcaacggcggcagcatcgtgccgatgggtgcggtcaatgtgagtgcggatggtagcggggcatccgcagcccgtgccgaaggggctggcagtcgtatcgaactgaatggttcgaccttggtcaccaccggttttggtgccactaccgcgctggcaacgacgggaggcgaactgcatctgacggcgactgacgtcatcaacaagggcaccggcatgggcgttgtggcgcataccggcagccaggcaacgctgcaggatgtgaacatccgcatggagggtgtgtcgtcggtcggcctcgccggcggcggtgacatcaccatgaccggtggctcgatctcggcgatggggctgggcagccgcgcggtgtcggccaccggggcgaacatgaccctgaccggcgttgcaattgaaggcgagtcgggcatctggctggccgataacaaccggctcaacctctcaggaagcacggtgaaggccagcggcatcgcgttggacatcaatggtcgcagcaatgcagtcacggtggcggactccaacttccacagcaccggcaacgggaccgcaacggtcaagatgttctccgaatcgacgctggcaatggcccgcagttccgtcatcagcgagggggaccgtgcggtcggtatcgatgcacgaaccggtacggcggatctggaccgcgtgaatgtgaccacgtccggtgagagcagccatggcctgtatgccgatttcactggcatcggcgccggcccgatcatcactgcgcgtgcggcccaggttcacaccacgggtgcgggtgcgatcggtgcggttgcgcgccagggcggcagcatccatctggacgacagcatcatccgtaccgaaggccagcaggcccatggtgtgctgaccgggggcaggggcgggatgacgttggccggttcgcacattcgcaccgagggcgagggcgcctgggctgcggtgatcaatgacaacggcagcctgggcatcgacggcagtgcgctggaaagcgtgcagcacggcggtgtgtgggttcgcagcaaccgtgactcccgtttgacgctgtccaacaacgcctacgtatcgggtggcaatggcattgccatcgcactggatgcggcggtggcggggcgtttcgacgtggtgttgcaggggcattcgcagatggtcggcgacatcgtcatcacgcccgaggacgaggatgccggtctggtgccgcagtccgatgtgcacgtgcgcctggcagacgggtcgctgtggcagggcacgtccaacctggtgcagacgatggcgattgaaagcggaagccagtggacactgaccggtgatgccacggtgggcgaactgagcgtactgaacagtggtgtggcgctgtccgacggcagtggccgattcaacacgctcaccgtggacggtgatctgcacagcgagggcgcgacgttcctgttccagggcgccctgggcggtgacgacagcgcttttgatcgcctgcatgtgcgtggcgatacttcgggcgatgcaagcattgcggtgaagaacattggcggcgttggcgctcagaccaccgatggcatccagctgatcgaagtggacggtgcatcgttggcgacctatgcgcttgccggccgcgccgtgggcggctcctatgagtacttcctgttcaaggggggcgtgactgatcccaccgatggcaactggtatctgcgttcgcaatggtttgatggctgcaaggacaatccggccgcgccgggctgtgtggtggacccggttgatcccatcgatccggtggatcccgtggacccggtggacccggtggaccctgtggacccggtggacccggtgccggtgctgcgtcccgaagccggggcgtacctggccaaccagtcggcggccatcaacatgttttcccatcgcctgaacgaccgcatcggtgccgtctcgctggacgaaggccgtgccgcgtgggcgcgcgtgggacgtcagcaggcggacttcagcgcggtcggtggtcagctgtcgattgatggcaacacctcggtgctgcagattggcactgacctggttcgccgaggcaatgcagcgttcggcgtgatgctgggcacggggcgtgctgacagcagcgcagtgtccgatctgaccggctacagcgccaagggtcgggtgcgtggcagcgcggtaggtgtgtacggcacctggatgcaggtggctgacggtacgcagggtgcgtacatggatgcgaacctgcagtacggccgtttcgataaccgggtgcagggcataggcctggagccggagcactacgattcgcgcatggccagtgcgtcactggaggccggctacaccttcaacgtgtggcagggtgccgccagcgcgctgtacgtgcagccgcagctgcagctgagccatgtcgatttccgcaccgatcgccacgtggagcgcaacggcacggtgatcgatcacgccgatgccggtggcctgagcgggcgcctgggcgtgcgcgtgtttggccatggcactgccgccagcaacatcgtgcagccctacctgggcgtgaactggctgcgtggcagtggcaccagcacgttgcagttcgacggtgacaggctgggcgcggacgtgccgcgcaaccgctacgaggtgcaggccggtgccgagttgaagctgggccagcgctggggcgcgtggggtggcgtgagcgtgcagcatggcgatcatggctaccgcaatgtgggcggccagctgggcctgcgcatggcctggtaa

SEQ ID NO: 500637 - DNA, 987 bp, Stenotrophomonas maltophilia
atgtccgatcactctcgctccctcgtgtccgtgcccctgcatcggcgcagctgccgcatggcgctgccggtattggtggcggcgctgctgccgggcctggcgcaggcctgtaccgccaccatcacctggcccatcgttgaggacaggcagaagcccggttaccgcgaggagatccacatgctggtggatggtggcaccaacgtcagctacagcgggtgtccggtgggtggcgatctgcagataacagtcaatatccaggggccgggcctacgctgggtcatggatctgcctgatgttcctgtctggccggtggatggcccgttgccgttgtacgaaaccgggccggattccccattaatcggctttgctaccacctatgacggcccacgattgccgctggcgttgggtgacaacacgttgacttaccctatccgcaacagcggcgacagtttcatcatcaatgccttcatgttcagccgtggtcagaagatgcgcgatacgcagacgctggcgtcggtgcacatcgtggggcgcaaccatcccactttcgatgtgacggtgccggtggacattacgattgcgtttccgcccaccacctgccgcatgcgcgacgtttccgaggtgctgcaggatgtcgccgctgccgacctcatgaatcctggggactctgctcgggaaaaacccgtgtcgctgctgatggactgcggcgtcgcgcggccacgtgccgacatggtcctgatggatgcgggcgatgcaggcaacacgggtagcctgctgacaccgagcgccgactccactgccgaaggtgtgcgggtgcagctcctcagtggcggccgggaagtacagttcggtacaccgtggttcttcaaccccggagtcggtggtgtccatacattcgagtacaccgcgcgctaccttcgggtgaacgaggatctgaagcccggcctgatcaagggcgaggccgtgctgaacgttgtctactggtga

SEQ ID NO: 500638 - DNA, 996 bp, Stenotrophomonas maltophilia
atgagcgccaacaccgcccctgacacgcgtcccatcccgcgccatgcccgcaagctgctggcgacaccgttgctggggctgctgttctgtgcaggcagtgcagttgcctgtgtcgagtacggcatcaaccgcgatctgctgctggacaagacgtatgccacgtacccggacgcgggcagggtgcagtttgaccagaagtttgcttcgcgttccttcaaagattgcccggaggagcgggacgtaccggtcttcatgaccctggagatgcccggcctcatctatgaaggcgaggtcactttcagggggaagtcctatcctgcgtattccgcggcccccgactccccgctggtgatgttctaccatcacgtcgctttttctgaagacggtccgcttcgtaatggtgaggaggtgcctggactgttcgagatgagcggggggacatcccttgaagcgtcgatccagtactgggcagttgtcttttcccgtgggggccgcatgagaacgcccccgaccatgaccggttcgatcacgttgcgagcgccatcggagccctcacttgatcaccagtcgatcgtgcagctggatctcaagttcccagtcaccacctgccccctgcaggacaaggccgaaaccctgcaggacgtgcagactgcagagctgtccgtaccgggctccaccgcaaaggaaaagctggtcgccatccgcatggactgcggcgtggacccgccgcgtgcgcggatgacgctcagtgatgctggcgatgcgggcaacacgggaagccagctgacgcctacagccgattcggatgccgaaggcgtgcgcgtgcagctgctgcggaatggctctgaagtgcagttcggccagacctgggatttcgatccgggtgtgggcggcgtgcatgaccatcagttcaccgcgcgctatatccgcaccaacgaaccgctggtgcccggcacgatcaagggtgaggcagttctgaacgtcgattactggtga

SEQ ID NO: 500639 - DNA, 624 bp, Stenotrophomonas maltophilia
atgcgcaagatgctgatcgtggccgccctgctggccgccgccccgctctcggcttcggccgacgccctgagctacacctacgtcgaaggcggttggacgcaggtcaaggttgacgacaacgcactggacgacccgaaggtcgacggcggctacctgcgtggttccgtggcgatcgccgaacaggtccatgtgttcggtggttggacctacgccagcaagtcgtacaactacgactacggctcctacaagctgaagctgaaccagccggagctgggcatcggctaccacatgccgtggaccgaccgcgtcgactttaccgctgacgccgcctgggtccgccagcaggccgaaatcaccgtcaactccgatttctacggtcgcctgcgcaacaaggaccacaccaacctgggccgcgtcaccatgggcatccgtggcaagccgtcgcgcatgaccgaaggttgggtcaaggccggttacatggacggcggcaacaacttcaagggcacctgggtcggcaccgtcggcggccagatcaacttcaccaagacctggggtctggtgggcgagatctccggctaccgcgacgtcacccagtactcggccggcgtccgcgccagcttctga

SEQ ID NO: 500640 - DNA, 258 bp, Stenotrophomonas maltophilia
atgagggcggtggtgctggtcggtctggccctgttggccggcccggtactggccgcacctccagcaccgccttcggtgtggctggagcgccagcaggcagccggtgccgacgaagcgaatgctgcgggggcgaagcctctggcggtacccgaggccagggagcgctgccgggtcaccaaggaatggaaggtcggcgagacggtggtgcagcatcgggtctgtgaggatccaccgaagaagccggctggaaaggcgtag

SEQ ID NO: 500641 - DNA, 657 bp, Stenotrophomonas maltophilia
atggtggaagagcgcgtcccgttgacggtgcatggcatgtcggtgtccggcaattgccacaaggtccgcctgctgctggagcagctcggcagccgctaccgctgggtggaagtggacagtgcccatggccagacccacaccgccgagttccttgcgctcaatcccaacgccaaggtgccgttgatcgtccgcgacgatggccgcgtgttgactgaatccaatgcgatcctgttctggttggccgaagggacgccctacctgcctaccgacggttgggaacgcgcgcaggcattgagctggatgttcttcgagcagtacacgcacgagccatgcgtggcggtagcgcgcttcatccgcggctggacaccgcccgattcaccgcgccgttctgaactgccacgcctgcacgagcgtgccgccaccgcgctggccgtgatggagcagcacctgcgcgaagcgcagtggttcaccggcagcgcatacggcatcgccgacattgcgctgttcgcctataccgacgtggcaggcgaaggcggcatcagcctggcgcccttcccggaagtgcgcgcctggctgcagcgcgtgcgtgcgcagccgcgcttcgtggcgatgccagcggtgaccgccgaggtgcgcgcgcgcttcgaggccgcctga

SEQ ID NO: 500642 - DNA, 564 bp, Stenotrophomonas maltophilia
atgaaatccaccgcgttgctgaccctggcctgcctgtcggcgctgcccgccgtggtgctggcccaggaggccgagccccgcaaccgggtggtgatcgtggagaacgtgaagttcgactacgcccaggtgctgaacgtcgagccggtgttccagaccctgcgcgcgacccgcaccgaggagcactgcgagccggtgtcgacacggacgctggccccggtgaacgtgaccggcgaggagccggtcgaggacaagggccggatcagccgcttctgggattcggtgcgctcgatgttcaagcgcagcgacgaggagccctccgaagaggccggccccgaaacgccggccccggcgcctgccaacaccggtccgatgctgacccgcgactgccgcatcgttccggtggggcgtgaattccgccggcccatcgcctacgacgtggattacgtctacaagggcaccaagtatcggtcgcggctgccggaagacccgggcaaccggctcaagatccgggtgtcgatcaccccctgggtgggtccggagcagggcgccgccggcaatccctga

SEQ ID NO: 500643 - DNA, 1428 bp, Stenotrophomonas maltophilia
atgcaaactgcttccaccattgcccgactgaccctgctggccgtcggcgttgccggtgcgctggccgccgccgatgccaatgctgccgccttccagctgaaggaaaacagcgccaagggcctgggccgcgcgttcgccggctccacctcgaccgaaggtgacgcctcggtcatcgccaccaacccggcctccatgcgcctgctcgacggcaccctggtccagggcgacgtcagcgccatcagcttcggcgccaagttccgcggccagggccagtacggcaacggcgcgccgatttccggtggcaacggcggcgacgccggcatgatcgccccggttccggccgcgtacttccacgtgccgttcggcgagaacgacaacatgcacttcggtgcgtcgctgaccgtgccgttcggcttcaagaccgaatacgaccgcgactgggtcggccgctacaatggcgtcaagaccgagctgcaggcgatcgacctgggcgtggcgttctcctatgacgtcaacccgtacctgtcgttcggtgcttcggtgttcgctgagcgcctgaacgtcgacctgaccagcgctgtcgacaccggcaccgcgatcaacgcaacggcccagcgcaccgctgcggcgcgtgtgctggctgcaggcggcaccgcagcccaggctgcggcggcgtcgcaggccgctgcacgccaggccgcccagctcggcttctcgccgggcaccgccgatggctacctgcgcatcaagggcgacgaagtgtcggtcggctacaccctgggcatgacggtcaccccggtggaaggcaccaacatcgccttcagctaccgctcgaaggtcgagcacaagatcaccgacggcaaggccgacttcaccatcccgcagaacgctgccgccttcctggctactgccgccccgggtaccttcatcgacagcaacggccgcgccaccatcaccctgccggccagcgccaccatgggcttcacccaccgcgtgaacgaccagtggcagatcatggccgaggtcacgcgcacggcgtggagcaagttcgaccaggtcaccgtcgactatgactccaaccagccggacagcgtgctgccgttccactaccgcgacaccaccttcgcgtcgatcggtaccgatttccgcgtgaacgacaagctgaccctgcgtggcggcctggcctacgaccagaccccgaccaccgacgcccaccgtgacgtgctcgtgccggacaccacccgcaagtggctgtcgctgggcctgacctacgccgcttcggacaagatggaatacagcgtgggttacacccacctgttcaccaaggatccgaacatcacctcgacctcggccactgccaacaccgtgaccggcaagtacaaggtgagcggcgacgtgctggcggcgtcgatgcagtacaagttctga

SEQ ID NO: 500644 - DNA, 447 bp, Stenotrophomonas maltophilia
atggttgatcgtcgctaccagaagcggatgatccgatactgggctcgggaagaggccaaggcgaacgcgactctggatcgcgtgctggagtcggaatggttcgactactggcacacgcatcttgactggatggggcgcggcaatcgccatatcagtgatcgctccgccgttgccgcagggctcctgcggctgcttgaacgggttgtgtcgagcgagcgggagcatgtgcagtgttgggtgacgctggcgccggataccggtcagagtgcgttgttcctgcattcgccgaatcctcagggaaccccatggccgcatccgttcgatggcgtgatctgggacatcgttccgcctgactggcttgcgccgttgctctcttcagccggcctgcagccaggacgttggggaagcggagagagacagcggttgttggtgcgcgcgcggccttga

SEQ ID NO: 500645 - DNA, 219 bp, Stenotrophomonas maltophilia
atgcataacgagagcccactgcagacctgtagagccgagccatgctcggctgacgaaaagcagccgagcatggctcggctctacaacagcccgggcgacgccccggaaaacggcatcgaacagcagcgccagcgtgcccggcggacggcgatgtgggtcggcgccatcgcggtgctggtctacgtcggcttcatcctcagcggggtgatcggccgatga

SEQ ID NO: 500646 - DNA, 1209 bp, Stenotrophomonas maltophilia
atgagccataaatcattggacttgtttgcaggtgcgggtggcctgtccgaggggctgcgcgaagcagggttcacgtcgctttatgccaacgagatttcgccccgctacgcacagacttacgcgatgaaccatccaaagacgcaggtggacagtcgcgacatccgacaggtcgatgcgcggaagatccgcaacctcctcggcctgaagcggggtgagcttgacttggtggctggtggcccgccatgtcaggggttctcgatcaacgcgccgaagcgttcaacagcggatttgcgcaatcatctgttccgggaatacctgcgcttcgtcgccgaatttcagccgcgtacggtcatgattgagaacgtgccgggcatggtgtcgttcgagggtggggcgacgttggacgcgatccttgaatcgctgaaacagctcggctacgacgcggacgtgcgcatcctatatgcgccccattacggcatcccccaaacccgatggcgcacgatcattcttggcgggcgagatggcctgaaccccgaggcacttttccctgagccgctgcgcagcgcgccagtccgggtgaacttcactgcgcagtttggtggtcgaagcctggtcacactgccgcgttcactggaactgccgtcgcatgtcacggtgcgcgacgccatcggcgatttgcccgctctcagcaatggcgaactcggcgcggctgagaagtcgtatgggagcgcacccagcaattcgtatcagcaattgatgcgcgttggatcgactggcgtgacctgccatgaggcgccgaggctaagcaaaatcaacatggatcggttggcttttatcccgcccggcggaaactggacagacattcccgaagcactgttgccgcagggaatgcgcatggcacggcgcagtgaccataccaagcgttacgggcgcgtcgatcctgacggcttggcatcaaccatcttgacgaagtgtgacccgcattggggcgcttacttccactacgatcaagatcgagcttttacggtgcgcgaggccgcgcgcatccagtcattccctgattcatacaagttctgtggctcgcgcgtagaacagtacgaacaggtcggcaatgctgttccacccttgttgggcgcggccgtgggccgagccatcgtccgcgcacttgaacgcgatcgcaagccccgtcgcaaagtcggtgcagcctaa

SEQ ID NO: 500647 - DNA, 918 bp, Stenotrophomonas maltophilia
atggcgggaaagatatgggagttcttcggctatcgcgctgatgaccactcgccagccgccgtgcaggccgcagatgcgaggcggtgtccattcctggatgatatttgcgaaaagcgtctgagtgatggggaaatagcgggtgtctgcacgatcaagccggtaaagtctgagccggtgatctgctgcccgatccgcctatacgccggcgattacagagttctgtccgacgtggcgcgcatagcgttcggcggcgatcttccgctgattgcaggcgccggtgctgcccaggtcgcacagcgccacaaccaaccggtggtcgcagcattcggcaaacgctggagcggcgagttgcgcctgccccagaaggacggcatgggaagttacttcgtcgattgggttctggccctgctcgatgcggatggtgcgttgcaagagtttatagccgttgaagttcagaccatcgacaccactggcaactaccgcaacggacgccagggtctgttgaccccgcaacgaacgaatccggcgacgtcggcaggcctaaactgggaaaacgttaacaagcgtatcttgccgcagttgatctacaaggggcaggtcttgcagcgagaggaactttgccgcaagggtttgttctttgtttctcccgtaccggtttatcagcggatcatgggtcgactcggtggtgctgccggcttggtgcggtatgcgctgcaaccggcctcgattactttcctcgcctacgagcacgacgtatcgctgaatccgcccgatggtgcacttgttcctctacgtgtgttgccgccgcactcaacgacggtctacaaggtgcaggaggcgttcaataacgtgacgctgcccgatgagaatgtctatcgggacgcgatcattgcggccctaagcggccagcgccgatag

SEQ ID NO: 500648 - DNA, 216 bp, Stenotrophomonas maltophilia
atgaccaggatcgaccccgcatggctggaagccttcgacaaggagctcctccgcctgttcgccatcgaccatcgcgatgccggcatggatgaatacctgctgggctgctacacagaccttccgccgcgtgaggctgccctggcgttcggcagcgactacgacctggagcgcgacgatgcgctgtggcctcggccgggcgtggcgctgcgaagttaa

SEQ ID NO: 500649 - DNA, 645 bp, Stenotrophomonas maltophilia
atggaagcatcgaagtcgaaccagcctgttcctggcgagtacttcctcctgatgcctgataccacgcgtgggggaaaggggcacggcgttgtgttcgagaacgcgaagcggctgcgcatcccgccgcgcctgatcctgcgacccgaagagggcggctttccgcccatggcggagaagccgttgctcgtctactcggcaaagaaggggagcctcccagaggatctggaggggggcatgagcgggtactggatggtctccgaacgattacgtggtgctcttgtgtctgtagatccggctggcttcgagtttgtagagtgtgactaccgccttgccgatggatccaaggggccgcggtacttcctgtgtgatgtaacccgtgagctcgatgcggtggacgaagaagcctcgaaacttcggaccatcactgacgcaggctatcgaggtgggaagttctacgaccttaggggcggagccagtctggcgttccgcaagcaggtcatcggtcaagccagaatattccgcacgccttactcgggaaacctcgtcttctgcgacagagagctccgcgacgctgtgtggaacgctggaatcggtgggccgcgcgtatcgcggggcctctggttcaccgacgcgaccagcatctga

SEQ ID NO: 500650 - DNA, 642 bp, Stenotrophomonas maltophilia
atgggatcgacttccacccaccagccgcgcaagggcgagttcttcaagctacgaccggatgctacccgtggagggaagggtcacggggtggtctttgaaaacgaggacgcgttgcttgcgactcccaggctgatcctcttacccgaggccggtggcttccctccactgcgtgaaaccccgcgcttggtctatcgggagcggcagggtgtccctctacaggatctggaaggcgggttgagcggctactggctggtctccgagcgtttgcgccaggtcatggaagagattgaccctgacgcgttcgttttcgctgagaccgactaccgcttggaagacggttcaaagggaccaacctacttcctttgcgacgtggtccgcacgctggatgccttggatgaggaagcctcccagctcaaaatcgtgatcagcgatgagtacaaggtagggaaatactaccgcctgaccggtgatgtccggctggcgttcaaacgcgaagtgctgggttcggctcacgtgttcagattgccgttccatgttggggtattctgcgaccgaacgttcaaagatgcggtagaagctgccggcatcgtcacggccaagagatccaacgggctctggtttgaagatgtggtgaactgctga

SEQ ID NO: 500651 - DNA, 411 bp, Stenotrophomonas maltophilia
atgagtggctactggttggtatcagagcgcctcaagatggccttcaccgatatagatcccgttgcctttgagttcgtggagtgtgattacgtgcttccgaacggcgcagagggcccaacgtactacctgtgcgaggttgctcgcgagctggatgccgtcgatgaggaagcatcgaagttccgggtcatcgtcgatgagggctatccgggcggaaagttctacgaccttcgtggcggagcaagcttggcattcaagagggatgtaatcgggcgcagtcatgtcttcaggagcccgtactccggcgatcttgtctactgcgatcgcatgttccgggatgccatacgcgctgcaggaattggaagtgagtgtgaaatgcgtggcctgaggttcaaggacgcagccaatgtctga

SEQ ID NO: 500652 - DNA, 630 bp, Stenotrophomonas maltophilia
atgaatagagttgcgccccctaaaggtcgcttctacgtgcttagccccgatatgggtgcgcctggtcgtggtcatggggtcgaattggacaatgaagaggaaatcccttggccgacctacatgagcgagccttctgaggtgggcgggcttgcatcactcagggttgttcccaagcttcgcttcgatagccaagtgggtgatatgcctttggatctgcaaggcggattcaacggctattggctgatttctcaacccctgaaggatgtaatggagaacaccgatgccgaaggctttgcctttgcgaagtgtgcctttcagctcgaggacggttcagaaggtgagcctcactacttgtgtgaggtgataagaattctggacgcgattgacgagaatgcatcgagcgtgaaagttctagatggctaccagaacggcaagtactacagcctctccggtggcggcaagttgtccttcaaagaagcggaagtggctgatgcgcatgtattcatggatatccattcgggcagccgtgtctacggtgacagagtgcttcgcgacgcgctcatcgagcatggatttggaacggtgatcaatccgcgcggcgtgtggattgaagacgctgcaggctactag

SEQ ID NO: 500653 - DNA, 642 bp, Stenotrophomonas maltophilia
atggaacctatggcaatcaatggacctgaatcgggaagattcttcctgtttgcgccggacttggaaagcaatcgtcctttcagaggagcgatcttcgagaacgttcaggcgctgctgtcgccaccgcggataatcctcaggccagagaacggtggatttcccgagctccgggagaagccccgaattgtgttcgatgcttctcaggggcctgcgccgcgggatctggagggtggcttcagtgggtactggctggtctcggagcgacttcagagcgtaatgaacgcgttggatccaggcgccttcgcattcgccgaatgtgatgttcgctttgcagatggcgcggaggggccacgccactttctgtgtgacgtagtgagagagctggacgcagtggacgaggatcgttcacggctggatatcgagattgacgatgacttcgtcaatggcaagttctactcgattgcaggcggagccagcttggccttcaagaacgatgcactggcaggagcgcatgtcttcctcacaccgttcagcacgttcgtgatcgctgatcgtaggtttgtggatgctgtgcatgctgctggagtgccggatgatccggaactgagtggaatatcttttattgatgcatcagatatctga

SEQ ID NO: 500654 - DNA, 3348 bp, Stenotrophomonas maltophilia
atgcctcgagttgttcccatttttcagcaacatcacgccatcgagcaacagacgcttggcaatagtcgcttgctcaaggctctggctgatgcgggtcgcttcaacatcgatgccgatcagaacctgatcaatatgccccacgataaggcgctcgcgcaggccttgggggtgtcacctcacaacggcggcccgattcgtgagtatcgaatcggattggaggccaatctcgcccgcctcgagcgaagccgggatggccaagcagcgctggctggcgacctggaggcaatggatcgcatcgctgccaaagttcatcggttgagcgacatttcacaggtcggcttggtcaacggagacctgcggacgaacactgctttaggacaaagcaccgatcaggcacgtgcccagacgagggagttctacaggaggcccgaggaatacgccgagcagtactctggacagttggagcaccaccagcagtcttccgttctttccaggcaatggagcgccgtcacacccaacgagagccgcgttgtatacacgctccagcactttcaaggatccggacagccgctgatacgtggcggcaacatcgagctgcagcgtaacggattgtcgaatgctatcgctgatgcccatcacgccgggcgtctccaaatttccccgggcggcgttcttgtagttgagtctgttcttggtgaagaggccgcgtcacgccttcgtgctccggtcgggcaacgcggcggagttacattggacctcctcctcggcgaagcctccaccagccaactgatccgctccggcggcctgctcgcctccggcgccgacgccgtcatcaccgcccgccgcacctcgcagttgctggaagagggcaacggcaccgccgctcagtccgagctcacccacgccctggcgcgcaacggcggtggctggatcggtggcatggccaccgcatcggtgattggcacctccagcttcgtccctgcggccatcgtcgcgggcgatgcgctgctgatgagcaaggcgttcgacaagggcgccgatctgctcgacaaccgcgccgtctaccggcagaccgacaaggccgatgtcacatggcagttcgatggccgcaactggcagcgccaggcggtcatggacagcgcgggcgacggcctgggcaatccggctgagcgcagcgtgggtgccagttacgagaaggcccgcgagctgggcgcatacgcccatgtaaaagcggtagagctggcgctgggcaaggcaccgccgccgcaggatcctttcagtattccggcgaaggacggcgagggccgtctggacaatcccaactggcaccgcgatgcgcagaccgaacagtggacgcggcaggtcaagattggcgtgtccggtgccaacgaccggggtgtgtacgagacgcagatcgccagccccgaacgcgccaacgagttgaatcgcgaggcggtgcagcgcatcgagaacaacatcgccaacggcaaggccgccattgccgccagctatttagagacccgtgctgccacacgagccagtgatttcgtgccgctggtgccggaagcggtggagcaggcccgtgccaggcccgacgccatccagggctcggacaaccagctctaccagcgcgatgaagcagggcaatggcaccacgctggccagatcgcgcaggggaacatggcgctggaattggagctgacccgcaccatccagcagccgtcgctcgatcagttcaatcagacgattgccgcattggacgcgcgaccgttgccatctgcggcggaagtgaaccagaacgagctgcgccacagctactacgctgcgggcgttgcactgaccccggcgtgggagcaggccattgccctggccacggcacgcacgcgcgagcagcacggcattacgggtcccacgctgcaggaactggggcctgtagccgagggcaacgcgggcgcgtcccggcccatcacccattaccaggtgggtcaggatggcgtggcgcgtgccgtcgcgaccaccagcacgcaggagctgcaggccgcatggaatgaggtgcgcgcgcgtgccaatgagcaggcgccgttgcccgactcgcccgagctgcgcattgctgcgctgtcggcgggtgagcaggaggcgtaccggcaggcactgcaggaagccaatcggctgggtgctgcgcaggtggatgcagggcaggctgcacgagtagccgcgcaggtggcacatggcgacaagccatccgagcaggatgggagcgtggaagtgcggcctgaagagccggcgactgcgcaacccatcgcgcctgcggcggttgcggcagcgccgcccgcgataggggtcacgccaccgcctacgcccgcccctcaggacaagcccacgcctcagcggcacgccgagcagcgcgatccgccgcggcgtgaggcggagccccaacctcagccccatccaaacagcgaggcgcccaccgaaaaccgtaccgcctcacagacgccagagcccgctgggccgatgcaggcgcacccggccgcacctgagcgcgcgacgccacatgccgccccgcctctggatgcggcaacgcagatgatgcccacgcagcgcacagagcaggctgcggaaccggagaagatggccccggtgcctgcggttgcgcccactccaaagcaggacatggcagtgcaggaggtcgagccggtgccgttcaaggagccgctgcctgctgagcctgcgcgcgattcatggcctttggagcaggaagcggcacaacacgtgccagagtccgaaccggctttatcggatgacctccagcctgtcactgcggctgtcactgttcctgccgagcccaccatagcgccaagccctgaaccgaccgcgcccgcatcggatgaggcatcgggcccgaacagggcgctgcaggaccccacgcagcccggccaccccgatcacgcgctgtatcagcagatccgcgagggcgtggaagcgctggacgccaagcacggccgcagcttcgatgaagtcagcgaacgcatgacggccagctttctggtactggccaaggacaacgacctggaccgggtggaccatgttctagtgagcaacgccacgcgtgaacacccggctgggcacacgctgttcgtggtgcagggcgagcccagcaatccggcgcatcagcgcgctgcgatgccgactgagctggcggcgcagacatcggtggaggaatcactgcagcagttcgatgcggtcagccgtgaagcgcatcagcgtgcgcttgtgaatcagatggaccagcagctggaagaccagcgggtgcagcacgacatccagattcgtgcggcgagcgggggatga

SEQ ID NO: 500655 - DNA, 639 bp, Stenotrophomonas maltophilia
atgacgccacatggaatgcgccggatatgcatgctcgcagcactactcgttcttctggctaccgcgtgccggcccgatgcggctcgcgacgaaggctcgatagcagaggcccatcgtccggatctggtgccgcttgtgcgagccatgcccacctcgtcaatggatgcaccattgacggtcgagttcgatgtggctgctcccagcaaaaattcctctccaacgctcatgatcggcattcgcgttgaccgcacggataacaccgcggcgttttgggcactggccgatgttcgggcgtccgggttccaggcgaaggtttccatgcagcgcctggaatcgagtggatggaaggacgtgccgttgctccggttggaatcgatcattggggagcctgccagggcgattcccatccccgccgatggtcgagtgacaaatgcgtggctggacgatgttgacgtgctggcgctgcagaatgctgggctggaacgacccgatgataactatgcacagctggccttcgcatgggcacgcaatccgtcgccgggccgataccgggttgaagtgcaactgcactcccctctgccacagcttgagccgtaccagccggaactgctggttgcttacttgcgcaggcctaaataa

SEQ ID NO: 500656 - DNA, 501 bp, Stenotrophomonas maltophilia
atgccgctagcattcgagcgtcaacctggctctgcagtcgatcgtcaacgtggcgttaccatcaccgcgccacgggtcctgcctgcgagccccccagaagatccgagccatacggagtatcagtatctgctctatctcaatggccagagggtcgatggactcgggctatttgggaccgagcagttgattgaaactcagaatggccccgaacgcgttttcactctcgaccttggccgcgactgggtcctgaagtccatccttggcttcaagcggaagttgaacaactcagatgacgacctcgccttcctgcactccctctcgcggggtctggtgctggcgaacatggatcacagcagcacgagatatgccgtgcgatacgtggccgtcacaacaaatgaggcacttgcccgcaacggtatcgtcacgaaggacttgccccccccccatggcgatgtgcgcgttgttctagccgacgcgttcaatccagttcgtgcggaatga

SEQ ID NO: 500657 - DNA, 723 bp, Stenotrophomonas maltophilia
atggcacggttgtttgaatgcgaattttccttggtgttcccgatggtgatgctgtacctgatcatacgaacgctgctgcccctgctggcattcgtgctcgcgtggtggctgctcgcgcgcctgatcgacgcgcgcgtcgcccggctgccacgcgtcccgttgaacctgccggcgcacagcagcagcccgcgcaggaaggatcggcgcatctacgcgcgcaagctgcggcgcaagccggggctgcgcacggcgacccgcgccgccgccgcgccgcgcagttggcgcctcgccgcagctgtcctgtcgataggcgtgctggccgccactgtggtcgccatccccgatggcgcgcgcttccaagtgatggtgggcaatgtcacgggctacccgggaacaatcatcgaggtgcgggttcccgcagcagcacagcctgtcgtgctgcaggcatggcgccccgtactggcacacctgggaaggcccgtagcgatgcgctatccgatcgctcgcaccggcggcgagcatgaagcccatgcggtcgtacccgtgcaggtacggctgcagggtgatcgcctgcaggtggccatcgcgctgccggtggacagcgacgttctgcgtgccgaactggcgcgacaggcaggattgccggtcgaggcgatcaacgtgcggcggcgcgacgtagcgccatggcgggagtcgggctggcggccactgcccggcccgtag

SEQ ID NO: 500658 - DNA, 969 bp, Stenotrophomonas maltophilia
atgcgcttgttgctgcgtgcgttgccgttgttgctgtgttcgctggccgtacacgccgccgaggtggaccgtcgtatcgcggtgaccatcgatgatctgccatgggcacggctggaccagatcgtgccgccggatctgcaggcccggcacgaagcgttgatggcccagctgcgcgaggccggcgtgccggtggtgggcttcgtcaacgagaacaagcttgaggtgaatggacaggtgcagccggcgcgggtgcagatgctgcgcgactggcgcgatgcgggctatgtgctgggcaaccacacgtactcgcacatggatctgaatgcgaagggcgtggcggcgttccaacaggatttcctgcgcggcgagacggtgctgcggccgctgctggccgagaagggacaggcgccacagtggatgcgccacccctacctgcgcgccgggcgcactacggatgagcgcatgcagatggacgcgttcttcaagcagcatggctaccgcgtggcgccggtgacggtggacaacggggaatgggtgtgggcgttcgcctatgccaacgtgatgaacgagcaggcggattcgcctgcacgcgaagcgacgctggcgcagctgcgcaagggctacgtgccgtacatgctgaacaagctggactactacgagaagcagtcgcaggcgctgctggggtacgcgctgccgcaggtgtggctgatgcacgccaatgagctcaacgcggcgacctttgccgaactggtggcggccacgaagcgccgcggctatcgcttcatttcactggacgaagcgatgcgtgatccagcgtatgcgcggggtgcggaaggctacaacggccgctatggcccgagctggctgcatcgctgggcgatggcggagaacaagccgaaggacttctacgccggcgaacccgaggtgccggcgtgggtgatgaagctggccaaggtcgactcggagtga

SEQ ID NO: 500659 - DNA, 348 bp, Stenotrophomonas maltophilia
atgacattcagtcttggatattggaacatgctgcccctcctgctgatggccggtgcaatacagtctcagggggcctatgacgaagtccggcagctgcccgatggccagaccctgatcatgcgcatcctggactgggatctcggtgatggtcgccatgagcgcgttaccgtgcattggctgctgcaggaggacggccgcatgcgctacgacttcgatcggcagccaccgcaaacccaggaggtccatcgccaatcgtgcgcgcggcagggcatgcagccgtcgcgtggcgtcggcatgatcgcgggggaagggaccgcgcacggctatagctgcaccagccagcggtag

SEQ ID NO: 500660 - DNA, 669 bp, Stenotrophomonas maltophilia
atgaagttgaagcaattcgcctttttgatagcggcctttctgcccgcgaccgcgattggcgctagcgagcgcctaagcatagatgtcgtagtcgcgaatccagacggaagtgtcagcgtagataggacaagcagctggccagacttcaatggcggcatcgtggacgtgacacagcgcctgaaacaagatgattttgggagactcagctatcgctatgaagaccagagtagagccactcagctctatcaccaagcctattgcgagtcgatggaaatgacaccctcaagcgggaccatgacgttgtcgggtccctccaccggctggtcttgctacagcgatgatcccgcgccccctgccgaccctgtgaacagtattgattgggcaacggcgactgcaccaagtggtcgggtacccgttggtcagaatatctttcccattgggagcgggagttgggagagctctattggcggcatgagacgttcaaccctcagcgtggacaatggacgctgtattgcacaggaaatcgaccactacgctgggccgttcagaggcagaacccagtttggcgtcaattgctatttttcgcagtccaagtttgcaaacaccatgatggagacctgcatccccaagcaatgtgccaccaatagagggacgatcttcgctcaatag

SEQ ID NO: 500661 - DNA, 1005 bp, Stenotrophomonas maltophilia
atgctcccctggatcctggccctgctgtcggccctgcttagctgttccctggccgttgtctatctgtggtgggtcaagcggcggcagaaggagatgcaactcggcctgcaggccctggcgggcatgcattggcgcgaattctcggttctggtcaagcgcatgctgcgcgaacagcgcggcctgcgtgagctgatcgatccggcggaagaagcccgcgagccaagcagcgatttcatgctcagcgatggccccaaccactggctggtgtcgtgcaagcatggcctggcctaccgcatcggcaccgccgcggtgaacgagctgggtgcggccgcgcgcctggccggggccaagggcggcgtgctgctgaccgaaggccgcatcgagcgcgacggccgcagcgccgccgagaagcaggcggttgaagtgctggacggcccgcgcctgtggccgttgctgcagccttacctgcccggcgacatcgaagcgcgcgtgcgcgccagcgcccgccacgaagcgctgcgccgcatcgccatcgccgcactgggttcggcaacgctggggctgctggttggcctgggcctgcagggcctgcgtgtggaagaggccgcgccggttgctgcggcaccggtggtggcgacgccttcaaccgcgcctgcggcggaacctgctggcaccgcggcagtgctcccggccgccccttcacccgcggctgccgtcgccccggcggccgacgcgcgcagcaatcccaatccggatgcggccacgctggagcgcttccaggccgatctggcccgcgccctggccggcaagcccggcatcgccagcggtgtctggctgacccggcagacgctggcgatcaaccgcaccggcgaactggaaaaggtctggccgcaggtctgtgaggaagtgctgcactaccccgccctgcgcaacgtgcgcatccagctcaacgcccggcccggcgtggatgagccggtacgctggcggcagtgcgctacgtattga

SEQ ID NO: 500662 - DNA, 1437 bp, Stenotrophomonas maltophilia
atgttccgcacgctcgctgcctcattgctctgcacgctattggtgattccgcctgtttcggcacgtggcgctcccagcactctctctgctcagctcgacacccaactgcaggccaaccgcgagcgctacggcattgccggccaggcggtgctggtcgcacacaacggtcaggtgctctaccagggcgccagcggcgagcgtgacccggcctcccacgcacctgccaccgtcgattccatcttcgccgcacagtcgatggccaagctgctgaccagcacactggtgatgcaactggtcgatcagagcaaggtggatctggatgcaccggccagccgctatgtgccgggcctgcctgcagcatggcaggcaatccacgtgcgtgatttcctcaaccacagctccggcatcggcgagtactacgaccgggtggataaccgctgggtgagcacgggctaccccggtgtagcgcctgaccttggcactgcgctgaaggtggccggcgctgcaccgatgcagttcgccaccggcagccgcgtgcagtacacccaggccaactacctggtgctgacggcgttgctggaagcgcactaccgcaagccctacccggccatcgcgcgcgaacgcatcctgcagccattgaagatggccagcacctcgtggggcgttgccagcgtgccggcccggcgcgcggcggtgccgtacatcggcaaggatggccaactgcagccggccaatgaagatgcctggccggactacggctggggccatgccgatctgcagaccaccgtgggcgacatgaaccgtttcctgcaggcgctggcgaccggcaagctggtgcgcacggggaccctggaaaaactctggcagccgcagaagctgagcggtggcggcagcaacttcttctccaccggctgggacaccacccgcagcgacggccacacccaggtcggccacgatgggggcacccgtgttagggcacggctggcctacaagggcacgctggccgacggctactgggtgttcgtgtacctgaccaacggcagcgcccgcaatgtctggtccagcacgctggtggagagcacgatggcggtcgcggcgccgcaggcgtttccgcacgcggtgctgtccgagcggctggtcgcgtatgcgctggatgatgatgcaggcgctgcccaggcgatacgcagttggttgcgcgataacaaccgggtgacgggcagcgagctggaacgagcgatcaacgccagcggctatgccatccaccagagccttggtgcacgcagggcgttgaaggtattcgccctcaataccgagctgtatccggattcggccaatgtgtgggacagcctggccgagtgtcatgcggcattgggcgaaagggaagcggctgatcggctgtatgcaaaggccaaagcgctggccaagccctcgccgtaa

SEQ ID NO: 500663 - DNA, 780 bp, Stenotrophomonas maltophilia
atgaagcgctcgcgccatttttcacgcagcccactgacattgccgatgaaccgcggcagcgaagtcgtgcgtgcgcgcaggcacttgcagcagcgcggttggccacgcctgcagatggcactgatcgtcgccctgaccggtgcggccggtttccttgcctcgcacctgctgcgcctggccggtatcgacgcgatgtggtttcgctacccgatggccgtcgtgctggcctacggcgtgttcctgctgctgatgtggatctggatccgctggcgttgggacaacgtactggatggcctgtcgccggatgtgggcggtggcagcccatcccctcgcggcagtgccgtggaatcaccgtggagcggcgccggcggccgttccggcggtggcggtgcgtcggcctcgtggaacgagccggcatcggtgagcagtggcgacgccggagagctgccgttggccgggctcgctgaagacgaagcgggcttgccgttgctggccatcctcggcatcgtcgcgctggtggcgaccgtcctgctggccagcgtgtgggtggtgtggtcggcgccggtgctgatggccgaactgctggtggacgcggcgatcgccggcggcctgtaccggcgcatgcagggcatgcacgagcagggatggtggcgggtatgcgtgtcgcacacggcctggccgctgatcggcctgttgctgttcttcgcggtactgggctggcttgctcaggaactcgagccaggtgcgagccatctgctgcaggtcatccaggggctgtaa

SEQ ID NO: 500664 - DNA, 384 bp, Stenotrophomonas maltophilia
atggacgaattgcaccatcgtcagttgatcgagcactacctgcaggcctacaaccgcttcgatatcgacgccatgctggccgtgctggcgcacaacgtacgcttcgagaatcacagtggcggccagttgacgatggtcaccgaaggcgtcgatgcctttggcgaactggcacgccaatctgcgcgcctgttccgcgagcgcgaacagcgcttgctggcgctggtgctcgatggtgatcgggcgacggcgacgattggctggcgcggcgtgttcgcgcaggatgttcccgatggaccgcgtgcgggcactgagctggaactgcagggccagagcgagttcgtgttcgcgggtggccgcatcgaacggatcattgatcgcagctga

SEQ ID NO: 500665 - DNA, 321 bp, Stenotrophomonas maltophilia
atgaagtccaaacgtgttgtcgcagtgttggcgctggtgatgacgccgagcctgcatggccaatcactcccctccgaactggcgcagttgggcattgtcgccggcatgccttatgccaaggccaagcgcctcatggatgcggcagggtggcaggtgagtccggtccagggcgcgcctgagtcactcgagggctttccggaagtcggatgccaaaaaggcgccaagcaatgcgccacgaccttcgagaaggaaggtcagcagatcgcggtgcggctgggcgttaccctggcagggcagccgttcgtgcagggcgtggactga

SEQ ID NO: 500666 - DNA, 531 bp, Stenotrophomonas maltophilia
atgtacgcggtgcgcagcgagccggacgcgctttccgcggtcctcgactcggcccgcaatgcgctggccgcgcgcgaagcgaaccggatgctgccccgggtccagcgcttcagcgaactgcgtgcggaatacttccggcgtgaccagactatggcgatcatcttcctgtgcgccggcatctcgctgttgatcgtgaccggcacgggcgtgtatgggctggccagcttctgggtccgcaagcgctatccgcagatcggcatacgacgtgcgctgggtgcccgcaggcgcgatgtgaccagctacttcatgatcgagaatctgatgctgaccttcgtcggcgcgctcgctggcagtgtgctggcattggcgttgaatgtctgggtttcgcgctactacgaggtacctcgcatcgatcccgagtacctggtgctgggcgtcgggctggtgttcaccctggggcagctggctgcctgggtaccggcgcggcgggcggcgcgcgaggcgcccgtggcggttctcaacagtacctga

SEQ ID NO: 500667 - DNA, 1833 bp, Stenotrophomonas maltophilia
atgcatcgcaatgggatgcgcgccatcacttttgtcatcgcgacgctgttggccgggatgacacacggagtggaagcgcaagctctgcgggcagatgaccgcagctactttggcagcgcctcccaggaacgtgaggcgtggcagaacctcgagcggaggacccatgccctcaaggcacttcatgcgccgccagacgtgaggttccagcaggccgaacagctgtatggcgagtgcctccgccaccatggctacctgcatcttcaggcagcgcgcaatgccgatgatgcccggtgggccaacacccagggcgaagtcgccagcacatgtggacgcatcgcggcgattgccaagcaggcattgcgtgatgcgcccgcgcacgctgcctggatcgcgccgcatgccgacctgcgtgaacgggctttgcgggaggatgtgcagccggccaatgcagcgctggtggatgcggtcgacacgttggctgacccggcgctggacagcttcgggcgcctgcaccggcagctgttgcagtcggcgccctttgcccgcttcgaacatgaaggccgcacgctcgacagccgcaccgacgcgcgagccctttcccgcctgccggaccgttcactgcgcgaagcggcatggcgtgcctactggcagggaatggcgtcgcggcgcagcgaaatggcaacggtgctgctgggcctggtccgcctcaacgagcatgcgtcggaactgcagggcgatggaactgcgcctgaccgcagctaccggcacatgggcctggatcaggccgccgtcgacgcgacactggcggcggtagcgcgccacgcgctgctgcggcggaactaccagcagatgcagttgacccatcttgagcgcatgggccaggcgtctccacagatctgggacatggacctgcctgatgcgggctatattcctccgccgcttgacctggcgcagttgcgtgatgcggcggcagcatcaatgcaggtgctggggccgcattacgtgacagggctgcgcgggctgctcgatcctgcgggcggacgcatggatctgggcggatcggcagggcggcgcgcgatggatgcgttttcgatcagcgcccccggtgtgccttcgttgctgttcgttggccatcgccagggcgatctggagggggatgtccagatcgctcacgaagccggccatgccatgcatggccagtggatgcagcgcggcggcgcatcatcattccagcgcaacggcaacaagtggttgaccgaggccttcgccatctacaacgaactgaagttccgcgatcagctctaccggcaggccagtgatccacgtgccaaggcgtattacctgaagtcgttgctcgatgacatcatcctgcagctgttcgtctcgtctgaagaggccgatctggaacagtccatctatcaggaagtggccgccgatggggttggcaatgcagacgcgcttgatgcgctgacgatgaaggtactgggccggtatgggggcgcatcggagcagtatcccgagctgcgcagcacctgggtatccaagcggctgatgtatgaggatccgctttacctggccaattacctgtatgccggactgattgcggtgcagctcttcgcccaggaccagcaggatccggagggattcagggagcgctacctggccgtcctgggcgaggggtttgatcgcccaccgcagcagcaggtcgagcagttgctgaatgcgaagcccgactggtcacgcctggtcgagcaagatctgggcgttttccagcagtacctggtgcggctgcaggggctgcacgcggaaatcgagcgcaagcgcggtcgctga

SEQ ID NO: 500668 - DNA, 2463 bp, Stenotrophomonas maltophilia
atgctgatccgtcgaacctctctggcggcggccgttgccgttgccaccgtcggcctgctggccgctggcccggccttcgctgattacgcgaagccgccggagcacctgctcaaggtgttgaaggcaccgccgccaccggcaccgaacgtggccccgggtggccagcgcctgctgctgaccactgcgcagacctacccgtcgatcagccgtgtcgctcagccgtacctgaagctggctggcgtgcgcctggaaccgaagaaccgcagccggcacgacacccccggtggctacggcattccggcctgcgtggccgacttcaccctggtcgatatcggcagcggcaaggagaccaaggtcaacctgccgcagggctgcgccaccggcgcgctgtggtcggccgatggcagccactttgcgttccagaacgcggtcgataccagcgtgcagctgtgggtaggcgatgccgctaccggccaggtgaagcaggtgccgaacgtccagctgaacccgatcttcggctacaccgtgcagtggctgggcggcagccggaacctgctggtgaagctggttccggccaaccagggcccggcgccgtccaatggtggcgtgccgaccggcccggatgcgcaggagtcgctgggcagcagcggcgagagcagcacctacgaagcccgcgacacgctgaccagcgtgcatgacgaaaagctgttcgcctactacggcgcctcgcagctggccgtggtcgataccgccgccaacagcgtgcgtccggtcgggcagccggcgctgttcaacgaagtcagcgccgcgcccgatggcgtgcacgtgctgaccgaatcgatcaaggcgccgtactcgcatgcggtgacctaccagcgcttcgccaacgacgttgccgtgctggatatcgccagcggcaagtccacgccgatcgccagcctgccgctggccgaccgcgtgccggtgcacggcgtaccggaaggcccgcgcggtttcgactggcgtgccaccgatccggctaccctggtctatgccgaagcgctggacaagggcgactggaaggtcagcgtgccgcatcgcgatcgggtactgatgctgaaggcgccgttcaacggcaagccggtcgagatcacccgcactgcacaacgcttcgaaggcttcgcatggactgccgatccggccgtggcgttccagttcgagaacgacgagaaccgccactggatgcagacccgcatcgtcgatgtggaccagccgaagaaggaaggccgcctgctgtgggacatgtccagcgatgagctgtacggcaaccccggcaacctggtcttcacccgcctgccgaatggtgcgcaggtcgtgcgccgtgagggcaaccatgttttcctcagcggccgtggtgcctcgccgcagggcgaccgtccgttcctcgaccgcctcgacctcggcacgctgaagagcgagcgcctgttccgcagcagcgccgatgcctacgagcagttccttggtttcagcaatacgcctgggcgctacctgacctggcaccagtcggtgatcgatccgccgaacgccttcatccgtcagcagggtgaggcggtggccgatgcgaagaccggcgaggcgcagttcgcgtccaccgcgaccgcgctgaccaagctggtcgacccgactccggaagtgcgccagatcaagaagcagctggtgacctacaagcgtgccgatggcgtggacctgtcgttcaccctgtacacgccgccgggctacaaggaaggccagcgcgtgccggcgatcctgtacgcctacccggccgacttcgccaacgccgcgcaggcggggcaggtgtccggttcgcagcagaccttcacccgcctgcagccgtaccgcctgatgctgctggccggctacgcgatcatcgacaacgcctcgttcccgatcgtgggcgatccgaagaacgcctacgacacctacctggaacagctggaagccgacgccaaggcagcggtggacaaggcggtggacatgggcgtggtcgatcgcaaccgcatcggcgtgaccggccacagccatggcggcctgatgaccgccaacctgatcgcccataccaatctgttcaaggctggcgtggcgaccagcggttcgtacaacaagacctttaccccgttcggcttccagaacgagcgtcgctcggtgtggcaggcgcaggacgtgtacctgaaggcctctccgttcttctatgccgacaagatcaagctgccgctgctgctggtccacggcgaggacgacgccaacccgggcactgagccgttccagtcgcgcaagctctaccaggcgatccgaggcaacggcggcatcacgcggctggtgatgctgccgaacgaaccgcactggtacaccgcgctggaatcgaacgagcagctggtggcggaaatgctgaactggttcgacacctacgtgaagaacgccaagtaa

SEQ ID NO: 500669 - DNA, 285 bp, Stenotrophomonas maltophilia
atgagcgaaggctatggaaaaggtggggtgtgcttcggcctgacccgggaccagtcggtcgagatgatcgtgcgtacctgcatcgacaacggcattaccgaccatcggcagattgcctatgtgctgaccacagcgcagcacgaatcgcgtgatttcgccgcgcccgaggaagcggtgcggtaccagatcggcatgggcgtggaatcgctgccgcatgagcggagcgaatggcatcgcatcgaggcgttcaccgtcacggtcgaggtgttgcggcagcgtccctag

SEQ ID NO: 500670 - DNA, 426 bp, Stenotrophomonas maltophilia
gtgacccgtggcgggcgcaacgtggcggtcacggacgtgcagccgcgcctgacccgcgctggcgccgatgcccagggtgcggcggccgtgctgctgaccgtttcggatttcaatggcgatggcgtgccggacctgcaggtgtggcaggacaacaacggtgtctacaacgttccggtgcatgcgttctacctgttcgacgccaagttcaaccgctatgtgcgtgccaaggcattggaagcggccatcggcgggcgcgacatcgaccatatcgacaatgggcggtttgtgctgcgcgcgaaggtcagcccgtgcgcgcgcgaggacaaggtcatccagctgcgcggaaccgggccacgcacgctgctgcagcgccgctatgacacctgcaggggcgaggcccctaccgaatcggacctgctgaagtag

SEQ ID NO: 500671 - DNA, 1857 bp, Stenotrophomonas maltophilia
atggtgaaagcgaatggtggccttccatatgagagagagttcatgaagatcagacatattgcggttgcccttgcggccttgctgcccgccggcactgccctcgcgcagtcaggctacgcccatctgacccccaagaagatcgggtacaacgagaacttgcctgacaggtatgcggtcctggatttttcggtcaccgcttctgactggatggaccgggtccgcctgccgtccatccagcgccatcacgacagcatgcagatcaacatcgtgagtgtaggcgcgcggggcgactaccttgaaatcaagggaaagttcgctcacctgcctgacgccgtggacagcatgatcgcatccccgttcaccgcgctggcttatcgctccaatctggccacgtccgagtgggaactgcttcacaccgcctatcgtgagatcgacggcccgaatgagaggcgttggcgcattccctcgaatgggcgagtgcccgcaacggcgctgaatctgcgcgatggacagcatgtgggcgagctcggcctgccggatggggcgcacccctacgacacggtcaccgtccggcacactgcgtcatggcccagtgcggtcgtcgcggcggacacgttgttcccacgctcgaacctgcggatcgagtccggagatgtacatcactacgtattcgatccctttttccgccggtggaagctgaaccacgcaacctatcgtccggtgctcccgaacgaagcatcgcagaagacgactacggcacgcacccgggtcacggccaccaacgagaacttccgtggctactacctggatttcccgcacagcccgtcggaccgtgatcgccgcgtgttcaaggtcgctgattcgaaggtgatcgatccgagctggggactgaagatcaaggatgacaacatctttgaccgcgaggcccacgtctggaccaaccctggcgaagagttcgagttcatgtacgtcgacgacggcggccccggttccagccattggcacgcacttcgctatccggtgcagcgcgtcgacattgacaagtctcgtggcggcaaggtcgacaacgccgccgcactgctcacctgggtcaccacgggcggcggcacggtcacactgcccaatgcgttccagcgcctgacgcgactggttgtggagaatgtcaccggcacccaaccgcacccgaccccgaggacgaccaccgtcatcgggcccgggttgtcggacaaggtgctgccgggtgagcaggtctcctatcgcctcagggaccacaagtggattcgtgaaacgaccactgttgacgtggtgtttgccgtttccggccagctcggcgagatcggttcgaaggccatggccttggagttgatgcgcgaaagcctggtgaagaccaaccaggcattggacaactcgggcgcgacgttccgcttccgtgaagcggcggtgcgtgatatcaccgtgccgtactacctgccgacctatgccattcccgagtggattgccaatcatgcaccgcaggtgatcagcgacagcggcgcggatggcgtgtacttcggtggtgtggccaccggctgcaatggtgtccaccactccaagccgcgcaagcagtttgcggtggcaatgaacctgctctgctccaccgacatgcttcgtgaggaaatgggcaaggcactgggcatgaaggtcaatggcacgcagggcgtgccggtcatcggctccggcaacaagctgccgctgtatgccacgccagtgcgcttcgtggacgatggcaaccgcgccatcaatcctgggcagcgtgacgaagtgcagcatatgaacgctgctgcagccgaagtcgcgcgctacggctacccgcgttga

SEQ ID NO: 500672 - DNA, 1158 bp, Stenotrophomonas maltophilia
atgaaatacttctcgttggtgtgggcacagctgttccgcagccgtacccgcaccctgctgaccctgctgtcggtggtggccgcgttcctgctgttcggcatgctcgattcggtgcgggtggcgttctcgtcgggtggcagcgtggaaggtgccaaccggctgatcgtggcctcgcggctgtcgatcacccagtcgctgccgatccggctggaagcacaggtgcgccaggtagccggtgtccgtgacgtggcttatggcatgtggtttggtggcatctaccaggacccgaagaacttcttcccgaacttctcggtgtcacccaactacttcgatgtctaccgcgagctgcagatcgatccggcacagctggaggactggaagcagacccgcaccggcgccatcgtcggcgaaaccctggccaagcagttcggctggaagatcggcgataccatcccgctgcaggcgacgatcttcccgcgtggcggcagcaatgactggccactggtgctcaagggcgtctaccgctccaaggaccgcgcgctggccgccaatgaagaacgccagctgatgatgaactggaagtacttcgacgaatccaacgactacatcaagaaccaggtgagctggtacacggtgacgctggacaacccggaccactcttcgcgggtggcacaggcgatcgatgcgatctcggccaactccgaccacgagaccaagacccagaccgaatcggcgttccagcaggccttcgtcaagcagttcgcggatatcggcatgatcgtcacctcgatcatgggcgcggtgttcttcaccctgctgctgttgaccggcaacaccatggcgcaggccgtgcgcgagcgcgtgccggagctggccacgctgaaaacgctgggcttcaaggacagcaccgtgctgaccctggtgatggtggaatcggtgctgctgatcggcctcggtggcctgatcggcatgggcctggccgccctgatcctgccggcgatcggcccgaagagcatgggcatgctgccgccacacgtaccaacgccgacctggctgatggggttgggcctgatcgtagtgatcggcatcatcgtcgggctgctgcccgcgctgcgtgccaagcgcctgaagatcgtcgatgcactggccggccgctga

SEQ ID NO: 500673 - DNA, 2826 bp, Stenotrophomonas maltophilia
atgtccctgaaaaccaatccgctgcgcaacgcgatcgtcatcgcgctggccgccagctgcaccgcccccgccttcgcacagagcgccggcgatacccctaccaacctcgaccgcatcgaaatcaccggctcgcgcatccgccaggccagtgtcgaaaccgcacagccggtggtcgcgctcaaccgcgccgagatcgagaagaagggttacgtcaacgtcgccgacatcctgcaggacattcctgccgccggtgcgccgagcatgagccgcgcctcgtcgctgacttcttcgcgcgatttcggcggcatgtacgtcagcctgcgcaacctcggcccggaacgcagcctggtgctgatcgacggccgccgcatgggcgtcagtgccggcggctactccgacctggcctcgatcccgtcgtccatcgtcgagcgcgtggaagtgctgaccgacggcgcctccgcgctgtacggctccgatgccatcgccggtgtggtcaacatcatcacccgcaagaatttcgatggtggcgaagccagcgtctatgtcggccagtacggccagggtgacggccagaagcgcgcctacagcgcgactttcggcaagaccttcgaacgcggctggttcagcgtgggcgccgagcgcaccaaggaagacgaggtgctgggcaaggaccgcgagttcagccgttacaccaacggcccgcgccacccgaacgatggcctcaacggcaacacgccgtggggctacgtcaccgtcggtggcaagaacctgaccgtgggtccgggcggcgacccgagcaaggccggcaacttccatgcgccggacccggccgatggtgccaacaccaagtcgaacatgagcctgctgaccggcctggagcgcacctcggtgttcgccaacggtggcttctcgatcactgacaacctgcgcatcgtcgccgacgcgctgtacagcaagcgcgagtcgaccaagcacctggccggctacccgtactcggtcagcgccgcgcaggcccgcaatggcagccgtgccgccctgtccaaggacagcgcgttcaacctgtggggccaggatgcgctgttcgcgcaccgcaccgaggaactgccgcgcggcaccgagaacaacctggaaaccaagcgcgccagcatcggcctggaaggcagcttcgaaaccggttcgcggtactgggactggaacatcaactacatgtacaaccgcaacgaaggcgagcgcatcggtagcggcagcatgtaccagccgcacgtcaacctggccgtcggcccgtccttcatggacggaaacgtggcccgttgcggtgcgccgggcgcggttatcaccggctgcgtgccgtggaacccggccgccccgatgggttacaccggcccgggctcgctgagcaaccaggacgtgcaggactacctgttcacccgcttcgtcgacaagatgcagagcaccaccaaggtcgccagcggcaacatctccggttcgctgttcaccctgccggccggcgacatcctggccgcgatgggcttcgagcaccgcagcgaggaggccagctacacgccggacatgaaggtgcagaagggcgagatcgccggcaccagcggccagccgacccgcggcaactactcgctcaacgaggtctacctggaactgcaggtgccgctgctggccgacctgccgttcgcccgcgaactgtcgctggacgtggccggtcgctactcggactacaacaacttcggttccaccaccaacagcaagttcggcctgaagtggaagccgatcgacagcctgctggtgcgcgccacctacggcaccggcttccgtgcgccgaccgtggatgacctgtacggcggcaccgtcagcagccgcgactcgttcaccgacccgtgcgatacctccttcggcaccgccgccaccagcccggccgtcgctgcccgttgccaggcgctgaaggtgccggccaacttccgccagctcaacagcgatggcagcgtggccaccaagcccggccagcaggccaccaccgatttcagctcgggttccaacccggacctgaagccggaaaccgccaagacctggaccgtgggcctggtctacagcccggacttcgtgcagggcctggacgtcagcctggactggtggaagatccgcatcgacaacgccatcgtcggtgagtcggccaccaacatcctggaacagtgctacgtgcaggcgtcggatgctgcctgtggccgcttcactcgtggcagcaacggccaagtcaactcgctggaccgctcgctggtcaacgcgggctaccgcgaaaccgccggctatgacatcaacgtgcgttaccgcctgccggaaaccgcgttcggcaagttcgccgtcaactggaacaccacctataccgattacctggagcagcgcaacgacagcgccgccaccaccccggtggaacagcgtaccggttgggccggcgacttccgcgtgcgttccaccttcaacctggattggcagtacggcgacctcggcatcggctggaccgcgcgctactactccagcatgaaggagaagtgctcgtacatggacgaatgcaacatgccgggcttcaactcgtcgtacaccagcgcctcgccaaccaacaaggtgggctccaacaccttccacgacctgcaggtgcgctacagcctgccgtgggatggcaccgtgtcgctgggcgtgaacaacgtgttcaaccaccagggtccgatcatgtacagccagccgaacagcagcttcacctactacggtggcttcgacatcggccgcttcatgtacatgaagtaccagcagcgcttctaa

SEQ ID NO: 500674 - DNA, 405 bp, Stenotrophomonas maltophilia
atggagcggttcaagaacgatatcgagcgtttgaccaaggtgcgttttgatgatgtcgacgcattgaatgaacagctccacacacacttgggagaaccgactcgacaaggcttgagggacgagcggaccgcagaacgcggcatgctgggcggacttgagatcaagaacatcacgctgagaagtcctgccgacgatcctacgcacgcgaccttggtctttgaggttgccccaccgagcatcgcgctcggggaaatcatctgggaggaatccgccatgtatccaccccatccggatgcgcctgattcccgcccttactggtctgctcaggtgaacagtgccaaggtagtactcgggctctcccttgaccacaaaacgctgacctacgtatcaatcagtcagcgctga

SEQ ID NO: 500675 - DNA, 315 bp, Stenotrophomonas maltophilia
atgacgacgattcacgatgcaatcaagcaactcgaacaagcacaaccgaaatccgaagaagaagccaagcggttcttgagtaatctgcccgcggaagtgcaggagcaactcatcgcggggatctacatcggccgagaccatattcatctcaatgagttcaatgagggcgcggagatcagccgtaaggccaccgaccacattgcgaagaacgagtacgctcgtatcctgcatgagaagtcgtccagcttgccgctttatcttggcagcttgaagaagtgcgcggccgccgctgatttcgatttggcgagtctctga

SEQ ID NO: 500676 - DNA, 246 bp, Stenotrophomonas maltophilia
atgagtgagaacctgactgtggccgaggcgctgcacaaggccacgcagatcgacgccatgctgagcgcgatccaaggcacggcgccagacgcggtccaggcgatgggcgggcgcgacgccctggcccgtcgcagcgagatgacctgcatcggcccggtgccgcgcctagacgccgagacttgggagcgaatgtcgcaggagtacgagggccggcgcgagcatggcagcgtcaaccgggggaactaa

SEQ ID NO: 500677 - DNA, 171 bp, Stenotrophomonas maltophilia
gtgctgctcaagttccgatacggcgagcagatggccgaccggctgagcgtgaaggtcgaggacacgggcctttcggccaacgccctgctggcaatgcccgccgacgagcgtgctcagttggtggcgctgctctccaagtacaacgcgagtaaggagcaggacgatgagtga

SEQ ID NO: 500678 - DNA, 945 bp, Stenotrophomonas maltophilia
atgccagcagaccagaccaccaagacggtctactacctgcgcgccagacgcgacgaccagccttttgaccttcagtcgatcgcgaaaaaggcgcgcaagaagaagagcacctgcgatgcaaccgagatcgagctcggaggcggcgacgtggtgcggattcagcacttcagcaattctaacgggcgtacgctgatgcacctcacgcgatatgttcctggcgtgcaggcatcaacgctccaacccaaagcgaccaccgccgaagacgacgaaggcgcccaaccgcctccgaaaggcaaggaattcaaggacggggactgcttcttgttcctgaaggatcaccacgtcctgtactgcggacacggcatcagcaagagcaaagcgtctctgtatttgtcccagcttttcagggaagcagaacttcacgacgagtccagcggcttcgatcttgttcctgccagcaacttggacaagctgcaactgatccaggatcacggcgtcaagtccatccaattggccgtgggcgccttcgatctgagcttgccaaaggcgcgccgtacaagctggatcgcgaagtctctcggcaccctcggcgatgagctcggcgcgctagtaggcaaggaccagtcgctgaccaaacagaaggcgctggaggacctcatcgtgaatgttgaggtcaagctggacggcaacacccgtgcgatccagagctctcaggactttatcgaggatctcgcggagacggtacttgatgacgacaccgagacgcctgtaagcgagttcacgatcgtcacccagaaaaatgagcgcatcacttccggagaaatccgccttcagacaggcgtgaaggtggaaacgaaagacaattccgtcagtcacaccagcgtatggggtgcgatgggaacctactttgaccagataacgcaggggaacctgctggagcaatga

SEQ ID NO: 500679 - DNA, 498 bp, Stenotrophomonas maltophilia
gtgcgtcgcctcgaagttgactggagccgaatcgggctgtttgccgcgatcaccgccgtttcggcggtgatcggctggtatggacagccgttcgtccacggcaacgacgaagcccgcggcgtcatcgtcaacgtattctcgatcctggccggctttctcatcacagtgatgactcttttgggcgagcccggcctgtatcgaggacgcacgtggcgttcggacgctgtcaggcggagcaacgtctaccagcggctcgtacgccacaagtggcttttcatctcctacttgattgtgcttgcgttggtctttctgacgaccatcgtggccaaacgcgagccggacggacgactggtcacctgcctggaagcgctttatctcggcttcgcggccttcgcgttcatgtactcactaatgcttccgagccgattgctcaatctacagctagcgcgcttcgatgagcttgtggagtcgaggcgtaacggccagaagtccgagtga

SEQ ID NO: 500680 - DNA, 462 bp, Stenotrophomonas maltophilia
atgaagcgaataggggttcttctggtcgtcctggtggtcctagcttgggtcggatcgaagctggtgccgcgcagcgagcccgctgtcgtcgccgcgcccgcagcagtggtcgaggcgccgcagaagcaggcccagcagccagaggcaacgaaggccgagccggaacgacccatgacggccgcggagaagaaggcgcagcaggagaaatggttcggcggcgagacgatcgtggcggcagagcgcgcggtgaggggcgagctgaaggacccggacgccgcgcagtttcgggacgtgcgcgccaactacacagaggagttcggcgtggtcgcctgcggtcgggtcaacgccaagaacgagttcggcgggtacacaggcttccggcgcttcgtgtccggcggcaagagcgtgatccttgagggtcgagacaacgtagccgacgcatgggttgaggcgtgcctgtag

SEQ ID NO: 500681 - DNA, 702 bp, Stenotrophomonas maltophilia
atgcaaaagctttccagctttggtgacattcgccagacaggtttttgcgtccactgtgggggttcaacggaatcgctggatcacgcgccttcaaaagtgttcttagacattccgtaccctcctactcgccccacgctgcccagttgcaccgaatgcaacaaccagctgtcctccgatgaagagtacttggcttgcttcgttgaatgtgtcatttgcggaacgactgaacctgcatcgctcggacgcgagaagatcgcaaaagccttacggcgaaatagcaagcttagacggttgatcgagacgtccaagatccagacggagcctggggaagatgcaccgctagtgtggatgcctgatgaggccagagtccgacaggtcgttttgaagttggcgcggtgccatgcggcctatgagctcaacgaacctcaattgagtgctcccagccacctctcgatcttgcctctcccgactctttcagaagctcaacgcgaacactttgagaccccgccagatagttcggtgtggcctgaggtgggaagcagggctatgcaacgcctattgatcgcagacgaagcgtattcaatgggctggatcaccgtccaagaaggccggtacaggtacatggccattggagcagaagccgtcatgatccgaggcgttctaagcgagtacttaggctatgaggtgatctgggagaactga

SEQ ID NO: 500682 - DNA, 1455 bp, Stenotrophomonas maltophilia
atgcaaacgtcctaccccctgcgccagcaatggctcggcaacatccgtggtgatctgctgtccggcatggtcgtcgccctggccctgattcccgaggccatcgccttctcgctcatcgccggcgtcgaccccaaggtcggcctgtacgccgcgttttccatcgcgatggtcaccgccatcgctggcggccggccgggcatgatctccgccgccaccggtgcaatggcgctggtgatggtcgacctggtcaaggaccatggcctgcagtacctgttcgccgccagcatcctggccggcctgctgcaggtgctggccggtgtgttcaagcttgggtcgctgatgcgattcgtctcgcgctcggtcatcaccggcttcgtcaacgcgctggcgatcctgatcttcctggcgcagatgccggaactgatcggccgcggtcccaccgtctacgtgctgtgtgccgccgcactggcgatcatctacctgctgccgcgcctcacccgcgctgtgccttcgccgctggtggcaatcgtcgtgctcaccgccgtagtgatcggctttggcgtggacgtgcgcagtgttggtgacatgggccagctgccggacagcctgccgcagttcctcatccccgatgtaccgctcagctgggaaacgctgcgcatcctgctgccggtgtcggccacgctggccgtggtcggcttgctcgaatcgatgatgaccctgcagatcgtcgaggacatcaccgagacgcccagcgagcgcaaccgcgaatgcgtcggccagggcgtggccaacacggtcaccgggttcctcggcggcatggccggctgcgcgatgatcggccagtcggtcatcaacgtgacgtctggtggccgcggccgcctgtcctgcctggtggccggcgtgctgctgctggtgctggtggtgtacggcagcgacctggtgcggcagatcccgatggctgcgctggtggcggtgatgatcatggtcagcatcggcactttcagttggcgctcgctgcgtgacctgcgcacgcatccgcgcagttcctcggccgtgatgttgctgaccgtggtggtcaccgtggccacccacgacctggccaagggcgtgctcagtggcgtgctgctgtcggcgctgttcttcgcccgcaaggtcggccgcatgctggaggtgcagcgcgaggatgccggagacacgcaggtctaccgcgtacgcgggcaggtgttctttgcgtctgccggccagctgggcgcggcgtttgactaccagcacgtcgcgccgaaggtgcagatcgacctgcgtgacgcccacctgtgggacctgaccgcagtggccgcgctggaacgtgcgcaggaaaagctggccgcgcatggggcggaggtggtggtggtgggcctcaatgtggctagccagacgctgatcgaacaggtgggcgggcgcgcgggcgggcattga

SEQ ID NO: 500683 - DNA, 438 bp, Stenotrophomonas maltophilia
atgtctgcccgccaggaactgctggatctgcttgaacgcctcgatactcgcgacccggaacacctgccggtggtgccactggctgcgtacttcgaaggcaatgattccgaagaatgcatcgcgcccaaccaatggggtttcggtcgcccgccgattgccgagctgtacgcgcgcctggccgtgatcgcagcgaagcctgaagtggaaggcgtgtacgtcggcctgcaccaggactggggcagtgcattggaagacgacagcgaatggcctgctgccgagaacgtgcatgtgctgaccagtgccgacgtcgagaccgtggaaggctggctgcagggtctggaatgcgacggtgtgggcgaaggctggccgtacggcgagcacgtcgacgcccccaaaccctcggaaggccaccgcgtactgaccgtgttctgggactag

SEQ ID NO: 500684 - DNA, 2493 bp, Stenotrophomonas maltophilia
atgaatggcgacaacggaacgtcagccccgcatagcccacagctacgcgccctgctgttcactgatctgtgtgattcgctgcagctggtcgagcggatcggcgacgtggcggcggcgagcctgttccaggaacacgaccgcctggtgctggtgctgcagcaccgctggaatggccagctgatcgatcgttcggacggcctgttaatgctgttcgagcgcgccatcgatgccctgggcttcgccctggactaccagcgtgaactgcatgcgctgggccagcagcgtgcgattgaactgcgcgcgcgtgccggcctgcatgtgggcgacgtgctgacctgggaaaacagtgccgaggcagtccgcgccggcgccaagtcgatggaagtggaaggcctggccaagccgatggcggcgcgcctgatgatgctggcccggcccggccagatcctgttgtcggcggtagccgaatcgctgacccgccgtgccaccgatgcgttgggcgagcgcggcacgcgcctgttgtggaagtcacacgggcgctggcgcttcaagggcgtgccggtggtacaggaagtgatcgaagtgggcgagatcggctccgcaccgctgcgcatgccgcgtgccaatgccaaggcccgccgcgacctgccgttgtggcggcagccgctggtgctggccgccgaaggcctggtgctggcggtggcggtgctgggcggctggctgctgctgcggccggaaccggcgatcgcgttcgccgagcgcgactgggtggtgctcggtgatgtcgacaacctcaccggcgactcgatcttcgacgactcgatgcggcacgcgatccggatcgcgctggagcaatcgcgctacgtgaacgtgctgtcggagggcaagatccgcgaaagcctggaaatggcgcggctctcgggcgatacccggctcagccgcgataccgcggccaacgtggcggtgcgggaaggcgcgcgcgccgtgctgctgccgacggtgcggcagaagatcggtggctacgagctggccatcgatgtcgccgcacccggcagcggccaggtgatccagacgttcaccgccaccgtggatcgatccgaccagatggtgttcgcggtggacgacgtggtcgggcgcctgcgtcgcggactgggcgaatcggtggcgagcctggaacagtcgttgccgctgccgcgggcatcgacccaggacctgcgcgcactgcgagcattcgcgctggcggagagtgcactgggccagcgtcgcttcgaggaggcgcgcaacctgtaccaggcggcgatcgatatcgatcccggtttcgccctggcctacatgggcgtggccaaactgcatgcgcgcgtcgaggaagggcggcgtgcacgcgaagccatgcagcatgcgctggacctgcaggatcggctgccgccacgcgagcggctgtacctgaaggcctggatggccgagctggagccgggtggctgggcgctggagcaatggcgcacgttggccaaggtctatccggattcgttcgcggggctgtccaacacgtcctggtacctgctgcaggccaaccagttcagcgaggccgaaccctatgcgcgtgcggccgcagtaccgcaggatccgctgcggctgtatccgctggtccatctggtgcggatacagatcgctgccaaccaaccgcagctcgctgccgaaacgctggcccaggcgcaggtcctgcgcggtcgcgatgatgccgatgagaccggcgtggatgtgctggtggcgcagggacagtacgcgaaggccgcgcagctgttgccgcagatccacgccagtgatggactgcaggagcggatgaagctgcgtgcgcagttgttgctggctgctgcgcagcgcgattgcgcggccatgcagcaggcgatacgcgaagatgcagcggcgccgacgctgatcgacctgcaggtgcagcagcgcctgcagcacgccagcgtggcggcgctgtgcccgagcgctgaccgtgccgggctgcaggccattgcggcgctgctgcagccgatgctgcaggagcgtgatgatcccatgctgcatgcccgtggcctgcaatggctggcactggtccacctggcgcagcggcagggccagttcgaactggccaggcgctggctggacgagcagcggcccctgctgcgcagcctgcgcagtccggtcgcggaccgctggctgcgcatcgtcagcgccatggacgaactgcagatgcagcggcccgaggctgcccgcaccctgatcgagccgatgctcgatggcagcgagccggtgcaggcacacgtcgtgctgctgctcgcggtgcgcgcacagggcaatgaagccgcggtacgccgccagcaggcctggctggcccaacatcgcggccaggccattgccgaggtcaccgccatgcaggtctggcaaccgctgaacgtgcatgacgtctccacgtgggctacgccggccacggccggcgcgccctga

SEQ ID NO: 500685 - DNA, 909 bp, Stenotrophomonas maltophilia
atgtccattgaactgcgccacctgcgctacttcctcgctgtcgccgatacgctgcacttcggccaggcggcggagcggctgggcatgtcacagccgccgctcagccagcagatccgccagctggaagaactgattggcgcgcgcctgttcgtgcgcagccatcgccgcgtgcagctgacgcctgcgggcgagctgctgcaggaacgtgcacgcgccatcgtgcagcaggtggaaacggccgtggacgaggtacagcgtgcacagcgtggtgagcagggtgaactgcatatcggtctgactcgcgccacgccactgtcaccgcagattccgcgttcgatcctgcgctaccgtcagcagtacccgcaggtgcggctgcagctgagcgagatgaacacgctgcagcagattgacgcgctgctcgacggttcactggacgtgggcatcatccgcaagcgcgcgctgccgccggaactggtggcgcacagcctgttcgtcgacccgctggcgctgatcgtgcacgccgaccaccctgccctgcgcaggctgtcgaagcagggcacgctgtcgctgcgcgacttcgcgcaggagccgttcgtagcgttccgccgcagcgccggcgcgggcatccacgaccacatgatcgcgttgtgcgcagcggcgggcttcacgccgcgcatcgtgcaggaagccggtgaagcatcgaccttgatcagcctggccgctgcgggcctgggtgcggcgatcctgccgtcttcatgcgatcacatacgcgtggaaggatcgcgcttcgtggcactggccgatgctggcgcgcattcggaagtgcagctggcctggcaccgcgaacgggtaacgccgctgatccgcaatttcgccacgctgctgcgcggagcgttcgccgaggggtag

SEQ ID NO: 500686 - DNA, 579 bp, Stenotrophomonas maltophilia
gtgctgcagacgctgaagaacgaactgatgcacttcggtgctgaaaacgacgcgcatgaaaccgagcgcgctcggcgcatgctgaacatcacgccggataccggtgaattcctgtcggtgctggtgcgtttcggcaccgcacgccgggtactggaaatcggcacctccaatggctactccacgctgtggctggccgaagccgccgccgccatcgacggccacgtgaccacgctggaagtcgccgaggacaaggtggcgatggcgcgatccacgttcgcgcgcagcggcttggccgcgcacatcaccctggtgcatggcgatgccgggcagtggttggcagaggccggcgaaggctgcatcgacctgctgttcctggattcggaccgcgggcagtacgccggctggtggccgcagctgcgccgcgtgctgcggccagggggcctgctggtggtggacaacgccacgtcgcacgcggaagagatgaaacccttgtgcctgctgctggatgccgatccggacttcagcaccagcgtggtgccggtgggcaacggcgaattgctggccgtgcgcaacggctga

SEQ ID NO: 500687 - DNA, 333 bp, Stenotrophomonas maltophilia
atgcagcgcctgttcgtgatgttccccgaccgcggtccgggcatcggcctgctgtggttgcggttgtgcctgtccgctgctctgttcacgcttggcatgcaggcgggcgggtggtccgcggtgtgcctgctggcagtgccgatgctcgtgctgggcgcgttgacgccgctcgcggcgctgatggcggccgtgggcatgttcgcgcagcaggcgccgtggccgcaggcggtgctgccattggcgctgttgatgctgggccctggcgcctattcactggatgcgcggttgttcgggcgccgcctgctcggccgtcggcctcccccattcgggtag

SEQ ID NO: 500688 - DNA, 387 bp, Stenotrophomonas maltophilia
atgcccgccatgcgatggtcgctgatgctgtgcctgctgctgcccatggcagcgccggcacagacccatgtctacaagtgcgtggatggaccgcacccggtctaccagcagacaccctgccaggggcgtgccgcatggcgctgggacgtgcccgcggagcagtcattgtcccgcggcgctgtggcgccagcggcctcgacaccgaagccatcgccccggccacggcgtgcggcgcgggcgcacggtgcgctgatcacgatcagcacggatgcggcggcctgcgagcgtgcccggcgtgatcgcgagcaggcgttgctcaagcgtcggcgcctggatttcgtgcagcgccggcagctggatgacgcggtctacggcgcctgccagtga

SEQ ID NO: 500689 - DNA, 474 bp, Stenotrophomonas maltophilia
atgaccacgatgcgccagatccgacgcctgttgcccgtgctgtgctgcctgcttgttgccggtgccgtgcaggcgcagcaacagccattgaccggacagatgctcggtggcccctcgccgtcgccagcgggcacggcgccgatgcaggccgagccgcttcccaccgtggagttggccgcaccggccgcatccgccgaggtgactggggcgcaagcgtcgaccatcgcaaccgacgtcgcacgtctttcagcaccgcccgccgcaccgcgtgcgcgcctgcccagcggcgaggcgacccgcaatctgttccgcctgcaggcctccgggcagcaggccggccagcggctgccgatcctgggtgaccaggccacgctgagctatgcgcgttacctgaagagctttgaacacgagatcccggacttctttgagaccgatgtctcccggtccaaggacgcctcctcctccggacgctga

SEQ ID NO: 500690 - DNA, 342 bp, Stenotrophomonas maltophilia
gtgaagcgtcccgccgacagcacccaccgcaccaccgaccaggttgccgacgcccagcgcgctgtgctgtgcggccaccgtcccctgtccggccagcttcagattgcgatcggccactacctcctggccgtctggcgcctgcacgcgcaccttgccggcgacgccggcatcgaacgcggcactgatgacacgatcatgggtttcacccggcagttcttccttggccggcagcgtgactgccgccgtcgcccgggcctggccctgcccctcgatgtgatggccagcgaccgccagatgcgtgtcggccttgccgtcgacagtggccttcagcccaggcagtga

SEQ ID NO: 500691 - DNA, 828 bp, Stenotrophomonas maltophilia
atggccagcacatcttccattgatcagaacgccctgtggaacggccctggcggccaggcgtgggttgcgcaacaggctgttcttgacggcctgttccagccgatggctgacctgctggtcaccgaacttcctgagaccgttaccgaactgctcgacatcggctgcggcaccggcgccagcctgctggccgcggccgcagcgctccccggggcacattgcaccggcctggacatctccgcgccgatgctggcgctggcccgccagcgcgccgaggctgcgggactggtcgcggacttcatcgtggcagacgcgcagcgccatccgctgctgcccgcgcgcttcgactggatccagtcgcggctgggcgtcatgttcttcgaggacagccaggccgcgttcgccaacctgcatcgtgccacgacacccagcgccgggctgcgcttcatcgcctggcgcagtgccgacgaaaatccattcatgaccacggccgagcgcgcgatcggcgatgcactggatctcccaccccgcgtacccggcgcaccgggacagttcgcttttgccgatggcgagcgcgtgcagcgcctgttgcaggccgccggctggaatgacgtggaagtggttgcggtggacctgccctgttcgctcgcccgcgaagacctgccgacctatgtcggccacctgggaccgttgggactggccctgcgatcgatgccggaagcccgcgccacaatgcttcgcgaaaaagcattggccgcattcgcgccgttcatcgaaggtgaccgcgttcgtgtggatgccgcctgttggttgatccgcgcccgcgcttga

SEQ ID NO: 500692 - DNA, 924 bp, Stenotrophomonas maltophilia
atgactgttgcgcagttctacccgatcggcacccccggacagccctggggcgacgtggaacgcgcacagtggcgggcccgccagcagcgccagcgcagctaccacgatgacgtggtggccgccctcgagcgcctggacgacagcgttttcgacgtgatccagtacggccagctggactatgcaccggaccattacccgctgttcgcggtggtcaaccacgactggaacccggcgctgccgaccgcgctgatcaccggtggcgtgcatggctacgagaccagcggcgtgcacggcgccctgcagttcctggaacagcaggccgagcgttacctgggccggctgaacctgatcgtggcgccctgcgtcagcccgtggggctacgagcgcatccagcgctggaacccgggtgcgatcgacccgaaccgcagcttccgtgacggcggccagatcgaggaagcggccgccctgatgcgctgggtggccgagcgcaagccgaacctgctggtgcacctggacctgcacgaaaccaccgacagcgacctgcacgaattcgatccggcgcgttgcgcccgcgacggcaagccgttcgagcgcgacacgattcccgatggcttctatgtgattggcaacagcgaagacccgcaggccgagttccagaaggccctgattgccgccgtggcccccatcacccacatcgccccggccgatgccgacggcaacctggtcggcctgccgctgcagtcgccgggcgtggtctggggcgagtcgcgttcgatcggcgcctgcgccggcttcaccgacgcacgctttgccaccaccaccgaggtctacccggacagcccgcgcaccaacccgcaggaatgcaacgacgcccaggtggcggcggtgtgcgcgggtctggatttcgccctgtcggcgcagtaa

SEQ ID NO: 500693 - DNA, 1242 bp, Stenotrophomonas maltophilia
gtgagccctgcctccctctaccgccgcctgagcctgcgcacccgcatcacgatctcgttcgtgctgttgatggccggggccatgggcttcatcgtactggccgaacaggtcgactacgaccaggtccgggctgctgtcgtcgcacggacccagcacggcgaagtgcaaaggctgcaggccgcgctggatcgtggccaacaccccgccctgccaccagggacccagctgttcgatgcccaggacgtgcctgtcgtgctgcgccaatacggcccgggctaccacggcgaagaggcgcccaacgagtggcacctgcgtgtgttcgacagtcgtggccaacgttactacctgctgcaggacgctgcaccctatggttatctggaacacctgatcaatgcctttgcggcactggtcatttcggtctgcgtactcggcgccttcctgatcggccgcaaggtcgctacccacgtcatcgcgcccatcacacgattggccgatgcggtgcaggacggccacaagccctttccctaccaggacgcacgcgacgagatcggcattctggcccgcgcctttgcccggcatagtgatgaactggagcgtttcctgcaccgcgagcaatgcttcagcggcgatgccagccatgagctgcgtacgccgctggccatcatcggcggtgctgcggaaacccttgcctgccagcttcctcctgacagccacctggttcccagcgcggagcgcatcctgcgtaccacccaggagatgcagcgccagttgtcctgcctgctgttgctctcacgttcccccggctcagtcccgcgtagcgaggtggctttgcgtccgttgatcgagtcctgcgtggagcgctgccagccttggctggccggcaagccggtcggaatcaccgtcgatcccggtcgagaggtgacgatgcacgccaattcggacctggtacacagcgtgatctggaacctgacgcgcaacgcctgccaatacaccgaacagggaaaggtccggatcaccctggacaccaccacactgatcatcgtagacaccggccccggcctgccctccagcatcgacccgcagcagttccaacgattcgtgcccggggcaccgctcagcggtgaaggattgggactgtccatcgtgcagcgcatcgtcgaacaccttggctggacgatgacagtacagtcctcgaagcacggctgccggttcgccctgcactggcctgcggcccgcatctga

SEQ ID NO: 500694 - DNA, 1506 bp, Stenotrophomonas maltophilia
gtgcgcgatacccagggccgcatcagccagatcggcctgacccggcctggccaggcgcgccagatcgtggtgaacaacgtgacctatgcggccttcggcccggcgaccggctggacctacggcaatggccgccagctgcagcgtccgttggatctggattaccgcccgcaggcggtgcacgacccggccgcgggcggactgtcgctgggctacggctacgacccggtcggttcgatcaccgagctgaagaacggcacaggctcaacggtactcgccaagtacgcctacgacgcgctgggccgcctgacccagacccaggacggcacgaccggcacgccgatcgaaatctatgcctacgacgccaccggtaatcggaccgcgctgaccacgtcggcaggcaccgccagctacgcctatcccgcaaccagccatcgcctgactgcggtggatggcgaagcgcgcacccatgacgcagcgggcaataccaccagcatcggtagcaagacgttcacctacaatgacgccaaccgcatgaatgcggtgaagcagggcaatgccgtgctggaaagctacggttacaaccatcgcggcgagcgcatgttgcgctccccggccgccggcgcggctcagatcaccctatatgacgaggcggggcaatggctgggcaactattcggccacgggccaggcgcaacagcaggccatctggctggacaactacccggtggcgctgatcaatgtgccgagtaccggcgtgccggaactggcctacgtccagccggatcacctaggtacgccgcgcgtggtgatcgacccggtacggaacgtctcgatctgggagtggagcaacaagagcgaggtgttcggcaaccagattccgagtgccgacccggatggcgatggtgtggcgatcgagctggcgctgcgattcccgggccagcaggcgacggatgcgagtgggttgttctacaactacttccgtgactatgacccggcgtcgggtagatacgtggaaagcgatcccgttgggttaaatgctggcgtcggtacgtatggctacgtgatctcgaatcccacccgatttactgatccgctcgggctgacgactacgctgataacgacatataattttggtattgcaaaccactcagcgattcatgtttcgagacctggcaagcccgatttcctgtacgacccttctggcacgtatgcacctggtggccgtcgaggaaccggcgggctatttgaggggcgcgacgccagcttggccagctacaaaaagtatcaggtgggaactggtagccgagttgaattaacggtaatccctttgactccggagcaagagttaactctcattgcgaacgcggaggagtggggggatgcacgtggcttctggtgtgcgagccacgtgtccggcgcgttggatggaatgtgtgggataaagcaaacactcttcccgggtgttcttcacaagagtgcaaaggcggcagaatgtccagtcaaatga

SEQ ID NO: 500695 - DNA, 441 bp, Stenotrophomonas maltophilia
atgcacgctgccaagctgctcccaatcgtgatgctgtcaatcacactttctggttgcatggaagttgccagcaccgagtatgcagaccgcaaccaagccgtctcaagacaagcaatcggtgaatcgaagtggttgccttcatggttgcctgaggacgcagtcaacatacgcgagtcgcacgacatggacacaaatgaatcgtggctggttttccgccttaccagtggggtacttgctttgcccgaagactgcaggctagtgagcaggccggagatgtccgacgcgcgagtcatgcggagatttcctcagtttgcccgcaacgcgtggtcgcgagcgtcaagctatggcggcaagttctatctgtgcccggagggtaatgttggtcgctgggtcatgcgcgatgaacagctgggccttgtttacagcggaataaaactctag

SEQ ID NO: 500696 - DNA, 486 bp, Stenotrophomonas maltophilia
atgaagaacaattccgctgtaaggctgctgtgtctcccgctgctcttccaagcctccgtgctgcagatggcgtgggcaggcaacagggatgatggggcatgggcaggcagctattcgcaggcgagcgatctgtgtaccgaaccgggcagcggacgcagttgccgtgatgggttcagggacagcctgtcgattgtcgaagaatcactgggctatagggttgagctgcacagtacccaggcgatgcagcacgtctgctccttcgtgctgcatatgaagcccgaaggcggaaaactgattcatcagtccgaactaggcacagtggctatcgagaaacatgcaggtgcgctgagagtctcatccggcgggatcgacccgacggtgacgggcttgggcatgtgcggtgcgcatgccgatattgatggtctggagttttcttctgtcggcaatcgcacgcgccccgggcaacgcaagggcgcccactcctga

SEQ ID NO: 500697 - DNA, 1164 bp, Stenotrophomonas maltophilia
atggctttgcatccgtacgatctgttcgatgtccgttccctgctcaacgaggaagagcgcgcggtgcaggagagcgtcgcccgcttcaccaacgagcgcgtgctgccgatcatcggcgatgctttcgatcaggcccgcttccccgacgaactggtgccggagatcgcctcgttgggcctgctgggcgcgaccctgccgaccgagtacggcggcggtggcctcggcgcggtcagctatggcctgatctgccaggagctggagcgcggcgattcgggcctgcgcagcttcgtttcggtgcagagctcgctgtgcatgtatcccatctacgcgtacggcagcgaggaacagcgccagcagtggctgccggcgatggcacgcggcgaactgatcggctgcttcggcctgaccgaggcgcacggtggttccgacccggccagcatgaagacccgcgcggtgcgcgacggcagcgactggcgcatcagcggcagcaagatgtggatcaccagcggcccggtggccgacctcgcgatcgtctgggcacagaccgaggacggcatccagggcttcgtgctggaaaagggcatggccggcttcacgacgcaggagatcaagcacaagatgagcctgcgcgcctcgttgaccggcgcgctgttcttcgatgacgtgcgcgtgcccgacagccatcgcctgccgaacgtgaagggcctgaaggggccgctgggctgcctgacccaggcccgttacggcatcagctgggggccgatcggtgcggcgattgcctgcctggatgaagcgctgggctatgccaaggagcgcgtgctgtttggtcgtccgctggcggccacgcagagcgcgcagatcaagctggccgagatggcccgccgcatcaccaccgcgcagctgctggcgctgcagctgggccgcctgaaggaagccggccagctgcagccgcagcaggtcagcctggccaagtggaacaactgccgcatggcgattgacatcgcccgcgagtgtcgcgatctgctcggtggggctgggatcaccaccgagcacgtggcgatccgccacgccctgaacctggaatcggtgatcacctacgagggcaccgagaccgtgcaccagctggtgatcggccgcgaactgaccggcatcaacgcgttctga

SEQ ID NO: 500698 - DNA, 2904 bp, Stenotrophomonas maltophilia
atgacgaagacgatggttccaccagagggctccgacagtgtaagttcggcgctcatcgacgcacttcgacgcctcatcagaggtgaccttgcgacagtggccagcatgagcaactccacaagagggtggatggagagcccttcacctagaattggcctgggcgccaccgctctctacgtcatgatattggacggggtcagacttctttcgaacgagctaatgggaagacctgatcttgccaggagcagcgatgaagtttttgcacgtgtggccgagctatccattcgaactacagatttgtctaatttctccaatggatctgtagcctcacaaagcacttacccggggccatttcatctagcaactttgctgttgggggccggaaaagagctccgagcatcctcgctcgtatcgatcaatccgccgtcaggagttccgggggaccggtggcgagaaaagatgggtttgattgcaggaagtaggccctatctttggaagaaccacctgcaggcagttcgtagaggctatctcgacaatggagtttcatccgtagtcagctttccaactggcgcaggcaaatccacgctatctgagctaaagatcgcaagtgcactgctggcgagccgaaaggtagtattcctcgcgccgacgcttgcgctggtagatcaggtcgcccgttctttggggtcggtcttcccatctggacaaattcagagggaacggagttcggattctgttgaagacatcgccgacgaagggcttcccgaaatttccgtgatgactcctgagcgctgcttggcattgctcggatacgagtccgctgcgttcgctgaagttggtcttctggtgttcgacgagttccaccttatccactcttcgggagtcggccgtgacaggagatccatcgatgcgatggtatgtctactgaacttcacgcttgcggcccctactgcagatcttctgttgatgtccgcaatggtcagcaatgcttcagaagtggcggcatgggttgaaagcctaactagcaggtcatgccttgcactggatttgaactggaagcccactcggcaggtacgtggtgtcgtgctttaccaagctacggaggtcgcatcgagccaagctatactagccgcagcagcagaggccagaacaacggcggcacctcctgcctcagtgaagcgccaattgcaggtcaagccctacggctttatggggctccagcagacgtggatgaccaataatataagtgattacctcctcgttccgctgttagacagaaatgtcaagttgggtgcagccggtacacgcacgtccgactggtaccttacccctaactctactgaagttgcggcagaagttgccatcggtgcggctacacgctctgcaagcgacactctgaagacgctggtctttacccaaaccatcccatgggcagccagcatcgcaaagaaggtttcagatgctctcccagcacgagcaattgtattgaatcaatctgagcggcagagctttgacgcggcactcaccgagctgggcgatcgtagtgctctgtatgctgacgttggcgaaggcttcgatctgagaagtctggcccttacgcatcatggccttctacttccgcaggagagggcccttcacgaatctctctacaggcggcccgatggggttgatgttgtggtagcgacgtcaaccctggcacaggggatgaacctgccaagccaagtcgtcatcatctccagtgatcagagattcgacgcggactctgagcgaatggggaccctggaggcccatgagctactgaacgcagcaggaagggccgggcgggcgggggaaaattcattcggcttcgtcctagttgtccccggtagggttatgcgtttcgacggtcagtccaacactatcagccgttactggaatcagctcaggcaggtcttctctcagagcgaccaatgtttggcagttgaggatccgcttgttcgagtgcttgaccggatgcatgaatccacagtcgagttggatgaaactgcccgatacatgcttcgaagactccctatttcctttgatcgcgagtcctctagatccgctgttcgcgagtaccttggaagaacgatgggggccttctcatcaagcgcccggggggtccaagactgggtggacttgagctcccaggcggtagctaggttcagggacgaattcggtgctgagcaaaatccagactggatagacaagttggcggcttcaacgggagtagagcccgttgtcatcaggggcttggaaagccatatgcagaggagctgcccagatgagttcgcgaatgtgaaagagtgggtcgaatgggtctttggctggcttgcagaagacccctcattggttccgcagctagtaaggaaggggaatcttgaagggctctttgaaaaagactttgcgcgacttagctcggaccaagagagaggtcagtgggctataccccggcttcaagagttgttgctcatgtggatggagggcaagtcacttatggagatggaggtttcacaggccatcggagctagtagtgctggcaagtgcaagtgctcgcgaatatttgtcttgagggtagttcccgacctggcattcatctttggtcttccggagcagttaattagagcgaagcggagggccgctgccgacgacggcgagtctccggctagtgcttcaaagctgtctgcttgtgtcaaggagggttacgcagaagttgaacttcttgcgctctcttatgtaaaaaatctctctatggtccgtcgcgggattcatgagctctggaccgaagtcaggccgatggtacttgccccaatacacccggaaaagtgggctgagacattggctcgggtgcggtcggcccaccaagtgtacgaagtgctgaggtag

SEQ ID NO: 500699 - DNA, 780 bp, Stenotrophomonas maltophilia
atggcaattgagacgacaccatatacggtgccttcgctctgcgacggcaatgcgtggtcggttccggatgcagacctcttggcagttcagatcgccatagtcgccttaggtcaggctgatcatttggcagaaatactgaaggctgccggaattccacaagtggaagcagacgatatcgccagggcggaggccgttaaactcatcacggcaagcgcagaaaacccctaccaccgcgatggctggttcttccaagtcatgtcctggatatgtgctcatcgactcaatgcaaactcagctatccgaacaccacatatgattctcgcccacaaagggctggacggcctgcaagttgaggctgatgagaacggaattagccatgtcgtaatcttcgaagacaaggcgacagagcatcctcgggatgtgattcgagatgaggtgtggccagagtttcgcgagctggagtctggatcccgtcagaacatggttgctgcggaagtggtttccctactcaagagttctggctatccaaacgccaccgatgcagtaaagaacatcatttggagagaagccagagtgttcaaggcatcgattacggttggagactatcatgcatctccgcgggggttgagctcactcttcatggactatgacgaagctgtcaaaggcgacatgagccgacgcagaggagacatctttcatgtcgccgacctgcggggttggatggaagaactagccggaaaagtcatcgccagtcttgattcaggggttaagagtgtttga

SEQ ID NO: 500700 - DNA, 1206 bp, Stenotrophomonas maltophilia
atgctaactttaattaatcctcagctataccgccagatcttggattatccaattggcatcatggctgcccctgatcctgatggtggcgacccctatctcatcgtcaaggcaacaaaagagttccttcttgcagccaagatcattggatccataaaggtctatgtatgtcctgctgatcttggcggaagagcgactctggcgcttgtcttcgcgttctttgatgacgaagacgaaccactgatcatacgtacgccgttggtagatgatgacgagagtcgccatctcttgacgacgttgacgaggccatccgtcaacgcccacttcttcgatgaacatggaagagaactacttgtttaccgagctgagattgctgctccagctgttacgcggagccgcttgcactcactaacgttgcttaattcgaaccttgtcgaggctcagaacatgctggatggagtctccgactggttcggtcgacgaactcgcttagacgacgaagaagctctgacgatcaatctagttcacaattgttttggtgagagccttgcaatccaagacatgaggtacccacttcatcagcatcacggagctaagggatatagcatctcgacattggaacgggaacagccaggcaacttccaggaagaagacatcatcaaatgtcttgcattctgctttccccaaagccaaatctatcacggaccgctacgaacgtccgacaaggaggaaatctgtgatgtccttctagtgaccgatgatcgattgctcatcatccaagctaaggatagtccgaacgttgaacgcatcgcgaagcagaagctaagtcgcaagcaaaccaatgcgatgacggcgttcaagaaggcaattggacagattcggggtgctcagagttacataaatgcgggcaacggaacgctccgctatatcctcaatggagaggagcgggcaatcgatatcactcagaagcagctatttgcgattgcgatcatcaaagaggtatttgatcgagatggtaaggattacgcgagagtgctcaatgcgctgatggtggagcggagcatgccttgctacctcatttcttacggcatgtttttcgagctctgctatcgagtacatgatcccgataagttcttccaattctcagaggaacttgtagcaagtatcaggcaccatcaagaccttccagtgatcaactttcatggctaa

SEQ ID NO: 500701 - DNA, 1344 bp, Stenotrophomonas maltophilia
atgcctcgtagcgggagagccacgcatccagtgctgccgagatggacggtactcccaccaatgaagcccctagcggcgggcacatcgggaaccgaatcactcgctagctactgcttgcgcctatcaaagttgtgtgggattccatggacgcgcttcatctccatgatcgactctgaaagcagctctcagactgttagatacactgactgcgctcggctctctggccctggtccagtttcgattagaagagcccgtgcacttgagcgcttgactggtcagcggctcgttggcacaacgctgtatggcgttggagagatcatttctgggcgatctgaggcgcttcacagagacgcagcttggtgtccgccctgcttgcgacaggccgccgaagaagggcttccgaacttctcgcggctgatctggcggttcgcttcctactctcactgttcagtccacggtgctcgaattgagcgctcctgcccacattgtggcttcgcaagtatcagaaacagcggctcattcctttgcccgaagtgcaaaggatcgctggaagtcggagcccgctatggccgtccgagtcgagtggagagctggacaaatcactgcattgaggagctcattgactggacttctaatcaccccacgcagccacttcgaaaggccagccttacaagatttctaagcgctgtcgatgccgtggacgacgctaagacacgctcctacattccggcgaagcgggaccgagacgacttcgtgaagtaccttcgttggagagacgcgagcgtcccaacccttggccttcggcctgacacgagccgagtagatcttggggatcttctgagggcatcagcgaagcagtgcgtgtccgttctagacatgcttctcaggccggaagagtccgcttcagcattgcttccaggagtccagtaccacttcgaacttcccgcgcttcacggtgaagcggctaatgactgcgccagacttgcacgaatcgtcgaagcgctaactgacgacgtcgactgtgtgctgcctgcgatgcaaggtatcttacgctgcgcccgaatcaggaaggcctacaagagccgtatggcgggtcactactccaggtacgcagtgcagctccgaattcagcgctcgctcttcttggcgatctcacccggtcgaatcaacttagctttccgtgctgcggtgaggatgattgaggaaggtgttgaggaatgcgatctagtggagcgggtcgttaggcagttctgcataccggtggagacctccataggactggctcgatctgccttcactgttctgggggctgatagtcgtagcaatgatcaagatgccctctag

SEQ ID NO: 500702 - DNA, 1041 bp, Stenotrophomonas maltophilia
atgaccgctaaagcaagggacagaagcgacctgcggaagtttgagtatccgttcattccgcacgcacgtttcatgagtacgcaaagtgacctgatgcgttcagtagctagggctcaaccaggcgacttcatctgggtgatcgctccatcctggtcaggcaagagcgagctgcgccggcagctgcttccagcgcttgcaggaaagccagctcactggcgcatcggcagcatcccgctcatctccgtacgggcggttctcaaccaaggagacaagttcaatccgaaggacttcgcgctgcgactgcaccaggagatcaccgagcccgagatcggatggctcagggttgatgcccacaccggcagtcctgatcgatttcatgaagctgcggaactgcgtgctacctcgaagttctggcaggagattcgactacgcaaccccgaaagggagctgcgattgtcctttgaaaggatggcaaaggctcgggggctcaggtacatcatcatcgatgaagtcgcaaatatctgcagagttcagaagacccagagcgctcgaaactacatgttggggatcatggctctgatcgaggagattggctgcacggcgatcatgttcggaacccatgaggcggcaccactgtacgagcatgcgcaagaaatattcaatcgatcagatatcctctacatgcggccgtacaacctgagcgccagttcagagctggcggactacgccgcgttgatcaaagcaatcggcaacagccttccgctggcgggcgtgtcactccttcaggacaacctggaactgattgccctgaacggcggtggtgtatttggtccaaccctgcgatacctccgtcgcgccaatgaggaacggagtcgcgctggtagcaatactctgaacgaagatcatctgcgcgccgcctctggaacattgaagaatcacagcttgttctgggcagacattgatagcttcaatctcctcgcgaatgccaagcgttcccataagctctccgagttcctgagggtcgcaaccgatgcctcgtag

SEQ ID NO: 500703 - DNA, 2397 bp, Stenotrophomonas maltophilia
gtgacaccagacgagctcagaaacaggcttaggactcttgacctcaatgatgaagatagggccttcatccttgaactgttcttcgagggcgccggccgcaaagtcggcgcctatgcgctcgataatgtgatcgtggcgcactactcgaagaagtgtcgagacgtgcgctacctagagagtcacaccgttgaacagaccttcgcatttcagcttgagctggatccggacgtcgtcgcctacatctgtcaagtcacatgccgtggcgtccgaagaggtcgacatgtgtcaaatgcccacgcggacttcctcgtcatccgtcgtcaatcagtggaggtggtggaatgcaagccggcctccaagctggaaaagctcgttcaggcaaagcccaacgaatggattgtggaagatggcctgtatcgaaacctagcctacgaggcttgggcagaagcacatggcgtgacctacagggtatggacatcaccaagggtcaacggcacgcatcatcgaaatctccagttcatggttcatcactgggacgaggaacttagcctcatccgtcgtgaagggttcaatgacgtgcagaagcaactgctcactgggccaaagagcatcgccttcttgatggagcgcattgcctggttcaatgcaggagttgcagcggggctgatggcggataggctcgtatacggtccagttgagtatgtgcccatcacagacacacaccacttcctcctcaccctcagtgaagaacaggcggacgaaattgctgctgaggtagccggaggcgtctcaagtctattcctggacgcgactggcccggtatcgctcgcgagcgcgtctgatgtcgcacgggggactacgctgctcgcacggcttgatcgcatcgaaaagaacggcgaacaggtaccgcgttggctacgtgatgtggcaaaaagggtgaaaaaggcccgagcggaggggcgaaatcctctgaacgagacagtcacgaacttcgccagatgcggcaataggcagagccgactaactgtggagcaaacggagctagttaccgttgtcatacagacgttctggttgaagggcctggccaagtcaattgccgatctgcacagagagctggcaaagagatgcgaaaaggccggggtgcaaacacctggtagaagagcgctggagagtcgcgtcaagaacacatccaaggctacccgagacctctcagtgggcggcaagcgcctttaccaagccaacaggcctcgatccgatccccgcttcagggcaggtacggcactcgccgtgcactcggttctacacctggatgcgaccaaggtggaccacaggtcattcatacagggaacagaggggctggataaggactgtcctcttctctacacaggtcgcgacggggcgtctggctctgtcatggcccacgcgtttgtgtttggccccgctcggcgcgatgggcccatgattctgatcagaaactatgtccgcaagcacggctgcgctccgcactcgattgttacggaccgaggatcagacttgaaggcgggattgagcgagatcgcgctcgcctacggaatatctatcctgactgtgccgaccggaggaggtcgcttcaactcggaagtagagaccattcaaggtcagatcaatgcgatggtaagtcacaggatggatggcagcactaagccggatcaggctgggcggtctgtggatggaagggtgaagagtcgctcgacggcacgaatggagttctctaccacagaggctgaaatagtcgagcttctttacaccaaccttccagacaatcccatccgcagctccttcagtgcgaaggagcgcatggagcaccttctcgaagtggcgccaacctcgggaattccaattgttttcgacgatgatttcaggtttcgaacttcggtgaagctggactccacgaagtacgagtcgacgcggggactccgcttctgccagaggaactatacgaacgccgatctgtctgcaaacctccagtacgaaaccatcttggaagcacgtagagatcctgaggacactaccttcatttggattcagacagatcgtcgtcggtacaaagcatggtgttctctgctctcagagatcggtcactactcgtcggaagaaaggtacttcgagacgatgtgggatcagctgactaggccggaagtcaaaattcgaaaggagaaggcgcaaaggaatgcctatgagcgaacgagcgcggcgaacgaagcgcagcgcacccggggctcgatctcagcgaagaacgaaccgaaggtccgttcaaagaagagcggtgctgagtccataaagcagcccatgaccctcaatatagacttcagcaagatcccggatttgctcgcaagagaggacgctgatgaccgctaa

SEQ ID NO: 500704 - DNA, 912 bp, Stenotrophomonas maltophilia
atgatgctgcaggtagccaacgcagccgagcgtacccgcccttccgggcgcatcgtgattcagaccgacgatgtcacgcgcttcttcagcgtgctggatgcaagcggagggaagccgaatgccgacgatctgcagcgcggctatctgcatgcgggtacggatgcactacgcagcttcactgacagccgtatcggctcgatggatcgtcttgcagatgcgatccagcgcagacctgcgctgtttgccaaagcacgtacctgtgcgacggcgctgccggagatccgcgagggggttgccaaggcactcgatcggttgggcactctgcttccctccgcacgttttccgccggtcaccgtgctggtgggtcggggaaacagcgggggtgtcaccacgcccgacggcgtggtgatcggactggaggcactgtgcaacgccgactggatgcagcccgatgtgggcgaccgtttcgtgcacctgatcgcccatgagtacgtgcacgtgcagcagcccggtgcgagcgttgatgtcgcgcagcccaccctgctctatcagacgttgcttgaaggcggcgccgagtacgtgggcgaactgatctcggggcaaccggccaacgcgcatctgcgtcgttggacgcagggccgcgaatgcgccctggaacgccagttcgcccgggacagcgctggtactgagctgtcgcaatggctctacaacggcgccggcgacgaaacgcgccgcggcgatcttggctactggatcggctaccgcattgccgctgactacgttgcccgcgccgatgacaaagccggtgccgtcgccacgctgctggcggtgcgtccggaaagtgcgccggcactgtttgccgcaagtgaatggcgcccggcgtgtgggccagtggaaaacgggcaggaatga

SEQ ID NO: 500705 - DNA, 375 bp, Stenotrophomonas maltophilia
atgacctcaccggacttcccccgcctgcatccgcatcgctcgtccgccactggcggtgagccctcagagcacgcggctgcgaccgacccgaacgccttcatcgccacgcttcaccgcatcggcaaaggcgcggccgccgatggccaaccttggccggagcgtcaccagatgccgggccgttgcatggcgctgggcgatgcggactgtgcactggccggccaacgcgtgacgttggagctgctgctggcggccgagcgcgtgcgccagaacggcacggaggccgagtacgtgggcgaccgggtgatggaagggctgatcatggcgtgcctgacgatgaacgcacaggccagcgcgcgcatgcagccggacgggtga

SEQ ID NO: 500706 - DNA, 810 bp, Stenotrophomonas maltophilia
atgcaggcaatggtcgaccatacgatacccactggcgccacccgttccggcccacgctggaccctgatctcgctgcgcccgcggggccagaacgtggcgctgcgccgcgccgttgccgggctgggcgggaatgtcctggccctggcgccctggcgcctgcagcgcctgcatggcacggctgtggtgcgccagctgcaacgcgcgctgaactgcgatcgggtggtgttcaccagcccggccgccgttgccgcagccgcgtccctgctgccgctggccgacgtgcagcgcagcccgtggctgaccgtgggcgaaggcactgcgcgcgcattgcgggcacacggcatcaccgaggtgcacgcgccgcagcggatggacagcgaggggctgctggcgatgccggtgctggccgacgtacgcggcctgcgcatcggactggtgaccgcgcccggcgggcgtggcctgattgccgcgcagctgcaggcggcgggcgccacgatcgaacgtgccgacgtctaccagcgtcgcctgctgcgactgcccccgcgaacgctggcgcgattggcgcattcagcacagccgtgggtactggccgtgagcagtggcgaagcgctgcagcatttctggcaacagctttcgccggccgggcagcagcgcctgcgggcgtctgcccgcgtggtggttgccagtgaccgcctcggcgaacaggcgcaggcgctcggcctgcagcgcatcacacgcagcgccggccccaccgctgcgcagctggtggcggccgcacacgccacgctcaccgtcccggcagcgacctga

SEQ ID NO: 500707 - DNA, 267 bp, Stenotrophomonas maltophilia
atggaccttgaagcgaaaagggtaattttcttttctcaacaggatgaacggtgcttcttcgagtggattggtcgaatcggctgcatcgggaatgtagtcggcagaggggatgtcatctatctacccctggatccagatgcggttctggaggaggaggtctgggaactggccgcactgttcaggaggtatcggattccactggcccagctgcgaacgctggaggcaggcaggtactctcgagcgctgcgcgatgccttgcgcgagtag

SEQ ID NO: 500708 - DNA, 450 bp, Stenotrophomonas maltophilia
atgaagcacctgaacgccttttgcctcgtggttgcactgacatcctgtgcggcgcatccgagccgcaccacgaagtgtccgccggcccatttcacctacgtcggcaccgagagcgtcgacggactgacctacgggcgcttccaggtcacccacaatgctgatcagccgcttcagctgtgggtggatgagagacgcaggttgaacccaaggaccgctcgcgcagagatgaggcgcacaggcgaggatgcctggcggccttacaacgtgatccttgaggaaatcacaccgggagcgatcgggctgtcgatcgggcaggaagaacagcagagcgttctgttcgatggtgatggcctgttcctgcccggcgcatccagcgcgggcgcgaattactccatcgtggtacaggatgcagccggttgcgaacatcgctcggcaacgttcattccctga

SEQ ID NO: 500709 - DNA, 525 bp, Stenotrophomonas maltophilia
gtgaaccagctccgccccgttgccctgcttgcgcttgccctggggcttgcgctgtccggctgcaagcctgcgccccaggcggcccccgctgacgccgccgcaccggctgcgaccagcacggccgccgccacggcgccggccacgccggttgccgcggccccggcagacgcgtctgccagctgcccccatccggtcttcgacgacttcctcaagcatttcggcaacgagatcgcgctgcaggaaacgtccactgccgatccgctgctggacagccacatcgacagcgaagccgagccggagccacgcaaggtggaagagaaggtgccgcttgccaaggtcgaatggccggtgatgccggacccggtcacgctgcagcgccagggccgcgagatgcaggtcacccgcctgcccgatggccaggtacaggtgcagatgcgcacccccgataccagcgaccagcagatctacacctttgcccagaagccgtgctggcaactggtcaagcgtgaggacgaatcgatctga

SEQ ID NO: 500710 - DNA, 573 bp, Stenotrophomonas maltophilia
atgcgtctgtctcccgttgcccccgtgctggccctgatgcttgctgcctgcagcggccctgaggcggctgtaccggcggcccctgcttccactgacccggcagcgacgccggccgcacctgcggctgccgttgcggaccattccacccctcttacgcgcgacgagaccggcatgcatatcgattgccaaggcacccgcctgcacctggcggcccagcccacccaagacacggacgcttcccggctgaccacgctggaaattgaaaaggacggcgcacgccaggccattgctgcgcccaaggagatggacggctataccgccgttggcctggcctgcgtgcaggaccgcagcggtacgccgtacttcgtcgtgcagtacggtgaactgccgttcggctgcagcttctgcgagtggtactacctgtacgacgccagtggccgccagttgacccacagcacaccgccgctgcgcggcgcggaaggcgaggagcaggagcccaacaacgacgagtacgagaagttgatcgactcgctcggcatcaagcacccggaggtgaactacatcgaagactga

SEQ ID NO: 500711 - DNA, 1725 bp, Stenotrophomonas maltophilia
atggcagacatctaccaggacatggtccagccccgcggggcggcctacagcagtgaccgcatcaaaccgtggagccactaccgcgagccgatcgaccagagcgacggccgcctgcatggcaactcccgccggtggggcgatgcgaccccggaagtacagtcacgggtgatcgacacgatcatcgagtcggcgcgcgagaagggcctgaccccgcgcgaaaccgcgcacgtactggccatcgcccgcgttgaatcgggcttcaaccccgatgccgccgctggcaccacctcggcctcgggcctgggccagttcatcgacaagaccggcaaccactaccacctcaacaaccgcaaccgcttcgacgtcggcgcacagtccgacgcactggttgaccattacatcgataaccgcacgctggcgcacaagcgcggccagggtgaggagtacatctacaagtaccaccacgacggtccgacccgcgattacggcggcctcgccctgtctgaaaagaaggtgatgccgtacgtggacaagtacgagcggttcgtggagcagcgcctgggactgacccacggccagtcccagggcagccacgcggcccccgccgtagctgcggccacgcacgcgcaggccaagccggcagcggtgcatgccgaaggccagacccgcaccttcgagcagacgatgcaggtgatgctgcccccgcagaacggggtcaagccgcacattaccggcgagttcggcgaacaccgcgcgcacaagccgcacggaggcaccgacttcaactatgtcggcggccagcacggccgtaatctgcagcacccgaccgtcaacgcgccgatctccggaacggtgacgttcgtcggtggcgactacggtacggtgaagatcagggatgcacagggcaactcgcacgagatcctgcacctgcagtcgacccaggtgaaggaaggccagccgatcaaggcgggtgagccgatcggtaccatgggcggccgtggcccgggcggtgcgggtcagtatgcccagcacgtgcattatcagttgaaggatccgcacggcaagctgatcagcccgcaggacttctgggaccacggcaagctgaaggaaaccggcaagggtggccattcgcatgacgccgaccacaacggtgtgctgcgccagggggccaagggcgaggaagtgactgcgctgcagaaggaactcaaccgcctgggcgtgcgcgacggccaaggcaacccgctgagcgaggacggcaagttcggtgccaataccagggacgcactgatcgcctaccagaagcagcacgggctctccgccgatggcgtggcgggtccggcgacgctgggcaagctggccgaaggccgcagccatgccgaggcggcgccgaaggggccgcaactgggcgacaaggcgcatccggatacgccgctgcacaatgcgatccgcagccacatgccgggcatgatctgcaacgagatgagcgcgcatgtgaccgcccaggccaaggccgccggcatcgattcgccggaaaagctgcagggcgtcaccgtgcaggatggcaaggccttcgtcgtgggcaccgttcccggcttccgtactgcggtggacatgacccagacggcacctagcctgcaggagaccagcgctgcaatgctggccaagcacgagccttcgcagcaacacgtgcaggacgagcagcagcgagtggccatgggccgttga

SEQ ID NO: 500712 - DNA, 1413 bp, Stenotrophomonas maltophilia
atgagccgggtgctgcggtggcgcaacgcatggcagtggggagggctggcactgctgctctgcctgttgccgctgccagtgctggcggcggtcccgattccggcactggacgacccggtggtggacaccgccaacgcgctgtccgccagcacccgcgcaacgctgcgcgagcaggcattgcagctgcaggcacgcaaaggcgcgcaactgcaggtgctggtggtgcccagtgttggcgatgacggcatcgaagcctatgcacagcgtgtcttcgaccagtggcagctgggccgcgccggtgtcgatgacggggtgttgctgctggtggcggtacaggacaggcgcgtacgcatccagaccggctatggcctggaaggcaccattcccgatgcctatgccgcgcgcatcatcgacaaagccatcgtgccgcgcctgcgcgaaggagacctggaccggggcatgctggacggcagcaaggtgctggtggcgctgatcgatggcgagccgctgccgcccgagcaggattcatccgcacgcaacctgttgcctgcggattggcgcacaggggattcggtcgttgccctgacgttgctggtggggttcctggccggtctgtggcgatcaccgccgcgcctgctggccaccaggaccgaggccgagtccagcggtaaacgccgtgagcggcggcgcaaggcactggcagccaatgcggcaatgcccaggccgaactggccgacattgcctgcctggggcaggccgttgctggtaacggcggtgatggccgctgggttggtttcggcgacgctgctgctgccgcggcatgtgctgcctgcgctgttcttcgtgctgttacccgccgtaccggtggcggcgctgctggggtggtgctggcgtcgcagccgtggtgtgcgcatcgtgctgtgcggcatgttggccgtcagtatcggtttctttgtggtgatgctggtccgtggtcagttgccgcccagccttgccctgcacacgttgctgaacctggcggtcgccattgccgccatgctggtgttcttcctggtgcaggccggccgcgcgcgctggcggaagaaccgcaacagcttcgccgtgcgcctggtggtgctggtgctgttgaccggcggctatgcgctgggcgcgctgctggccatcgaccgggccagcgacgagaacgcacgcgtgttggcgacgatcgtgtccagcgcaagcacgctgttcctgtacttcatctgggtgttcaccctgctgcccggcgaaaaagcacgcagcggacgaaggtcgtcccaaggctaccgttcctcgtccagcacctcgtcgtcgagttcgtcctcaagcagttccggcagctggtccggtggtggtggtcgcagcggcggcggcggcgcttcgggcagctggtag

SEQ ID NO: 500713 - DNA, 1122 bp, Stenotrophomonas maltophilia
gtgcatttactgcggacctctagggtgccgacagtcgagctcaataagctcgttcccgcagccgcggcgatcgcgaatgatctgactccaaggttgcagcccagctttccacttcttatccaagacgacgggcatcttcattggggcgcctttgccttccttctagacacgtttcgacttgactccacccgaaatagggagagaacactctccacatatgccgaggggttgaagagctggctagagttcgtcgaacgaagcaatggagaatggacaaggccgaccgcggtcctcctcagtgagtaccggcgctacttatcgtcagaccctaaccgaaaaaagagattgtccagcgaaacggtcaatcttcgtacaacaacggttcgagagttctacaagttcctgcgctactgggatggggcgggtctatctgattcctatggagattgggacgccgagcccatcacccagtttctcgctcgaacgagtcgacttcgtcgagcgaaaggctacaaaaggaagttgcgtgctttgagtgcggaagagacgtcgctgatcgctaccaacctcaaaatgccgtattccctcatgttcctttggaccctcggtaccggtgcgcgccgcacaactattgccaatctggagatggcacagctccctaaagctatactcagaattaactacgtggagacagaaacaaagggcggcaagatcatcaacctcgtcgttacggctcgcctggcgcagatgacgctcgattattgtcagaccttgaggcacaaggccctagtcaagtcttccaagaatcaagagcggatctttctgaactcaaagggaagtccggttacctcaaagtcctactatcaggcgttcaggagggtggcgaacagacttggtctaaaagtgacaccccacatggcaaggcatacctttgctgcgaacatggagagtcgccttgcagatatggagcgacggggggcaagcatcaaccccatcaaagtcattcagcacctactcgcgcacaacagcgcggagactacggagctgtatctcgcctctgttagttcaattgatgcaggcacgcttcgggcgattctggagactgaggaggccttggcttga

SEQ ID NO: 500714 - DNA, 1623 bp, Stenotrophomonas maltophilia
ttgagagcgcatgaatccgtcagctttgctggtgatgaacccggagatcctccggacagctacgacttctcgagcttgggtctacccggcacgccctcgcgtacgctgcttgccgccttctccggggtaacttctacgtatagggttgcgagtcggaagcaggcatgggcatccctccgaaagttcgcaaagttcctcaatgagactaagggcgatccctggaagaacatgctgtcctgcacagtctcactgaagtacgaggagtggctaaagaatgcactgctgttgaagactggtggcagccactacaacttcctgcgattgctctacgcatggcttggagcaaacgacgcatcaagatctgtggtatggatgaatgtccactttcctgtcggtcgctttggccgagaagaagagtgtcctagacagaatatcctctcgcctgatgagcttcggagtgtcctcgtcgcgtccaagagaggcattgacgacgtcaggtcgcgcatgggcgcaatgaccgccttggccagcggagcgcaagttccgggcgtatctacgcgggatagagaggtcttggatcgaatgcgtgagggagtggcaaatggaatctttggaaagcgaaggctctgtgacgccgggtacgcaagtcatcgcagtagatatcgagctctaaagaagtatcttcacctcgagatatgcgactacatcccatacatcgtgtacatgacgattgagactggagcgaatcctggagggctgatgtcactgcgcgtggactgcatcagagatcacgccgttgatcctctcaagaaggtgctcacttgggataaattccgggcaacaaagcagagctcctccaccgtaactgctgaaggcgcttacgccatacctacgctgatcgcagagctgatcgagttcacgtcttcattaaggctattcgccggagctcgcgccgacagggtgtttcttagccattgtagagggcggatagatcgagcctcggtgcagggatggcaccacgaactcgagaaattcattgagcgtcacggacttccagatttcaactttgttgacttgaggttgtctggtgcaaggattcttggcaatgggggcgctcgcattgagcagatacagtcgaagcttcaacataagcggtccagtacgactggtctatacatcagatcgccggaacgcaggggaatggcccgtgaaaagctcttgggattcatggggaaaattgtccagtcggcaaatgacttgagacgctcacccaagcactacaagactgctcaaggatacgactgcgtcaacgccacttccggtgaagctcctggttctagaagagggaggaagtgcacagatttcctgcactgcgcgttctgccctaatagcgtcgcagttctcgatagcccgcgtcacgttgcgcggatggtcgctgcaaatcgcgagcttgacgccatgaaggcgttggcggagtcgtcaagcgatgcttcggctaggtatcgctatgcgtacgaaggggcgcactgtattctcgcggccctgttgagtagggttaccaaagacgtgcttctagcggcagagaagctttctgtatctatccctatcatcggactggagtag

SEQ ID NO: 500715 - DNA, 1818 bp, Stenotrophomonas maltophilia
atgacgtactcgcgggcttcgaagtcgtcaattgctgaggccggccctgagggcatcaaccttgagtcctttggaattaactttgaagacgacgagtgggttcttagaaggcagctcaccgatggcatcgttgagaatttacggctgaacttctctcacgtagcactcggttggaaagagcccatcaagcggtacatcgcgcatgcaatgcttggccggctggcgcgatcgacacggtatgctcacgtgatctacgagcgatacatcgttctgcggagcttcgcagactggtgctatcagcaaggcgtggatagtccgcaggatctgggtgtcgagctcgtctctctttggacagctgccagtcgggtgactgggagatggaaggccggtgcgactcgaacgcgagcaaaattcatcgaagttgaagactttctgcttaacgaggaagggctatccccagatctctgcgccgagatcatccgggtgggtcggcgattggcaagggaagcgtcgctcgcggcgagtagaaggtccacgtcaatcgacgtggcagaggaacagtccctcgttttcctggctgatgcgattaggttggtggaggaggatggcgctgcgattgcaacgttcttggagcttgcagcctctttggaggttggcagattgacgtcgggtggtagaaggactgcggcgttccgccagcgaaagagggatctccccatccctcccttcagatcggcagcactcagatacctggatcctcgcgagggttccgatgagcaacgcatgctcaaaattgctgaaggggcagccgttctcattatcgcaatgcttagctcgatgaggccctccgaaatcagaaggctcacaacgatgagtgcgaagcccatcgatgaccttgagagcgtgggctcatcaggatcctccgcgattattgcgggcgttctaagcaagtcgcgaaggcgtcatgaatgggtagcggcgcctgcggtactcaaggccatagagctggttgatcgtcttggtcgacctatccgtgaggaggtcggcaccaacgcgctattcgtgctggcgatgtatagaggtcgcagacgggccgcggcgcgagacgtacatcgagtagctagggttgacaggtactcggcgctaagatccagcatgagagctttcgtagaggcgagcatgcctgggttcgacacgagcaagatcacatttcgccttatgcgcaagttcttggcgcgcttcatcgctaggcgtgatcgctctagcttaggcgcactggcttatcagtacggtcatttggaaaccaagataactgatacgtactacgtcggcctggattccgagctatccacgctgctcgcagaggagaatgccaacgaggttgttggtgccatggatgacttgatcagctcagagtcgatatacacgaacttgcccacatctgcggtcgctgaaagtctatcgcggataggtgatgtcctggagcgcgcatcgactagctctgaggtgatgaagttgcttggctcgggcgtggttcttggcccgtgtgactggggctactgtttctatcgtgagaatcgaagcagatgtgagggggacggaagtgggccaaatcccgcgaagcgtagtccgtcgacctgcgcgggttgcctgaacttcacagccacggcaaaacatgctccttggtgggagctgcgcaggcaagatctggttagcttcctaagcctgcggggaattcctgagcagtcacgtctcattgcccaggaacgtcttgcctcagtgcagctgatcctgaatcatatcggagctgaaaaatga

SEQ ID NO: 500716 - DNA, 1002 bp, Stenotrophomonas maltophilia
atgctcccgtcatcactagcagaagatctgtcccgcgctgcggaacctgtgatcgcgaaggtccttgcccatggtggggcgcgtaccggcaagcctcgtggcgaagtcagcgccgtgcgtacgatgacactcgatggattcgacgagatcgccaccgcttggtcgccaatcatcaaagctcatggctaccgcatcgatctgcgttcggtcttctgtcattctagtccacaggttaagtttgagccgattccgcaccccaattttctactaggaaagagccctcgccaatgtgagctggcggacctactgattgttattgaccatgtcgatcgctccaagaatgtcgacgatcgccgcgcggtcttggtacaggcgaagatgcttaaaggcggtgcggtgaaaccaaccggacaggaatgggtccaacacgagttgctcgcctggctccctaccttcaagttcgttgatggcgcatatgacacgcgcgtccgtgaactcggccgaacgccatcgatcggcttcccgcagcaaacaagcgagtatggtggactggacctcactagctctccgccccaatggcgacatgagctgacgcaaactatcgctccttggtttcattcgccaatctcgttggctgcgtatttgggggcaatggcgacgggccaacctctgtgcggtcggcaggctgttagagggggggcggacgattggtcgttcactgtggacgaactgcttcgtgtgacgggtgcgcgtccgatcacgaagagattcggtgtggctcgtggcaacgacaatgttgtgagcttcatctcagacacgttcccagcgtatagctcaagctccatagcggagcctgcctacggcgcctcagtcggcagccctggaggtaacggtggcggcgatgaggatttcctcgacgcgacgactccagcttggccagaaggtccgatcagtactgttcatctaacaatcggctcgatagatgatgggcgccaagagtga

SEQ ID NO: 500717 - DNA, 1347 bp, Stenotrophomonas maltophilia
gtgcaacgaatatttgagatctaccacaacgacgaggtcgttcgcctagttgatcaaagggccgtcgatgcatgggataatacgttcaccgtaatcgtaggtgagaacggcgtcggcaaaagccgactgctgtcagagattgcgcgatcacgtgtcagtgaccttcaacgcctctttggttccggtcgctttagcaattccacgcaacccatggtcatcgcagcgtcaactagtccgttcgacaagttccccgcgccaccgaggcgacctgcgaaggcacagaagaactataggtacgtgggaatgcgtggcgagggcatatacggcgcatcatccgctgtttcacttctttcctcagcagctcgcgggttgctttcgaagctggcagaagctccacccagcttgaaccttcttggtgtcttggactcgctgtccttttttccagtcttccactttgtcctgaagccacagttccagcgctcgaaggcggattcccagtcggatcgctcctcgcacaaaggtatgaggacgtccttcaggcaaggagcctacatatacacaattgatgatcgtctcgcagcgatcatcgacagcaccgatagcttaccaggagtattgcaagacctcgcaattgcttccgacttcatggactcgccaggggcgctgcgcttgaccgtggatttcagcaataacatcgcaagcattggccgcactcctgtgaagtcgaaggatctggcagccatactgaggctgtttgatgagaatcttgtcaggctaatggatgtcgaggttgaaaagtatgggcacggggtttttagccttaagcgtgcaagctctggcgaacaatgcctactcgttttaatgctcggcgtggcaggccatattcaggatcactccctggttcttatagatgagcctgagattagcctgcacccagaatggcaagagcgatttattgagcttctgcagtcggcattctcacgttacaaaggttgccagtttgtaattgccacgcactccccgcagatcattgcgcgcctgaccggcaatggatcttttatctggcatttgcgcaagaggaagctatatcctgcgtcgcagttcgagggccgatctgcggactatcaactggctgagctctttgacgcgcccggaatgatgaacgagtatgtttccaggctctgcttcaacatcattgcacaggttcgcgccggccggccgatcaccaatgagttgaagcatgagatcgattggcttttcaaggcacgagcgaagatggactctaccgataagctgagagctctgatcgactcagtaggagagctcgtccgccaggggcagtcatga

SEQ ID NO: 500718 - DNA, 1899 bp, Stenotrophomonas maltophilia
atgagcgctactgacgacctccaagacgcagaggccgatgagctgattatcagctgcctggatctcaccaagccgcgcagcttctttctctatgccggcgcgggatcgggtaagacgcgctcgctcgtcgaggctattcgaacagtttgtgagaggcaaggtcgtgatctttcgttaagtggtcagagaattggtgtgatcacctacacgaatgcggcctgcgacgaaatcaagcaacgcctggagtttgatccccgtgtagaggtgtctaccatccacgccttcgcttggtctctgatctctggatacgacaacgatatccgagaatgggtggccaatcggctacttcaggacatcgcagagttggaggaagcgcaggcgaaagggcgggcgacaagcaaggccgcaatcgaccgcgctcgctcaatagagagcaagcggcgccgatacgacaacctaaactcaatccttcgcttcatctacagcccaacgggggataacaggacgcgcgactctctcaatcactccgaggtgatcgcgatgacggcagattttctttcccgaaagcctggtctgcgtcgccttctcgtcacggcgttcccagtgctgttgatcgacgagagtcaagatacaaaccgtcagctcatggatgcgctccttgcagttgaggcgcatcaccgagcaagtttctgcctcggcctcttcggtgacacgatgcaaaggatctacgccgacggaaaagagcgtttagctgaggctattccagagcattgggctcggccgcgaaagatcatgaaccatcgctgcccagcaagggttgtggagctgatcaatcgcgtccgacaagaagttgacgacgagaaacagaccgtacgtagagatgccgcagagggcacagtgcgcctcttcattgcgaaccaagaggcggacaagccagctaccgaagcggctgcggccgcacggatgcgagagatcaccggtgacgacggctggtcctcctctgatgccataaagatgctggcgcttgagcacctgatgtccgctcgtcgcttcggcttcgaacggttcttcagtccgctgtacgccgtcgaacgaatcaggacaagcctcctgcagggcacaggggccggaatcggcttctttactcgtgaggttctgccactcctcgcagctcttcgggcatcggaccgcttcgcggttgcgtcgatcgtgcgcaagacgtcacccctacttgaacgccaggtccttcaggacgctaatgaagatcaggctgcagtgctcgctggcgcaaaaactgcgtgcgatggattactggacttggcatcgagcgacacggcgcctacggctaagcaagtgctgcgctatatcgccgagaagcgccttttcacgatcccagatgttctagcaccctttgtggcaccggacgtaccggtcgaaggggcggatgcagccgccgagggcgaggaccaggacgaggaagatttgaacctcaagacggagctcggtggctggcggctggcgctggaggcaacgctggacgaaatcgagcgctacaacagctacattcaaggcacttccagtttcgacacgcaccagggagtcaaggggctggagttcccaagagttatggtgatcgtaagcgacgatgaggctcgtggcttcatgtttgcctacgagaagctgtttggcgaaaaggatcaaagcgagaccgatctaaagaatgcggctgccggcaaggaaacgtcgattgatcggacacgtcggctcttctatgtgacctgtagtcgggccgagaagagtctggcggtagtctattacgcagagtctgttgagatcgcacaagcggcagccctgagacaggggtggttcgccagaggagagatcgagatcgtcacctag

SEQ ID NO: 500719 - DNA, 2349 bp, Stenotrophomonas maltophilia
atgcatatcaagttcgttgagatttctaactttcggaaacttctttcgatccgggccgaccttgccgcagcgacgacgctgtttgtcggcgcaaacaacagtggcaagacttctgcgatgcttgctctgcggcgcttcctgtcgccacggcgctgccctttcgagatgcacgactttactctttgccactggcccacgatcatcgagatcggaaagagctgggtagaggcacgtgacaaggaagaggttatcgatctagtcatcgagccctgggtatcagtcctcccgacactggatctttggctgcacgtcgagcctggcgagatgcatcatgtgcgagacctgattccaacgcttgattgggaaggtggcagcctcggcgtccgtcttcgttatgaaccgaaggacttgaagctcctctacaaggatttcataggagcggttggcgatgctgagacaatgcggacagctgcagttgccgccgtggcagccgagcacccagacgccgatccgccgccggcgccacccaagctgacgatctggccagagagtctcgttgacttcctcagtaggcgcttgtcgacgcacttcgcgattcaggcctattcgctagatccagccaaactcgcggagccgagcaagtttcaggcccagccccaagttctgcctccaacgtcgctcccgatcggaagcgatgtcttcgccggcctcattcgcgtgcacgacattccggcgcagcgtggatttggggaggagcaaccatcccaggaggacgaggattcacaaggcgccgtcgcgggaagtcgcctatcagaccaactgaagagctattacgcaaaacatctcgacccaacgaaaggacccgaccccaaagaccttggcgcactgcaggcgatcgaagccgcgcaggatgcattcgacaagcgcctgaccgagagcttcaaggccgctttcactgaggtcgaagggatgggctatcccggcgttaccgatcccaggccaagggtatcgactcgcttaaaggcgatcgatggcctcaatcacagtgcagccgtgacctttgaggtcgacgtgatttcggacgacggcggaatgacgccgctgttgcgcctacccgaagcaaacaacggcttgggatatcagaaccttatctcaatgatatttcgcctgatgagcttccgagacgcgtggatgcgcgtcggtaaggcctcgaaggcgatatcagcggcccacatcgagccgctgcacctcgtcttggtcgaggagcctgaggcacacctgcacgctcaggtccagcaagtcttcatcaagaaggcgtactctgtgcttcgcacgcatgagcacctcgggaatagttcaaaactgcgaacccagctcgtggttagcacccattctagtcatgtcgcgcacgagacttctttctcttgccttcgctactttcgccgactaccggctggcatggccgcaaatgtgccagtctcaaccgtgatcaacatgtcagaagtttttggggccgatggcgagacggagcggttcgttacccgatacctgcgcgcgcaacacgccgacctgttctttgctgatgccgccatcctagtggaaggtccagcagagcgaatgttggtcccaaatttcatccgggcccactatgacgagctcaatcagtgctacgtgacgttgcttgaaatcggggggagccatgctcacaagctaaggccattgatcgagcatctaggccttctgacgctagtcatcacagacttggacaccttaacgaaaactggtggcacttcaactcagcccgcaaagggggctggtcaaaagaccaacaacgccacgttaaaaacatggattccggcgacggatgatgttgacaccctaatcgacgctgatgataagtcgaaaactcagcacttcgatggcgatctgctttttgcagtccgcgtcgcttatcagatgcctgtggtgatggccccagccgggggcgcgaagcaggaaatcgcatttccgtacacctttgaagatgcgcttgcattcgaaaatattgcattcttcgctgagctggcgggaaccgggctggtgcggaaatttcgggaggccatcaaggccggcggcggcgcagctgcaattggcaaccgcatgtatcaggcgttgaaggttggcaagaagtcagaatttgccctcgacgtacttgaggctaatgggttcgataccctagttgtgccacgctacatcgccgagggcttggagtggctactggctcagctaaagaagaagcaggctgagattttgcctgacaccaagccttccgaaccgagtccaccgcagcccgagcaggcctcacgatga

SEQ ID NO: 500720 - DNA, 1002 bp, Stenotrophomonas maltophilia
atgactagcctatccaagccagctcagattaccatcgaaccagtacagggaggatacgatttgacgctgattctattgggccatgagttcggccgcacggaagttcgacagcaatttcggcttcaacacaaggatccgagctaccggggtctctttgccatttccgacagcgcgctttcaagctctgaagtacgtgatgacggcgggatgaagtacaccacgttgttcactggtattgagaaggtcaatgaactcaagatccaagtgggacgacctgacatccttcgcaatggccacttcaccaacaatttctacccggcccaccaggctacagcgttcttagcttttgctggcaacgctaacgaagcccaccatgtgcttgcctcgatccgcgaggacttagagaaccttcacttgagctttcgatttgacagtcaagagggtgaacctaaaggacacatcatcatcccgcgaagtgcaagcaaccccatgagcgagcgcgggtactcgtgctcggaagacacgtttgaccccgaccaagtccagcacctctacacggcagaccttttcgtctctatcgcggctcaggcgattcagcgcgccttgcagtcttcaatcgcgtacagctccacaaacacgctcccgcggactttgtccacatacgcactcggcatttggtgcccggttttgcagcaacacaatctttatcggctgactccacgggccaaactggtcaatggccgctttacctttgttaccgagccggaagtcgtaccaaaagaaatggttttggcactcggcacgaaagtcgtcgcagactccctacctattcaggaaacctacgataagtcgctagcggaaggcgaatcgactgccgaagccatggtcgcacttgtagacgaggcagttgacaagcagttttccgaattcagtgggcgtcctgttgatcggcctattaaccaatatcgcctcaacaaaggcctgtttcacgcgctacgttag

SEQ ID NO: 500721 - DNA, 927 bp, Stenotrophomonas maltophilia
atgagcctggcgctggtccacagccgtgcccgcgccggggtcgatgccccgctggtgcgggtggaagtgcatctctccggtggcctgcctgccacccagattgtcggcctggccgagaccagcgtgcgtgaatcccgtgagcgcgtgcgtgccgcccttctttgcgcgcgcttcgactttccgcagcgacgcatcacgctcaacctcgcgcccgctgacctgcccaaggaaggcgggcgttacgacctggccatcgcgttgggcattctggcagccagtggccagatcgatccgcagtcgctgctgcaatacgagttcctgggtgagcttggcctgaccggcgagctgaggccggtggccggcgcgctgccggcggcgattgcggcggctgatgccgggcgcatcctggtggtgccaccgggcaatgccgccgaggcggccctggccgagcacgccgatgtgcgcgtggcccgcacgctgctggagtgctgcgccgggttgggcaatccgcgtctgttgccgtccgtggagcgcgtggacacgacaccgttgccactgcccgatctggccgacgtgcgcgggcaagcgcatgcgcggcgtgcgttggaagtggccgcagcgggtggtcaccatcttctgctgatcggcagccctggctgcggcaagacattgctggcctcgcgcctgcccagtctgttgccggacaccgaggaggccgaggcgttgcagctggccgcgattgcgtcggtgagtggcgaagggctggatccgcggcgctggcggcaacggccgttccgctctccccaccacagtgcgagcgcggcggcgctggtgggcggcggcaacccgccctgccccggtgagatctcgctggcccatcacggcgtgctgttcctggatgagctcacccttaggttgtcaagttga

SEQ ID NO: 500722 - DNA, 1035 bp, Stenotrophomonas maltophilia
atggaaaagttcgaggagatcgatcaccgtgttttcctttttccttggggcttggcgaagcgctttcctaaacggacccccatggggacctggctcagttgcataccaatgatgagcttggcgttggcgccatcggcaagcgccgagacggtcacctacattcatactgatgcgcttggttcggtggttgccgagaccgacgccaatggcaacgtggtcaagcgctatgactacgaaccctatggggccgttgttggtgggcaggttgcggatggacctggatatacgggacacgtgagcgacgctgccactgggctgagctacatgcagcagcgctactatgatccccacttgggactcttcctctcggtggatccgatctccacgcattcaagtccgaaacacttcaatcgctacagctacgcttatggcaatccgtattccttcaccgatccggacggaagagttccggtaatgccattcatctatggtgccgtcctgggcggcctcgcagatatcgcagtccagaaagccatgaatccggataagcctatcgacaaagtggaggctggcattgcggctgcggttggctctgtctccggaggcgccggtggagtagccgttgcggcagtcggatctggcacgatttcggtagggcgtgcagttgctatacagaccgtggtcaatgcggtggcaggcggtgccggctccgccgcagagagcgcaatcaaagggcagcccatcacggcggagggcgtcgcttcaaacgcgattggcagtgcagcgggtggattggcagcctccggggttggcgttgccatgggtgatttcgcaggcccagctgcacggggatcactccaacggctgagtcaatcccgcggcccaggtggaccgaacatggcaactgccactgcgtcaaccggaactgccattcccaggcaatcggcgctccagggtgcggcgtcccaagcgggccagggcctggcgggagcaggggcgactatcgtacagaaggacttggagaagaagaaatga

SEQ ID NO: 500723 - DNA, 210 bp, Stenotrophomonas maltophilia
atgagtcccttgttgaaaggcttcataggcactcagcttctcgctgcggtctttggcgtttcgtacttcgcagttctcacgtaccgcaattacccggacgctatgcacacgggattgcgtatttggggctacttcgcggtgatctttctattccttcaactgcttcttgcgctgaagcagtggtgggaaaattcgcatcgaaggcgatag

SEQ ID NO: 500724 - DNA, 357 bp, Stenotrophomonas maltophilia
atgaccacgccgcactcccctcccccgcgcccgatccagcaagcgccctcggccactccggccccggaccccaacagcctcatcgccaccctgcacgccatcggtgccggtgccgcagccgacggccagccctggcccgagcgacatcacctgcgcagccggcagatgcagttgtccgacgccgactgcgccctcaccggccagcgcatcgttcaggagatcctgctggcggccgagcgcacgcgccagaacggtgagcccgaacagtacgtcggcgaccgggtgatggaggggctggtgatggccgatctggcactcaccgccttcatccacgagcggatgcgacccaaggactga

SEQ ID NO: 500725 - DNA, 810 bp, Stenotrophomonas maltophilia
atgcgccgctggctccttctcgcctgggctaccctgcccttctccgccgacgccattgtcatccgcagcgatgtggatgacagcgcctaccgcgtaccggcatccgcgttcccggccttggtcgacctgcccggtgagggccacggcgtcctgatcgcgccgcgctgggtggtgaccgccgcacacgccgcgcccatggaaggcatggacaccgaggtgcagatcaacggtcgcccgtaccgtgtcgagcgcgtgttcgtgcatcccggttaccggcgcatgcccgaagcgcttggccaggcggcgctggcgtcaggcaacccaggccccatccacgccttcctcgccgcctccgatgacatcgccctgattcagctggccgcaccggtcagcgacgttgcgccggttcgcctctatcgcgggcaggccgaagcgggaaagatcgctactctggtcggcaagggggccacgggcaccggcatgaccgggctggcgccgggtggatcgcaccgcggcatcctgcgccgcgccgaaaacgcagtgacaggtggcaatggccgctatctgtggtatcgattcgacgggcccaacggcggcctgccactggagggcgtgctcggcagcggtgacagcggcggcccgttgatgatccacggcgctcatggctgggagctgatcggcctgggctcgtggatcaccgcagtgccggagcatgcgcttgaagccggctactacgggcaggtggtgcacaacgtgcgcatctcgcgctatgccgactggatcgacaccatgatacgcaccgcgccgtag

SEQ ID NO: 500726 - DNA, 1245 bp, Stenotrophomonas maltophilia
atgaaccgcttgagccagctcaccgccaccgccctgctcgccgtgtccggcgccgccagtgccgcatccgccccgcactgggtcgccagctggcaggccagcccgcagccggtctggaacgcggatttcctgttcccgaccctggtcccggccacactgcaggaccataccttccgccaaacggcgcgcatcagcctgggcggcccgcggctgcgggtgcggctgagcaatgcctacggcacccagccgctgcggatcggagcagccagcgtggccgcacgcgcgggcgccatcccgcaaccgctcagcttcggcggccagcccggggtgttgatcgggcccggtcaggaacagctgagcgatccgctcccgctggccacggatgaccgccaggcagtgcaggtcagcgtctttgtgccggggccggcaaccgttcagacgttccattgggaaggccgccagaccagttggatcgcccccggcgaccagagccgggcccaggacctgagcgcagccagcagcaccaccgcccgcctgctgctgaccggaattgacgtcgaggccggcgccgacgcgcgcagcgtggtggtgatcggggattcgatcaccgacggtgccaccgccagcctcgaccaggaccagcgctggaccgatcatctggccgcgcgcctggcagcgcggggcatagccgtggtgaacgccggcatttccggggggcggctgctgcgcgacggcatgggtgaatccgccctggtccgcttccggcgcgacgcgctggaccagcctgcggtatccagtgtgatcgtgctgatcggcatcaatgacatcagctggccaggtaccgcattcgcccggaaccaggcccggcccacgctggccgaactgcaggcagggtatcgcgcgctggcagaacaggcccgccaccgtggcgtgcggatcattggcgccaccctgccgccgtttgccgacgccctgcccggcacgccactggacgactactaccacccggacaaggatggcctgcgccagcggatcaatgcctggctgcgcacggacagcccgttcgacgcagtgatcgacctggacgcggcgctgcgcgacccggccgatccctcacggatggccgccgcctacgactccggcgaccacctccacccgggtgatgccggcaaccgggccatggctgaggcggtcgatcttgaggtgctcatggggccatccacgcatggcgtggatctaccgtaa

SEQ ID NO: 500727 - DNA, 300 bp, Stenotrophomonas maltophilia
atgaacaacgtgatgggaatcgccctaggcggcatgcgtgcggcccagcagggcgtgcaggtggcagcgcacaacgtggccaatctggcgacccccgatgcgcagcgcctgcagttgcagcgcggtgccactggacagggcggggtgcaggcctcggtgactgccgccggcgccgatgtcggtgcaccgctgggagatctgctggcggcgaaagccgaggtagtggccttcgccgccaatgcctcggtgatccgccgccaggaccagatgctgggctcgctgctggatcgcgaagcctga

SEQ ID NO: 500728 - DNA, 2004 bp, Stenotrophomonas maltophilia
atgaggcattatctcagcgcacttccgctcctgcttgcgggtatgacaagtccacacgtcgtgcacgcccaggacacatacaccggaagcaacttcaagttcctctatgcctacaacatcatcggcaatgatgacccgaccattcgctcccagctgaccgagctacacaaggccggcgcgaacgtgattcccgtagctggatggaatacgggtgaactcagctcccgtttacaagcgctgcggcgggacccgctgttgtccagattcaaagtgctgctccagttcaacgggcccagtcacgacgcttggtacgcagatcccggcagtgcctgttctcctggcaatgagcgtctaccagactggcttcaacaggagcttgacgctcttgctgcacttgccatgcagaacacagatatcgtagtcggttactacacctttgatgagccagctcttccacagacaccgcagaacctcggcatctgcaagcgctttcaggaactggtctacgaaagactccggcgcgcggatcccgatgcatccgcgcgcccggtgattgtcgccaatctgatgggcacgttgagcgatgcccagatccagtacgcgatgagcccaaaggcgcaggatgtcgtcttcgttgaccagtatcagaacaccgtcagcgaacaggtcgctcaataccagaaatggaaggggcacggattgctgggaggcggaatggttccggtccttcctgctttcaactacaccagttgcaatgaccccggactgcgatccagcttccgagcgaaactcgaagctgcattgcagaccgtatatggagcggatcgcccccgcaatctgggcagcgcctactttgcattctggccgggtgcacgccctgattttcagttcgacgggcagaactgccctgtgatcctcaattccatgattgatgacctcacgcatcagccagacctgcagatcacgcggatcgaaacgattccgagccagttcaaggccggggagccggtccgtttccgcgcgaccatccggaatgccggcaatgctccatcacccatgaatcaccacagtgtccttgtccatgaggaggggcggtgtttcgacggaggatgccaatggggaattctgaccaccagtctggccccgggtcagcaggccaccatagatctgaaccagggacccagctggacaccttcggcagggctgcatgcgatgaccgtgttcgctgatgacgcggaccgcatcaaggaactcgacgaacacaacaacgagttgacccgggaaatcatggtgggggatctgcccgatctgcagccatacctgatcgagacgattccagccagtttcaagccaggcgatgcagtgacattccgcacggcggtaaccaaccgcggatcaatgcccgcacctgcgggttggctcggagcggtctatctggtaaacggcgcgtgcccagccagtggctgcccctggagtggcctgacaacggccttggcgccgggtgaatccgtatggttgagtcccgcaggccccgtttggccagccgcgggtggtcagcaacagatcacctccattgttgacgaccaagggctgatccaggaatcgaatgagggcaacaaccagctggctcgaatcatccaggtctcggacaagcccgaccttcggatcaccagcgcccgttcgcagccgctgcgtccgaaatccggcgatgcaacctcgttcaccgccaccatcgagaatgtcggctcggtcgccgccagcgcgccctggattgggctgatggccatgaagaacgggcagtgtttcattgaaggttgcgtatggggcgggctccagaactacaccctggcacccggcgccagcgtcaatgtcaggacttacaacgacgtctggcgcccgacccgaggggtgcactccatccagctgctggttgacgatcagaacaccgtgagcgagtcgcgggaggacaataacagcatcgacatcatggttactgtggattga

SEQ ID NO: 500729 - DNA, 663 bp, Stenotrophomonas maltophilia
gtgaaaggcgagaccgtggtgcgggtcaccctgtgggtgttgtggagcctgtgggtcatcgcctgcgcggttctggcgctcggcgccatcgccaaccatctggcctcgcgtacccagaccctgccgctgctgctcagccccggcgcgacggccgaggtgacggtctaccgcttcattgatgaccaactgcggctgcgactgcggtatgccgcagacggtactgaggctgaccctgaagtgctgctgcgcatcgacactcccaccgatcatggggacttccgcgcaggagagcgttcgggagtggccgggcagggtatcaaccgcaggctggcatcggttgagtccagcgggctcatggcgtcctattttggatatggccgcggtgatgcattgccacgcggacgctcatggctgcgggtaaccgtactggaggtggacccggcgctggcgggcagggcggccgtgatcgaattgcagcccccgctggacctgctgaagctgaccgacctggattacgtctggctgtggccgttctttttctggaaggtggcggcactgttcctgctgattcccgggggtgcgttggcggtgttcacgttcaccttgcggcgctggcagcgccgggcgtcgaagcagccgatttcagcagcggatacggattga

SEQ ID NO: 500730 - DNA, 1827 bp, Stenotrophomonas maltophilia
atgaaaaagcagcttccgttgcatgctggcctgttggctggtgctgtggccctgggcctgacttcgatttcggcgccggctgccacgccacttcctctgcagccggccaggattgttggcccgctgaagcccctgacatcggtggcgaatgatcgcttcatcgtgaagttcaagccgggcatggccgatgcacgcgaccgtcgtttcgtcgatggggtgctggcagcggcgatggcacgcagcctgccggcccgcgcaggcgcagcgccgacgctgaaggtccagcgccgtaccggcctcggcgccgaagtggtctccgtttcacgcctgctgtcttccgatgaaagcgcacgcctgcttcagcagctccgcctggacccggcggtgcagtacgctcagatcgatcgccgcatgtatccgctgcagagcctgccagacgaccctcgcctgccgtcccaccagtgggacatgctgaacacgatcggtggcatccacgcaccgggcgcctgggctgaaagcaccggcgagggcgtggtggtagcggtgctggataccggcatcctgcagcatccggacctggatgcgaatgtgattgctggctatgacatggtatcgctggcgggcgaacagggcggcgtcggatccggcgatggcgacggccgtgatgccgatccgcatgacccgggcgactggagtgatggttcctactgtggtgttggcaccagcagctggcatggctcgcatgtggccggtacggtggccgcagtggccaacaatgcgctgggcatcgcgggtgcagcctatggtgccaaggtgcagccggtacgcgtgctgggcacctgcggtggtaccagctcggacgtggccgacggcatttactgggccgccggtgggcatatcgatggcctgccggacaacccgacgccagccgacgtgatcaatctcagcctgggcggcttcggtgcctgcagcgaggaccctgaagcgcaggcggccatcgactatgcacgcagccgtggtaccacggtggtggtcgccgctggcaattcgaacatcgatgccgccggcttctcgcctgccagctgcaagggcgtgatcaacgtcggcgcgaccaactacgtggggggccgtgcgggctacagcaactatggtgcgtcggtcaccgtcgctgcgccgggcggcgaaatcgacagcgggccggcaccggcccgcggcgccatctggtccaccatcgatgccggcacccaggcgccgctcggccagccggtgctgggcggttaccagggtacttctatggctgcgccgcacatcgcagccatcgtggcattgatgcagtccgctgcagtcgaggccggccgggggccactgacccccgaccaggtgcgtgacatcctggtggcgtcggcgcgtccgttcccgcagcccccggaagacggcaagccgatcggcgccggcattgccgatgcccatcgcgcggtcctgctggctcagggcaagccgttgccggcactgccgattcccgagctgcagaacggcatccgtctggacggccagagcggcgtgaacgggcagtcgctgctgttcgccatcaacgtgccggcgggggcgaccacgctcaatctacgcacgctgggtggttccggcgatgtcagcctgtatgcggcacggggtgcagcacccgacgttggcagtgcgccgtacagctcgcgccgtgcgggctctaccgaggtgatcgtggtcagtcgaccacaggcagggacctggtatgtgcgcgtggtgggcgaaagcaccttccgcaacgtgtcggtgctgggcctggcgcgctga

SEQ ID NO: 500731 - DNA, 3858 bp, Stenotrophomonas maltophilia
atgaacaggattttccgtcgggtatggaatcgcgcgctgggccagctggtggtgggctccgaactgacccatcgcagcggacgtgccggtgcacgcaagctgcgtcccatggtgggtgccggcgcgatgctgccgatgctggcactggccgcgccgcccacgctttcaccgcaggcgctgctctgcgcgccgactgatctggtgtgcctggtcgaatcggcgctgggcgattcctacttgaaactcaacggtgccggtgatggcagtgatgacgcgatcgccagcggtgaagcggcaatcgcgctgggcgtgaatacccgcgcgaccggcaacgcgagcactgcggtcggctcgctggcacaggccatcggcgtgggcgctactgcgttcggcgaaagtgcggcagccattgccgatgcggctaccgcaatcgggcagggcgcactggcggccggactcggcaacaccgcgctgggggcgggtgctgaagcgacagccgaccaggcggcgacggcgctgggtgccttgagtctggccgaaggccagggctccaccgccattgggggtgacgcccaggtctacggtgccggtggtctggccgccggtttcaacgccggcaccaacggcgaagccggcgtggcactgggcgcgcgttcacgcgcattgggcggcgactttgccgtggctgtcggcgcttatgccggcgcagtgggtgaaggtgccaccgccttgggagcggccagcatcgccgacggcgagcgcagcacgacggtgggtttccaagccgaagcgcatggcgagggcgcgacagcggcgggtgcagacagccgtgcgctgggggcttcagctgccgcgttcggcagcgcagcgtcagcggttgccgacgatgccaccgcgctgggtgccacagcgctggctgccgagcagggcagtgttgcggtgggtagtgcggccacggcactgggtaaccgctccgcagcggtgggctatggcgccgtggctgcgggcgcctcgtcggtggccgcaggcgaatccgccgatgctgagggtgctggcgccgtcgccgtgggcgtaggcacgcaggccagcggatatgccgctgcggcactgggggcccaggcccaggcgactggcaactcatcactggcgctgggcgtgcagtcggtggcagcggggccggcagcagtggcgctgggttggaattcggtcagcagcggtgacttctccacggccctgggcccggcagcgtatgcgtccggtgcgggcgcgctggcggctggcatggctgccagcgcggaaggtttccggggcattgctctgggttacgccgccgaggcgggtggcgacagcagcgtcgccattggcggccagtccacctgtgagcgcttctgcatccccttcactacgcaggcgcagggactcaacagcgttgcgctgggtgccggcgccatcgcctctggcaatcacgcgacggcgctgggcgcgttgtcgttcgccagtggcgacaacagtattgcgtccggcgcgaacgcccttgccgaggctgcggacagtgtgtcgctgggcgtcaattcgcgtgccgcggtgtccggtgcggtcgcgctcggtgcaggctcggtcgcagatcgtgccaatgcggtctcggtgggcaacagtggcacgcagcggcagatcatcaatgtggctgctggcaccgagggcaccgatgcggtcaacgttgatcagctcaatgaagtgaagacacaggcggggaacgtgcggtttgttgcggtggatgcagcgaccgatggcagcgccgatgcggtcgcgatcggtgacgacgccacggccatcggcagcagtgcatttgctgatggtgagggcagcttcgctgctggccagcaggccaatgcgctcggtgccggcgcgatcgcacagggcgctcagtcgctggcgatgggcgatgccgcgatcagtctcggttcgctgagcacggccacggggcagaacgccatcgccatcggccaaggcgcttcagcgcttgatgactcgaatactgcagtcggcggaacctatatgggtctggtcaacaaccagccggtcgtgcaggcgaccagtgccagcggtcagggcgcatcggccttcggtgcgggttcgcaggctgccggtggctggtccacggcggtgggggcaaccgcatcggcggggggcgggcaggcgactgcagtgggcttcaacgccaaggccgatgccggcctcggtgttgcaatcggcgcatacagcaatgcggcaaccagttggagcactgccatcggctacgcggcactcgcctccggcgaatcggcccaggcgttcggctggaacgcacgtgcctccggtgacaacgcgacagcactgggctacgccgccagcgcgggcgggaactacaccaacgccatcggcatgtacgccgaggcggggggatttgcctccaacgcggtcggcactttcgccgaagccaacggtgcatttgccactgcgctgggttacggcgccgaggcgaacagctggggcgccaatgtcctgggtgccagtgccaccgccagtgccgactacgcggtggcgatcggcaatgacgcgacggcgtcagcggccggttcggtggcgctgggccagggctcggtggcaaaccgcgccaacagtgtgtcggtgggcagggcgggccgcgaacggcagatcacccacgtcgctgacggtagtgacgccaccgatgctgtgaacaagcgccagctcgaagccgctatcgccgatgtggggggcgagctgggagacctgaccgccaacgccgtgcgctatgacagcaccgacaaggacagcctgagcctggaaggcagcgacgggacccgcctgcacaatctgaaggcaggtagggcaggcaccgatgcagtgaacgtgcagcagctcaacagcgttgcgcaggcattgggtggcggcgccggcatggatggcaacggcatgctgattgggcccgcctattcggtgcagggcgtccgcttcggcaacgtgagcggtgcgatcggcgcattggattcggcgctgagtggcctggattcccgggtcggtgcgctggaaggaggcagcggccccggcggtgagggtggtacgcgcccccccgtcggcaccggcggtggcctggcagtgggcgagggctcgctggccaaggacgccaacgacactgcgatcggcaacggttcgcaggtaggcgccgacaacagtactgccgtgggcagcaacagccaggtggctgcgaaggcacagaacgctgttgctgttggcgccgacagcagggtcaccggtgccggcggcaccgcgttgggccagggtgccgtcgcatcggcctcgggatcagtggccatcggccaggggtcgatggccgacgaacccaacgcggtgtcgatgggcagcgccggcaacgagcgtcgtgtcaccaacgtggcagctggcacccgcgataccgacgcggccaatgtgggccagatgaaggcaggcaacgcagacacgcttgcctcggccaggagctacaccgattcgaagttcaacggcctggatgatcgcttcaccgaggtcacccgcgaaatcgaccagcggcttggacagcaggaccgacgcatcgaccggcagggcgccatgggttcggcgatgctcaacatggccatcaacgccggcggcagccgcagcccgcgtgggcgcattgccgtcggtgccggctggcagaacggcgaacaggccctgtccatcggctacggcaagcagatcagcgagcgcgccagcttcagccttggcggtgcgttcagtggtagcgaacgttcggcgggtgttggcttcggcatcgatctgtaa

SEQ ID NO: 500732 - DNA, 717 bp, Stenotrophomonas maltophilia
atgatcgagactcaagaggttgcactgcgcgtcatcgtgctggaaggcgacgagttcgttcgcgactgcttgcttctttcccacttgcgtgtgcacggattcgacgttgccggcagcgcgactgtggccggactggaggcgctgatggaagtgcgccacgccgatgtcgtggtcctggccgtcgacctgccggatggcgacggcttcaacgtggtgcacctgctgcgccaaaggcatcccgcactgggcgtggtgatgcttaccggtcggcagggcacgacggatcgcgtgcgcggccttgtgcagggcgcagacgcctatctgaccaagccggtggatatcaatgtcctggtggcgacgctgtacagcctggggcggcgcctgcaacagcagaattcgcccgaggcggaacgctactggcggctggatcccggcgcgtggcgtctgctgcccccgcgtggtggcggcatctcgctgacgcgcagtgagcgcgcactgctccgcaatctgttcgcccagccgggtgatgtggtgccgcgcgaacacttgatcgccgcactcaccccggacgtgttcgatttcgacccgcatcgactggattctctgatccatcgcctgcgtcggaaagtgcgtgctgcgtgcggtggcccattgccgctgaccacggtgcatggcgagggctacgtattcaacccctggggatcgcacaatcgctga

SEQ ID NO: 500733 - DNA, 1065 bp, Stenotrophomonas maltophilia
atgaccgtacgtctttcgcgcggcggagaaacactgcgcgttcgcttctccaaccggttcggcaaggccccggtcacattggaggacctccgtattgcgccaagcatgggcgccgatggtgtcgtcctccacaagcagcgctcattgcgtttcagtggtgcagcacgcttgacgctcgcccccggcgaagagcgctggagtgatcggatcaacctgcatgtggctgaccagacggagctgtccgtcagcctgtacgtcatggcaccgacgccggtggtcaccacgcattcggtcggcctgcagaccaactaccgcgcgcccggcaaccaggtcggcgcggccctgctgcgctccgccgaccccatgcgggcctattattggctggacgccattgacgttgccggaaaccagccatcggcggtaccagcagctggcggcaagccggtggtcatggtcgccttcggtgactcgatcaccgatggtgccggctctacagtggatcgcaatttccgctggcccaacctgctcgatgaccgtgtccgcagtgcaggcctgcgcaaggtcagcgtggtcaatggcggcattgccggcaatcgctggctgcatgatggagtcgggccagcaggcgtgtcgcgcttcgggcacgatgtgctggcggtgtccggtgccagccatgccgtgctgctgctgggcatcaacgatatcggcatcggccagctgcatccgccgcaggcggtgtctgcagcgcagttgatcgacgccctgcgcacgtcggtgcagcgagcccggcaacgtgggatcagggtgatgcttggaacgttgctgccctacggaggatcaggctacttcgacgccgccggagaaaccaagcggcaagccgtgaacgattggatcagggcagcacagggcgtcgatggtgtcatcgacttcgatcgcatcatgcgcgatccacagcgcccgacccatctgcttcccagctatgacagcggggatcatctgcatcccagtgatgccggctatgcagcgatggcggacgcgttcccgatacgctggctgcagcactga

SEQ ID NO: 500734 - DNA, 2001 bp, Stenotrophomonas maltophilia
atggacaccacgatgctgatcccgatgctggaacgcctgggctggaccagcctgcagaccgtgctgctggtggcgctggtgtacggcctgtgccgcgcgctgccgtcgctgtcggcggcgacccgctgccgcctgtggtggctggtctcgctgcaggccgtgctcggcctgttctggagccagccgttgcagttggcctggctgcctgccccgcaggcggtggcgacgaccgcgaccgacgtggccgctgacatcgtctacccgctggccccggaggcctcggcacagttgctggccgcgatgccgatgcctgcagcagacgcgccggcagtggcgtggtgggccgtcgcactggccgcgctgtgggcatccggcgtgctgctgatggcgctgcgtacctttggtgagtggcgtcgctgccgcgcgctgctggcagcggcctatccctgcgaggaccaggcgttggtgcaggccctgcagctggcttccgatgcacacggcgtgcggcctgcgccgcggttgtggatgagcacgcaggtggacgcaccgcagctggtcggtccgttccgcccggtgctgctgttgccggctggcgacaacgccctgcagggcgacgcactggacctggccctgacccatgaactgcagcacctgcagcggcgggacctgcagtggggcctgctgcctgcgctggcccagcacctgttcttcttccatccgctgctgcgcctgtcggtgcgtgaatatgcacaagcgcgcgaagaagcggtggacgcggcggtggtgggccagcacgctgccagccgccaggcctatggccgtctgctgctgcagctgggggtggcaccgcagccgcacctgggcgtggccagtgccgcacccgatgccaccagcctcaagcgtcgcctgctctcgctgcagccgcgccgggcctgcccccgcatcctggcgatggcgctgactgctgtggtggtggtggtgggcgtggcgccgatgcgactggtcgcagcgccggtgccgccggcaccgcccgcgccaccggcggcacccaaggtcgtggcgccagcaccgccgaaggctcccaaggctccggccgcaccgccatccgccgcgggcgtaccggcggcaccggctgcgcctgcagcaccggccgtgccggccgcgccggccgaacccgctgacgcgaccgggcccgacgatgccgatgtggccgatgtcgacgatgccacgggcatggccgaaggcgatgaaggcgcgacgtcggccgccacctccatcaccacctacggtcgcctcgacctgggcaggtcgccccgggaggccttcgttctggttgatggtgattcgaccttcgccaacggcggcatggacgacgtgacggtggcccgcaggcagctcggcaagggcccggcgttgtggttccgccagggtgacaagcgctacgtggtgcgtgacccgatgctgatccagaccctgcagcgtgcctacagcggtgccgtagagctgggccgccagcagagcgaactgggccggcagcaaagcgtgctgggtcgccagcagggtgaactcggcaggcagatgggtgaaatgagccgcctgcagggcgaggagtcgcgccgcatcgcactgattgccgccgaggctgcacgcaatgcgatggccgcccacgacatcaaccgtgaggcggctgcggaagcggcgaaggcagcgcgcggtgcaaccagcgacgtggccgttgcgcgtgaggctgcacgcgaggccgccgccgaggcacgccgtgcgatgcaggaagcccgcagcgaggccgcgcagtccggccgcactcgtgacatgcagcgcctggccagccagcagtctgaactggccagccgccaggcggcactgggcagccagcaggccgccttgggcgagcgccaggcacgcgtgcatgcccaggcgtcgcagcaggcgcagcaggtgatcgcgcgcgcactggccagcggcaaggccgagcgactctga

SEQ ID NO: 500735 - DNA, 831 bp, Stenotrophomonas maltophilia
atgagctacgtaacgacaagcgacggcgtcgagatcttctacaaagactggggcccgaggaacggcaaggtcatctactttcatcatggctggccactgtccggcgatgactgggacgcgcagatgttgttcttcgtgaacaacggattccgtgttgtggcccatgatcgacgagggcatggtcgatccacgcaggtatgggatggacacgacatggaccactatgccgatgatgtggctgcagtggtgacccaccttggcgttcaaggtgccatgcatgtcggccactcaactggtggcggcgaggtggtccgctacattgcccgtcatggggaagacaaagtatccaaggcggtcctcatcagtgccgtccccccgcttatggtcaagactgccggaaatcccgaaggcactcccaaggaagtcttcgacgacttccaggctcagctcgcctccaaccgtgcaaagttctactacgacgtccctgcagggccgttctacggatacaaccgccctggcgccgaaccctctgatgccgtgatctggaactggtggaggcaggggatgatgggcggggccaaggcgcactacgatggcatcgtcgcattctcgcagaccgatttcactgaggacctgaagggaatcacgattcccgtactggtaatccacggggatgacgaccaggttgtgccatatgccgactccgggctgctgtctgccaagctggtgaagaacggaaagctcaacacctacaagggtgcgccgcacggcattccgaccacgcatgccgatcaggtgaaccaagacctccttgatttcgtgaacagctaa

SEQ ID NO: 500736 - DNA, 1251 bp, Stenotrophomonas maltophilia
atggatgtgcgtgagaacgaggctttcacacagctcctgcgggatgcagttcttcaggccgagaagatcggctatcggccaactcagttcaaacgtatgctcgaacagtacgggggcttcgaaacggtgcagcgtgtgcttgcaagcggcaagccttccgatggattcacgcggctgtgggaactcaagcgcctggatctgacctgcgaagctctgatcgtggagtctgaatggcgtggtcactttgatgctgctctgctggcccgcgccgagaagctgctgagggacatgaactatccgttcaagccatacgccgcgcctgtcgttgatacatcgccttctgcccctcctgggatagacacaaactcagaagccgatggcgattctccactatccaacagtcaacttcgtatcaatgcattctttcgcgatgttttgcatgcgcctgtagccaatgaccggtggtcctggggctcggtggatgaggcgaggcgttgtgtattccttcggctctgggcagaggatgtagagcagcagaaagacttcccgactattcgcgtacttggtccgcgtcaaaccaatagtaacggctggtctgaacgtcaacggcacttggaactggttcgggcgggctatgacgcctacgccatcgtgtgcgagaaaggagcaaagtccagcacgagtattggcagcttcgacgctagccagttatcgcgtctgagtgccatctccgatgttggtggagacctgtacatgaagctcagcgacaggttgcctgtatcggccttctatcgccactcgtcggaagcgacggttgacagcgagttgatgcagattcgggaaggtgagggggctgagactacgcgcaagaccttggttgatgcgcgccttgggcaggggcgcttccgtcgcgatctcttgcagctatgggacgggaaatgtgctgtcacgggtactgcaatcgccgccgtattgcgcgcatcacattgcaagccatggtgtggttcaaacaatgaggagcggcttgatccacacaacgggcttcctctcactgccaatctggatgcgctgttcgatgcgcttttgatcacctttgacgacgatggcgaaatgcttacgagcggtgtcatcacgcccgaggagagagaagcattgggattgcctgcgcccctgctgaagaagccaggctcgaaattgaagaactatctgaagcatcaccgcgagcggttcaatctattgcgcacacaatag

SEQ ID NO: 500737 - DNA, 1332 bp, Stenotrophomonas maltophilia
atgccgcgcatggtcgttctgctcctggcaatgattttcagtgcttcagcgcagggtgaaaccttgtggaaggggaccagcgcaaagtcgatggttgatggcgctggcgacgtcctggatacggagggcgctacgattcagctgtctgccgaatccaccggcgaggcgagcttcattggcgcgatcacatccctggatgctagttcgttcaagggcaagaacgtgcggcttgccgggcggcttcgcgtggatggcgggactggcgccgcagcgctctggcttcgtgctgatggcccaacgggacggcttgcatttgccagctccggcggcgtgccagtgcgtggtggtgaaggtctgcgtgagcgcgaattgttactgtatgttccggaggccagcacccacatcaagttcggggttactttgggcagcgcaggtgctctgaacgccgaacagctcaccctgacgtcggcggcggtggagaaaaccggtgtatccgcctacgccatgctggcgcacgcgctgcccctcattcgcgcgaaggcgttgaatacgggaaacgtcgactggcccgccgaagaggcggcgctactcacggacgatcagaaggagcttcccgcgcaggaggcatatgcggggttgcgtagggtgctggacacgcttgcagaccgccacagtctgcttcaaactccgaaggaggcctcgacatatcgcgcgcaggccgttcgcagccgaccgatggaatcccgatccatcgcggacatcggatacatactggtgccggggctgcgtgggataggaaaggacgacaggggcgcgttcaccgcggaactctgcaaccgcatcgccaccctggcaccgacctcaaccaagggctggatcgttgatcttcgccaggacaacggtggcaacatgtggcccatgctcaatggactacaatccctgctcggtgaccgcgatgcaggcggcttccgagatgggcagggaaagacgaggaaatggcgctcacgcgccagccctgcgtgcagcgccgatctgtccgacagccgcgtcgccgtgctggtagggccgaggacggcgagttccggcgaggccgtggccgttgccttcagggcgcgacccggaacccggttcttcggacagccaaccgcagggcttgcgacgtccaacacgaccttcccgcttcccgatggtggcgcgctgttgctgacgaccgcggcaatggctgaccgtgagggtactgagtaccccaaggggatcgtgccggttagcattgttcgcggggatcaggatgcgatcgagattgcgctgcactggctgcgttcggcgccgtag

SEQ ID NO: 500738 - DNA, 600 bp, Stenotrophomonas maltophilia
atgccgacgctccatcccgcaaaaagcgaaagtgcgtggcgtgactttctggtgttcctatggctgggactgacctcgttcggtggcccgattgcccatctgagctacttccgcctcgagtttgtcgagcgccgccggtggctgacggaccgtagctactcggatctggtggccttgtgccagttgcttccaggcccagccaagcagccaggttggggtgttgctgggcttggcccgcgccggctggcttggcctgctggccgcctgggcaggttaatcgcatgggtcaggtcgcgttggcgctgcaccagttcggctacgcgcgccgccatgcggttggaatgttcgatgatgacccggatctgcgagcgcggcgagatcgggcagcgtcgaatccccgctaggaagcggatcctgccagatcggagggcagctgtcggccagaagtggatactgcaatcattgctgcctgagcccactctccaaaggcaagggggagcgcctgctgttcgcccgctgtcacatcaactgcgactagctgaaatctttgatcgcctacctggcagggcattgcgcgcaccagcatcctgttcgatctga

SEQ ID NO: 500739 - DNA, 309 bp, Stenotrophomonas maltophilia
atgccgggtgacggcggacgcagcagtgctgccctgttcctggcgggacttgccctggcgtcaggcttggcaatggtggccaggcccatacccctgccggcgctctccgcaaacggagcagtggtattggtgattgccggactgctggtgggttacggaactcgccttggcgctggctgtaccagtgggcacggtgtctgcggactaggccgggcatcgccgcgttcggtggtggcgacctgcgtgttcatgctcgtgggcatggccacggcaaccctggtacagattgcgaccggaggcccggcatga

SEQ ID NO: 500740 - DNA, 3828 bp, Stenotrophomonas maltophilia
atggacttcctggaattagccgctgccgacatcaccaccctggacgacggccagctgcgagagctggtcgctcgactagcggaagcggagcttcgcgagcagggaattccccggtcgagcgtgcaagccggcggggcgcaggaagcagctgacggcggactggacgttagcgtggcgacagcacttcctctcgtgcggccagccttcatcccccgtgcgcataccgggtttcaggtgaagaagcacagcatgagccgcgggagctgcgaacgggagatgctcgaggcgggtgtgcttaaggactcgatcaaggcacttgcggatgagaagggcgcttacatcatcgtcagcggcaaggacagctgctcggcgaccatgtacaaggggcgcctcgccggcatggagcaggcactgaagacatatggtgcgggcgaggagcttcacttggacttctatggagccgaccggcttgcgttgtggctgaagagccatcccggtgttgcgctctgggcgcgggaaaagcttggcaagccgctagcgggctggcgcccttatggtcgctgggcctcgacaccgaaggccgataaggacgagtttctgtccgacgcgcatcgctgcgtgagcgatggcagctcaagcgaaaagaacttgatgacaatcatggagggcatagaactggcgcggacgcggctgcggtcaggctctcgcgccgtgcgaattacagggctgtcgggcgtggggaagacacgttttgcacaggccctgttcgaagaggatgttggggatgacgcactgcctgcaactgacgtcctctacgccgatctaggtgaggacctgacaccttccgcatcagccgtggtcacctacctgatcgctaaccagctggcgagctatgtcgtcctcgacaactgcccaccacagacgcaccggtctctgcagaagcagctcagtgccagctcctctccactgcgcctgcttaccatcgagtacgacatctctgacgatcgaccggaggagaccgatgtcattcatatcgagccaagtagcgaggagacagtcaccaagcttcttcttcggcgataccacaagctcgaccgtttcaatgcagcgcgtattgccgaattcgccggcggcaacgccagactggcgctggcgcttgctgaccgggtggaaccggacgaatcgcttacaagctttaatgacgagcagctcttcctgcggcttttccagcagcgcaagggcgagtcagcggatctactacgggcagcaacggctctatcattggtttactcgttcaacgtctcacgcgaagagtacggggatgaactcggggtcctgtcgtcgatatctgaggtatctcgcgccgacctacagcgcgcccaagctgagcttgtgcgcaggcagctcgcccagagacgaggaagctggcgcgcagtgctgccgcatgcactcgcaaaccggctcgcgcgccgcgcattggatgactgcgaacctgatgacatcaaccgcgagttactgcgtcccggaaacatccggctgctccagtcctgtgctcaccgcctcggatatcttcatgacaacgaacgtgctcgcgagttggccctcacttgggtcgagtcgagtgcaccattggccaatctcgcgacactcggcgaggaccacctcgtggttctcaactatgtggctccgattttcccggatgtccttcttgacgcgatcgagcaatcggcccatattccggggttcgcggaccgcgccaatcctaacgttcagcgtttcgtccggctcctcgtcgatctggcttatgacgacgaggctttcgaccgctcagcgactgtcctgctctctatagctcggactgagcgtggtggagagaacaatgacagcgtcgtgggtcggttgcgccaactccatcagctgcatctatccggaaccatggctggcccggcgcggcgtcaggcgcttgtgcggagcctgcttgcgagtggtgagcttcgtgaccgcgagatcgctggcgagctgctccgcgcagcctttgaggctcggtcgtggacgtcattcggaggatttcagttcggcgcacgcaaccgcggaccaggttggatgcccaaatccgggcaggagcgacgcgactggtatgacggattcctttcgctgctcgatccgatacttgaatcaaacgatgactcgcgcgagtgggcgaagtctctgatcgcagcgaactttcgacagctctggacctgtgctggctgtttcgacgctttggaagcgctattatcaacgtatgccacaggcgggctgtggcctgcagtttggtttgccatcggccagactctcgagtacgacggcgcgagtcttcatccggcggtgcttcggcgcctggaggggctgcggtctctggcagcgccctccgatctcgagtctgagatcaacgcctacgcattcgtagacgaatgggcgcatccgcaccgtagaggcgccgactatcaggcagaaagggtcgaactgcgggaccgcgtcttcgctttagggcgggcgctcgcatccaacccgggcctgtttgagcggctagcgtcgcaggtttgggcgacttacgcgagaccggtggcttggctaggtcatggctacgccgaagcccacggcgatctagaagccctagttgagaagttgatccggtcgttcaaggcacatgccccagaccgcgctagcatccagttcatcgaaggctgtttgtcggcgatcgcggagcgggattcggccctgctgccccgtctccaggagaagttgctgacggaagataagctcaggccttacagcgtttggctacttctatccacgcggattacgccgtgggtgagtgcgcggctgctcgacgttgcccgacgtggcagcgtgcccgcaacttattttgaggcggttggcaatggcggacgtcatgaatcgatgtctgacgtggagctttcagcgcttacgaatgcggtctgccaactaccggggggataccactcgtcgtttgacatgctcatcatgcggttacacgcgagggccgaccggaaatatgtcccggggcctgagatcttctctgccattcgattcgcactgggtcacctgttgcgtgatcggtccgacgacgcgaaccggcctgcccaccacggtataggcaggctgatcgtagaagcgcttgctcctggggcgcccgaagacgaggtggcccggcttgtcggtgaactctgtgacggggtcaagaaatatcggctctcgcgggaaaactactccgaggtgctgtcgtcattcatcgaggcgcgtccggagatgctgctagatgcattactcaagatagaacgtgatgatcccgagtccgacgcggtggactggctgttccggcagcgatccggtgagtcctcgccgtcgctgaatctcgcacgcatcgatcagctcctgacgtggtgcggggatgatgctcgacggcaggagttggttgcgcgcaacatccgcgtctacgaggcaaaggacggatcgggggtggtcgacgattcgacatcctcggttcgactaagtgaacacttcaagcggcttctcgacagtgcgtctgacaaatcgagcctgatcgagttcgctttcggccaagccgtgccgaacagttggatgaactcacgcgttccgattatcgaggcccgtcagcaggcgctttgcgagctgattacgcatgaatcgcctgaggtcaggaccctggtggtggagaaggtcgcggacctcgaccttctaatcgagcgggagcgcaggtgggatgagtccgagcatcacgcgatggagcagcgcttcgaatag

SEQ ID NO: 500741 - DNA, 471 bp, Stenotrophomonas maltophilia
atgaagccaatcatcttagcgctggatctggagggaacactgatctccaacgcaatcagtcagatccccagaccgggcctgcacgagttcctcacacgcgtgcaatcgcagttcaatcaactggtgttcttcacgacggttccggaggaccgagtgcgcaacattgctgaacttctggtccgcgaaggcagtgtcccaagctggttcacggagcttccctacgtccgctggtctggtggaacaaaggatctggctttcgtctcgccgcggattggggaggctttgctgctagatgaccacggaccgtacgtgaggtctggtcaagaacatctttgggttgaggtttcgctatttggctcgccttaccctcctgaagacgacggtttgaagctcgcataccagaggctgaccgagcgtgtggccgctctagaccgcgatggcagatcgccggccgcgacggacccgatgtag

SEQ ID NO: 500742 - DNA, 2643 bp, Stenotrophomonas maltophilia
atgagcggggatgcctcggcaccgttcatccaggccggcgatcttttaccctgcgcggaagcgtcttggcaggttggttgtcgcccacggaccgcggctgacctagctaatttccaaagcgaacaggaaaccatcacacatctgcgctcaattggtctgccgaaaggcggtgtggaatatgtcatccaggccctgaaggcccctccgagtcgaaaggttggtggccctcaccaaaggagcagggtcggcgaaattcggagctacgtgcagggcgggtttcgcgccgttcccaccgctgcgtcgatccagtttgagtcgagttcggagcacgactttgcaatttgcttggccgctaatccgtccacgctctttctgatcgatcagcccaccacaattcttgctccatggcctacatcggggggccggacgcgcagctatcaacacacgcccgactatcttgcaatccatcgggacaatgttgttgcatatgaggtgaagccattgggcgttctgcggaacctactgcaggacaacccgcatctatgggcatacgaaggcgggcgattcacctaccttccagcagagaagcactaccgtgccctgggaattgttcaccgcgtcgtgccctctgagaccatatcttggatctactcggagaacctgagaatactcgcaagccaggctgttgccgatttgcggccaaatgccgatacaaatgcccgcataagaagagctgttgagaagcatcaacctacaagcttggcggcactggttgaccgacttcagcttgacaccgggacggacgtccttcgagccatattggacagcgaagtgtacgtggatctccaacgctgcagcctctgggatgccgagaacacagtgatctgtagcaacgaggccgatgcccgccacgcggggttggcgatacaggcgatgtccgctgaagcgtctcgagggagcgatgtagcttggctgacctgtcatccaaagcatctcccactggttggtctacgccttgcgatcgcgacaggagccgacacctctgagttctcagagatcaacacatttaaaaggcgcactatagagcgaatcaagaaggcataccgcgaacgcggtctggcgggactgtatccgaactgggataagtgcgggagaaagcgcaaatacacggatgcggatgagaatttcgcgattgatagaatcaggatagaccgagcaagtaccaatcacgattccgttcagcaatcgtacgcacgatacaagcttgacctagctgatgccgtcaaacaagggcgcagcctccagctcatcagtctaagcatgtactaccttctctggaatcgtcgacggcataacaccaaggatgcctatggcgtcggaggaaagcgtaaggcgagttcagactctccctatggcgatccaaatgatcagaaggcgatctgcacattgccgtttcaggttgcgcacagtgatcactgcgcccttccagtgttctgccaagaaagcgacaagctgccccagctcagtagcttggtctgccatttgcacaaggaggtgctcgccgcagtgattcgattcgcgcctgcaagcacaactacattggcactactcattcgtcagtgcgttcgacggcacggctatctcccccgctacatctactccgacttgggctccgactaccgcagcaagcagttcgccgtatccatggcggagctgggggtgtccgtcatgcgccggccctcagcgagcgcaaagtctggcagtgagattgagcgttaccactggaccatgcaggagaccgcgatcaagggtggcattggttacgtaccgtcggtcaagagccgtcggggcgtctcgtcctcccatcagccggagaatcttcctaaacgaaagctccgtgatctcctggcggatatcaacattgccgtggacaagttcaatgatggctccgcatacgagaatggcatcaatctgatcgaactgcgtcagcagtctgaggatctctacggaccgcagggagttccctgcgcattggacttcaaattctacgtcagcacttcgccgttcatcggccaaatcagcgggatgaccgaggctcgcggcgcgatacgctggcaagaccgtcggtactactcaccggtgctggcaggacgttccatcagagtttcgaagctggatcctcgtcttgatcctgaatctggcggctcggtcatgtacttctggctggatgatcgatggcatacggcaatttgccgggagcggctgctctctggggggagaagcctcgagtcaattctgctggaggccgcacatgactgcactgcaaagtcggattcaggcggccttcttccgcttcatgaggccatagagtcggcccgccgcgcaagggctgcggacactggctgcagccgttcggatgccgcgctgccttccgggcttggtgtagcggttagcgacagttaccagcctgagcaagatagcgactccgagcagcttcggtccaactcctcaccccatagctgcgccgagagtcagttgaaccctgcgtccgacggcaagcggcgctcaccttggaaggctcatcccatcgacgattgggatgggctggacgtgatcgatgttcacgacggtgatgcgatgtga

SEQ ID NO: 500743 - DNA, 1026 bp, Stenotrophomonas maltophilia
atgcatgagaaatttgcgtttctctggcgctacctccagaggttcacagctgtgagtaatgggggggacatcattcttatagttgggccgtccaacagcggaaaatcccagctcctggcactactgaccaggcatcttagggagaacttgtttgccgccgtcgaaccaggccacttgccgatcatcggcgcaaaagctaatccttcccgcgactcccggatgacaccaaagcaggtggcgttggccctgctggcagacggtggtcacgttctgtatgaccccgagcgccaggagaagacgggtttttatccgagtatgaagcccagcagcgaggatttgctgcatacccatttgtctgagctggtcttcagacgagccgtccgctatgtcatcgttgacgaaggacaacttataacgcgctctaaggacaagttgtttgccgcgactctgctggagtcactcaaatccctggccgggtcgaatcggaacttggttgtctgcgggggttacgacctccttgagccagcgcttgccctgcgctcgcatgttgccgtccgtactatcgtcctgcacctggctccctacgagccagagaccgggctgcttgaatggaggcgaatcctgaagaccatgtccaagagcgagaagctgaatggtctgggcagatttctcaatgactccgctctgcagctgttgacggaatcgcacggatgcgtcggtgtgcttgagcgcaggctgaaagacagcctggcctggtcagcagcacatgggcttccactcgatgaaaggatgttcgttgaaaggcggcccatccggctgcagtgggaggcacagcgcaacgacatcgagcaagggaaggcgcaactcgcgcaggttgagtggggtgccactgagcacggtgagatcttcttggtgactgctgccgaagcgggcgcaccctcttcatcacaaaagccaggcattccaagaacgaagaagctgaagccatttcagagcaggcccaacagatttccggcggcgcgatga

SEQ ID NO: 500744 - DNA, 1110 bp, Stenotrophomonas maltophilia
atgagcacattcctcctgaagattgaacctattggcctgggcacggcggaggtggagtcattcgcatcattcttctcgcgcctgggagcggctaatggcctttcatgctttcaactagacaagctcatgaggcgaattcgcgagcaccagggggcagcgcgagagcctagcaagataggccaacatccagctcgactggacatgcgagcgcgtgttgcctctgctgagcttctcagtggaaacagtgatctcactcggcttactcttcttccactgtcaaccagcgatggaacattgcgccagaattctctgagggcagcacgagcgtggtgtgagcagtgcattcaggaggacctcaggcaggagcttcctgcttacgatcgtctgatctggtgctcacgattcatactcaggtgtccgatacacaaagtgatgctgcgcactgcatgtccggtttgtagaaggctccaggactctcgactccgcgacggcggctatagcaagttcggtttggataggtgcagcacgtgtgcctccactttgattggaccaagctctgatctgcgtcccgagttcaagccgttcttcggtgaagcagagcttcaggagattgttgcagccatctccattggggaactcaggagcatagacactgcgtgtctccagacattctatggagcattgaaggactacgatcagcagtacgcgaacgctacacacagccacgggatgatgccgaggattgcaccgtggtctttacccacgctctcaaatgttgttgctacagcatgtagataccaagtttcagctgtcgcactgctccgtgatcctgagcaagccgcacagcacgtaagcaggctcatgttcgccgagcagtctgtttcaggaagagtacgaattaaggtggaagctcttctacttcagtcaattcggaggtcactggaggcagggctcgctactcctgctggtcaagctatacctactctcgcccaaatcgggtcgttgtattccatgaggtgcctcgacttcgctgcgtcattcccagagctctccaagcgatacttggagaagacccgagcgcaggctgcgcaaatcctggagtcctattag

SEQ ID NO: 500745 - DNA, 138 bp, Stenotrophomonas maltophilia
atgtcctgtggactggctcccctcgtccgtggccgccacatatcgccaaagttatgcaatttcaatgacttatatatcgataacagcgtggccgaccggatgcgccaatttttactggagaacggcgccaatctttag

SEQ ID NO: 500746 - DNA, 444 bp, Stenotrophomonas maltophilia
gtgggcctgctgatccttctggccgccgcctggctgttcgtggacgtccagcgtttcgcgcgcaaggccgtttccgtaaccggaacggtggtggccgtccaggcagaggatgcccggtcggaaatggaggggatgcccgcacatgacatcaccctgcatcgcccggtggtgaggttccagaccgcacaggggcagatgattcagttcaccgcgtcctttgctaccggggcaccactgtacgtggtcggcgaacaggtacaggtgctgtatcccggcggcatgccttccaaggctcgtatccagcacccgggattgcgctggggcgcaccgctgctgttggcgctgatgggcatggggttctgcctgatcgccgcatgcgtccatcgcctgtgcgtgcgctactggccgatcctgttcggcccgcgtgacggggcatgtggctag

SEQ ID NO: 500747 - DNA, 750 bp, Stenotrophomonas maltophilia
gtgcgcgccgtgtccttcatcgtgtccaacgacatccatcctgttctcacccgtaccttcctcgggctgggcgtggtcctgcttgtttcagcgcttctggcctacgttggggccaggcgcttcctcgatgcggcggtcattgccgatggcaggatcacccatgtggatgccgtcagcgttgatcgcggtggttcgcgcacttcaggggtgaagttcctgtactgggtggacttcactaccagcagcgggcaagtgatgcggttcttcgcaggtcgtacccgccatcgtgcctacatgacgggcgatcatgtagatgtgctgtacctgccggaccgcccggacaaggccctggtgcgttcgctctcatcaccctggggcctgagcgtcatactgggattgggcggcggcccattcctgctggcggtgggatttatgcacctgccgcaggcggcgagggcatggcggcgcaggcagctccttcgccacgggacacgggtgcaagccaaggtccgggcgatcaagcgcgatcgcggagtattttcggggggaaggcatccgttcgtcatcgtctgcgcctggcgcgatcctgaaaccactcgatggcatgtcttccacagtgcgtatctctgggccgatccccgtgcacaggtgagtgggcgtgaactggatgtccatgtcatgccgggcaatccgcgctactaccatgtcgatacctccttcattcgatcagcgccggcacctgcacgctga

SEQ ID NO: 500748 - DNA, 471 bp, Stenotrophomonas maltophilia
atgtaccaactcacgaacgatcccgatgttattcgctgcgtcgacaccggcgcgttcattccgcgcggccactacctgtggcccaccgagtggttggagaacaacacgcccctgccgaagtccccgcccgacccgggcttccaactgcacacaccagctcactaccgctacatccgtgaccaggcattcggttggatgcgcggcgaggcggtagagcgcggctacgacagcatcgagtcgtgcgccagctactacaacagcggcgtggagcggtatcgcctggaggcgcgggcgatggtggcctggcgcgatgctgtgaaccaggcgctggagcagttggtgctggcgccgccggaaggcatcgacacctgggacgaggtgcgcgcgctgctgccgcagccggagacattcgcctggccgaagaaggcggagctcccgctggacactggaagccccgacgtcgtcctctaa

SEQ ID NO: 500749 - DNA, 1254 bp, Stenotrophomonas maltophilia
atgccgcagaaactcattgaccaaacgaccatccagccggatggccgcccaggcgacgacgcattcaccgcgtttgcgacctgcaacgacaacttcgaggacgccgaacagcgtctttccgcgctggaaggtgggtcatcgaacatcggacaagatgttgccgacctcaaaaccggcctccagcaggagcaagaaatccggctgcagggcgatgatgcgctgggtctgcgcatcgacgctgaacaagctgcacatcaggcgctggcgcagtcgctcggtgcgcgcttcatcggaaagaaccgaattatcaatggttcgatgcgttggtggcagcgtgggaccaacttcacttcgccgggttactctgttgaccgctggtatttcaacgcaggcggagtcaacaccccaagcgtttcgcgcaatccaattacaccgggcagttctgataccgagtgcatctactttgccaagatcgcatatggtgctgtgactgacgctgcaaaccattacgttgtgcttgaacaacggatggagaacgtcaccacgctcgcgggtcgaacggtaaccttgagcttgaaggtgttcaacagtggcgcggcaggccgacagattgccatcgaatttggtcagagcttcggggctggcggtagcgcgcaggtgtcaggtatcggtgcagcgaaatacagcctcgaagctggcctaaacaccatcactcacatcgctcagatcccgtccatcagcggcaagactgttggtgccaacagttctttgattctgactctttgggcaacaggggggagcaacttcaacgctcgtaacgcatcgcttggtgcgcaagctggtgatgtgcatttcacgcaggtgcaggtcgaagaaggttcttcagcaagcgctttcgagtaccgacatgatgagttggaactgatgttgtgtcagcgcttctacgagaagagttacgacatcggtgtactcccgggctcggtttccgtcaacggtcgcgtcaatcgcttctacgacaagcagggtggcggcagcaccgccgacgtgcggttcactgtccgaaagcgcgcatcgccggcagttgcgatctacaacgatcaaaccgggcagatcaacagtatttccgccgccaatggtgcgtcgggtacggtcagttctgtgatcaacattggcgaaaccggatgccaagtgaactacttaccggcgagttcgtggggtgctgctttccactacacggcagacgcggagatttaa

SEQ ID NO: 500750 - DNA, 2835 bp, Stenotrophomonas maltophilia
atgcaagcaaggaaactcacgctggtggagatcggcgtgggcgcgctgccgtcgccgtctccggcggcgccgcgctactcgaactggttcccggtcgtgcaccggccacccgaggtgccaccggtggatggggtgacccccaacccggtggccgacggtgtgctgctggaatggccggcggtcgatctggccggcgtcgtgtacgtggtcgagcgtggcccctctccggaggggccatggaccgagatctatcggaccaccgacacgcgctacttctacagcgacaacaccggcaccaagtggtggttcaagatcacgccgaccgtgcgcggccggccgggctcgggctcagtcgtggaggctacgccaccgcctaccacggccgagctgatcaagcagacggagcggatcacgaaggagatcgcagaccgaatggaggcagatgccgcagaagcggccgcgcgggccgatggcctggctgccgctgcgcgggatcttctggctgaggcggatctgcggcagcgtggggtgtccgacgcaatggaggcgatcgcacaggaggcgcaggcccgggtcgacggcctgctgaatgaacgcctcgagcgcgaggctgccatcacgctggagacgcaaacccggcagagcgacgtggaatcgctgtcgcgcgcgctgtccgaggttgcggctggcagcgggactcagttcgacagcctgcgcatctggtacttcgacaccaccgtggaggagtggaccggcaacggtgcgccaccgacggtggtcgatggctggctgcggccggccaacgacaccgagaacccgtatattcaatcgccggcagccctgggcatcgacggcagcgcctaccgcttcgtcaagctgagggtgaagcgcgttggcgacgccgcgtgggacggctttctgcagtggatcacgctggtcgaccaggcgtgggacgtggacaagcgggcggcgatcccggagccgcggtgggacgacaatggcgttggcacggtcgacgtggccgatatcgcctggtggccgggtgaggtcgacgccatccggctgcagttcggcgcgacccagaccgtctccagctacttcatgaccgactgggtggccatcgggcgtccgacgcccggtgccggcgttgcgctggtccaggaggaagcccgcgcccgtgtagcggcggacgtggccgaggccagcaagcgcgagacgctggccgtgcagctgcggggcgactacgagggcagcgacctgtcccaagttccaagcggcctgtttgctgctgagcgcgatgcgcgagtctcggctgatgaggccaacgccagcgccatcgatgtgatccaggcgcggatgccgacgggcgacgggacggtggctacggaggccagcgtcaccgaggaacgccaggcgcgcgcagacggcgacagcgccaacgctgaggcgatcgagcgggtgtccgcgaggatgcccgccggcgacggcaaggtggcctctgcggaagcgctggatgccgtctcgacccgtgtggaagaaacggaggagggcatccgggcagtcggcgacagaacgtcgtcgctggaagcgcaggtgacgtacaagcacgcgggcgaccgggactggaacgccggggaccgtgacgtgcgcgcgggcgtgaagacctggcagtccgtgatcgcccaaggcgaccgcgccgtcgccaagcaggtggaatcggtccgggcagagctgggcgagttcgaggccacggccacgcggtccatcgaggtcatcgccacggagcagagcgcccaggcggtgcagatccagcacctgggcgtcgaactggacgggaaagcctcagcggactacgtcgaggagatcagcgcccgggtcgacgtgaccgagcagggcatcgaggcattcactggccaactgcaatcggtgaaggctgaggtggacagcaaggccagcgccgaagtggtccagggcatggaggctcgcgtcgtgcagaacgagaacgggctgacccaggtgttggcgcgggcgttcctgaacgtcatcgccaacagcggcagcggcccgctgatcggcggcatggtcatcgagaacaacggccaggtcatcaacacccgcttttccagcaacacgtttgaggtcatctcgcccggagccagtgaggggatggagtggcgcggaggcttccttcgcgtctggaaaggatctgctcagcgcatcatcggaaccaacttcggtgccgccggcgacaacctggtcgactacttcgggccgaacgtcggtgcgggtgctgcgtcgaaggccaacgccgtgatgtggatggatgccaacggcagtgcctacttcggtggccagctgtcggcgggcatcctgcgtaacgcggtccagacgacgaccactcagacggtcggcgtggaactggtcaatggtccattcgccaccaacggccgcgtgcggagcgtcacggtcagcttttcccgtcgacatgtgcggacgaagaccacctatggcagcgacggcttcgttgccggcgcgggccagaacacggcgcgtgtggaggtctaccgccgggtgggggagggcgctgagtcgttgtggcaggtgctgaacgtcagcggttcggtagtgatcctcaatgaacaggatggccctgacaacgccacgtccacctggggcgggtcattcaccgtgaacgacaccagcaccagtgcgcagacgatgacctaccgcgcggtgatcaccagtttcaccgaacaggacgttaggcacgagtccggctcgttccagcagcagtccatcacgcagagcctgtcgatcatctcggtcgagaactga

SEQ ID NO: 500751 - DNA, 4575 bp, Stenotrophomonas maltophilia
atgagcctttacacccttaccgtagacctgttgctgaagtcgggttcgttcgagagagacagcgggaaggccgcgcgtgttgtaaagcgcgacatggagacaatccaggcatcaatgtcggatgcttcgcgtcgtggcgcggatgaggtgtctgctggattccgccgcgtggccttcgaagctgttgggatgacctcggccttggcggcggtgaaagccgtgattgggaaggccgatgagtggaccaacctgaacaaccggcttcgtctcgtcaccaaagaccaagcggcgttagtcgctgcccagcaagacgttgtgcagatcgccaaggctacgcggcagccgctcggcgcgaccgccgagctgtatcagcgcatcgcaatgaatcaggacgcactggggctttccggagcgggtcttgcgcgagtcgtcgagaccatcagcaaaacgatggtgatcagtggcagcagcgcggcagcggccgagggcgcgttgattcagttggggcaggcgttcgcatctggcgcactccggggtgaggaactgaattcagtgctggaaggcgctccggcgctcgcgcaagagattgctaaggggctgaatgtcccgatgggcaagctgcgcgaacttgggcaagccggaaagttgagcgctgaccaggtaatcaacgctctccagcgccaggccagtgcggttgacgacgcgttcggcaagatggacgcgacggttggccagtcactgaccctgctcaataccaatctttcggagatgatcgggcgcgcggacgatgcgactggcgcctcccaggcacttgctgctggcattggcctgctgggcagcaaccttcagacggtcgccgttgccagcgccgcagtggcctccggcccattggtgaaggcgcttctgtcgcgggttgcggcggcaaacgctgcggtcgccgcagatcgcgctgcagccgcgcagagtctggcagccgctcagcagttggagcttcgtacgcgagcggcaatgctggatgctcaggccgaagcccgccggatgctggtgatcggcggaagcgtttcggtaagtgccaaggctgctgccgcgacgctcgagcacaggcaggcgacgttgctgctcgcgcaagcacaggctcaggccgcgacggcaaacgctgggtggctggcgcgtgctggctcggcgacgttgtcagtgcttggtggccccgcgggcatcgttacgatgctggcgacggcggcagccggctggctgctcttccgggacaacaccaacacagcggcggcggcgctcattgactttggcggcgccgctgacaccgccatcgagaagttccgcgaactcaatcgccaacagcaggccggcgagattctgcgcctgcagaaggagatcgatgcgaactatcgaaccatcacgggttccatcaccgagatggttgcggctgctacaaacttctccgccgtcggccaggcatctgcgttcatccaggagacggaacggctggacgcggcattcaaggcggggaagatcagcgcggatgacttcgcgagcgggctggacgcggcctggaaggcgatgattgagggctcgccggccgcagccgccgtggccaagagcctcacggaagagaccgctgccgcggcgactgctggcagggaggtcgatcgtaagcgtgcgatcctcgacgccttcacgggcagcagtagccaagcgaagagcgcaaccgacgccctgtcgggttcgttcaacgttctgggcgactcggcgggcgccgcgggcaagcgcatcgcgtctgcaatgcagtcgctgccgggccagctcgcccgcgtcggcaagagcgcggccgaagtcgcaaagctggacgtgaatgactggttcaaggaggcccaagccagcggcgtcgacttctccaagcgcgatgatcccaaggtcaagcagtacatcgagcagggtgcacagtacatccggctccagacggagctggccgctgcgcagaagaacttcacggagtcgcgcaaggcgtcggcagccgcagagcgcgccggcgccaaggatcgcaaggcagatgcggaagcgatcaagcgctacaacgagcaggctgcaatggccgcggcaaccatggccgggccgctggccgaggccaccgagcgacagaaactgctcgaggacaagctgaaggaagcgctgaaggaagggcgcatcgagcgggccgcgtacaacacgctggtcctggagtcgcagaaggcgttggaacagtccagcgcggagatcaagaaggccctggccagccccgaggcgctgcttgcgacgatggatgccgaggtcgccatgctcggcaaggtcggccgtgcgcgcgagctgtcgcggcgcgagatgatgaacgagcgggacatgcggcaggagctgcagaaggcggtggaggctgctggcagcaaggaagcgctggcgctgtccaagggggcggcgagctacgagcagtacgagcaggccatgctggacgccgcccgagcatcggccgatctgtcgctgcgcgtggaggaggccgctgccaacgttgaggcgtgggcgaacgtggtagtcaacggtgtgggcgatgccgccgacgccatggccgacttcgttgccagcggcatgcgcgacttcgacaacctgtgggacgacctgaaggatgccgccaagcgcgggctgcgtgacctggcgcgcgagtttctgcagcagaagatcgtgatcccgatccagacgcagatcctcaacgggatgaacggccagggcggtggcctgagcctgcagagcatcatggggctgttcggtggcaatggcgccgccggcggcggtcagaacctggggaccatagccgggctgctgtccaagggccaggggctgttcagtgcgggcgcgggtgcggcgagcagcggcgccagcgccggcagtctgctcggcttcggcaacaacgttgccgcccttaccggtggcggcgcagccgcagcgggtggttcttccgctgctgctggtgccggtgcggctggatctgctgctgcggcggtcccgatcatcggctggatcgtggccggcatgatgaagaacgccgagctgttcgatcagggctggaacatcgccaacggggagagctgggccggcaagatcgcaacggccggcgcggtgggcctcgccgataagacgttccgcgggctggggttcaatgacaaggtcgcatcgatcctgtccgggtcgagcatccacgccaagcttttcggccgcggcgcgccgaagatcaccggccagggcttgaccggctcgtatgggttcggtggcttcgacggccagacctacgccgatatcaagcagaagggtggcttgttccggtccgacaaaaagtggacgcagtatggcgctgtcgatcccggcatcgatcgcacgttcgacatggccgcccgtcaggtccgcggtgcggcaacgggcctggccaagcagctcggcgtcgacctgacccagcagctgggtggcgtgcgggtgagcctgggcaagctgcagctgtcggcggactccgccgaggccaagtcgcagctggaggcgtacctcggtgacatgaccaaccggctgttcaccgaggcggtgaaggctgccggcttcggaggccagctggacggctacttcgaggcgtcggatgtgttcaacgcgctgagcgcgtcgatcgcactggcggtgggcaatgccgacgagctgggccgcgccctcaacgggatggaggtcgacaaggtcaacaaggcggtggactacttccaggacctggccagcgttgccggcacggacctggccacccaggtcgagaaggtgaccggattgcttgggaactacgcttcgctgatggcggacgtttccacgcagcttatgaccggcgacctgtccagctaccagcagcaggccctcagcatcgagcggacgtaccggcagcaggtgaagtcggccaacgactacgccaaggccctgggcctgtccggcgcccgtgccgaggatctggccaagatcgaagcgctgcgcgcgatgaacatgggcaagctgcaggcgcagatcgacaaggataagaaggccatgcagtacggcctgtcgatcagcgacctgtcgccgctgacggaccagcagaagctcggcgaggccatgaaggagctggagcgggccgtggccggtggcgacaccagcgcggcccaggcggcggcgcaggccgcacttggctttggccggaacctgtacgccagcggcaaggactacaacgggttgtacgaccaggtgacagggctcatcgacggcatgaaggtcggcgacctgaacaccgaggacggcaccagcatgggacagctggcggacgcgatcgaggccctgccggacaacttcagccgtgcggtgttcgacctggtggtgaacaacgagtcgcagtcccaaaccacggcggctgtgcagcagagcaatgctctgctcaccgagcagaaccagttgcttcgcgagctgctgtccaccaccacccagggcgtccgcgcctccagcagcaacgcgctgcgccaggcactcaacgcgaggtaa

SEQ ID NO: 500752 - DNA, 351 bp, Stenotrophomonas maltophilia
atggctttgacagcggctgccgtcgtgctggcctcggggatgctccttgcctcctgtggcggcacgtcgccagagcaacgcgcctaccgcgaggcgagcaagaattgccagcaatgggtcaaagagtcggccaagaacccatcctcggcgaagatcccgcaaccggcctcggtccgcagcgccagcggtcaaatcatcgtccagtggaagcatggtgaggggctgacgctgatgaacggtttcggcgcaaacgtcgactccaccgcgcgatgcaccatgtcgttggatggccacttcctgaaggagctggtgatcaacgacgaagtgatccgaagatcgtcctccgactga

SEQ ID NO: 500753 - DNA, 762 bp, Stenotrophomonas maltophilia
atgttgattggatatggcatgccggcggtggaaacggctaccctcaccggtggaacgtggttgtcgaacgaccagggcgcggcgctcttcgatggcaagccggggcgatcgtcgcggatccggcgcaccggttcgctggcgatcacgatcaccctggccgaggccgttgtgccggagatcgtcgccgtcctcggcctcaacatcccgcccggcgtgcaggtgagcgctgctggcgcgaccgggaccaccgtgcgactgcccgacggtagtgtgtgcgcgtggctgtttccgcaggccagcgccctgctctcgacagtgtccgtcgagatcgccacaactgccacgaacgtggacgtgggcgagatcgcgatcttccgggcagttgaggtgggcatcagcgacggctgggcggtggccacgatcgacaccagcgtgcacacccgcaccaagggtgggcaggtcaacacggttcctgggcctctgtaccgccggctgacgtgcaccttgtccggccgggcgacagctgccgtgcgcggcggtggactgggcgggaccgattgggagacggtggcggcagcgatcgcggggcgccggcgctcctgcgttgtgccgcagtaccgggacatggtcagcaaggcgttcgacccgctgctggcggcgcggtcggcgctctacggctatccgacacagctaccgtcggcggagaacataagccggcagtacttcaccggatacatggaattcgaagaggttccggcgtag

SEQ ID NO: 500754 - DNA, 1968 bp, Stenotrophomonas maltophilia
atgaccgacacctttgggcgctttgccgccctcccgatcggcccgctgctcgctgcgcgcgacggtgggctcactcttgccacgacggcagcagccgacctcaaccgctgcgcccggtccgactttgccctcagcgccggcgttgtcggcgtcgagttcgcgctgtggggcgatgacgacctctcggccgtcgtgggctttgtcacggcagcagcgcccctcagccaagcgccgggcgcgaacggggagggcatcggctgggaactggccacgggtcgcctgatccaaggcattggcgcgatcgcaactggtctgcccgtggtcgcgctgggcgatatcgtcgggatgcgggtctccttcggcagtccctccaggctccacctgtacctcaacggcgcgctggtccaccagcgcgacctgctgctgtccggtccgctccacttcgccgccgcactggctgcgacgaaggccggtgggctgtgtctggccgtaaacgctgggcagtggggcgcccgcagcgatgccgctgttgccggttggaagctggaccaggtccaggcgccgaccacgcggctggccgacgatgactggctctccgcaccaggcgatagcccggccaatgcccgttacgaagggctggtcgccgagggcgtcaacctcgtccaggagctgagcttctggccctgggggggcgatccggtatcgcagacggcggcggcggaatgcgtggccgccgacgccgaggggctgctggatgacctggcattgtccggtgcctcgggggctgcggtgcgcatcctgcaggtggatgacggcggcatgctcgccgacgccgctccggtgttccgctgtgtcatcgatcagatcgaggtgaacgacgacggcagcaagactctgcatctgcgtgacgcgcacgactacctgggccagaccatcaaccggggcgtgttcctgcccaacatcacgtcgctggcctggaagccgcagccggtagtgatcggcgcggtggccagcgtgccggcagccggcgccaattcggatgcgacagcgatgttcctggccgacagcccggtgcacgtaaacgctgtgatggaccgtggcgatctgatggaagacggcacctttagcatggtgccggacggccagcagctgctgctgaaatctccgcccgtcacccctgtggtggtcgatggttcgagcatcggccccggcatggccccggcgcgcctggagcaggccgtgggcgacgtgatggctcgcctcggggcaggggcttggtcggcagcggactgtgcagccgtggacgctgcaaccggctacgccggtatcggctactacgccggagccgccatcacgggcagggatgccctgaacgcgatgctgcccagctacggtgtcgggtgctaccaggatcccaccggtgtactgcgcttcgtgcaggtggtcgcaccggagacctaccaggggcagccgacgtttgagatctcggaagccgacatggccagcgacctggtcggcgtcccggacgacgcacccaatctcacccggcgcatggcctaccggccgaacgcgcaggccctcggcgcctccgacctcgtcaccgacgtggtggacgtgccgcagagccgccgtgacgagctgacgggcctctaccgaggtcaggtgttcgctgcgggcgcactggacgcacactaccgccgcgccgacgccgccgatccggtcatttcgctgttctggcatgccgccgatgcgcaggccgagatcaaccgcgtcgtggcgatgtatcagcggcagcggttcttctaccaggtcgccattcgcggtgatcaggacatggctccgctccctggtcagatcggccggctgacctacagccgctacggcctggccgacggcaagccggtgctggtgcggcgcgtggagcgcaaccctgccacgggggacgtggtgcttaccctgtggggctag

SEQ ID NO: 500755 - DNA, 216 bp, Stenotrophomonas maltophilia
atgtcgcgccgggagttcctggagtggtgggagttccataagcggaatcccatcgaccccgtaagcctccacatcaagcccgctgccttcgccgcgtacatcaccgcctcacacagccagggcggcaccaagcgctcctttcaggagtacctggaaaccctcgtaccacgttccgaggaggacgaggcacaggactggttcgatcgactgggatag

SEQ ID NO: 500756 - DNA, 375 bp, Stenotrophomonas maltophilia
atgagcaagaccagcgaaaccacccaaacccagccgcagcagcccgtgagcatcctgcaatcgttcaccaacctgggcatgttcgcctccaaggacgttcgcgccgacacgatcaccttgcccaacggggccaaggcacagttccatgtgcgcgagctgccggacgcggagttccgcaagctgtggggcgaaggcgatcgcgccaagctgatcgcagcgaccatctgcgacgaggacggcaagcccgtcatgaacgtggagcaggccgcccagctcaagcccctggtggccgctgagctgcagcgcgtggccatgaagcattccggcttcggcgaggatgctgcccaagcccaggccgacgcgggaaacggctga

SEQ ID NO: 500757 - DNA, 474 bp, Stenotrophomonas maltophilia
atgggacaggtaatcaagtcgaagcacacgcagctgttcgtcgccatcgccgcggccgaggtcatcaaggtgacccgcctgcgtacggtcggcttccccgatggccaggcgtcggagatcgatatctccgattacgacgacgactgggaccagttcgtcgccggccgcaagcagaccggcagcaccagcatcgagatcatctacgacagcgtcgaccacgagaagctggaagagctgcatgagaccggtgccgtcgtgaactggctggtgaccgcgccgctgtcggaaaccgaaggcgtggccaagccgaccgccgttgccggcaagatcaccccgccggacaccgtgctgtccaagcagttcgacggcttcgtgcagaacttcgcagtgaccagccaggacaacgacgtctggaaagcgaccatcaccatccgcggctccggcgccgtcaccacgcaccgcccgacgccgtaa

SEQ ID NO: 500758 - DNA, 336 bp, Stenotrophomonas maltophilia
gtgacgcttctagatggcgacctgcagcaccgtatccgcttcgagcgcaaaacagatgggcgcgaccccctgggcggcccaggtaagccggtgtgggtcgaggttgtgagcgtgtgggccaagaccaccaacaatcttgcggcgacgacggaagcggtcgccgccggtgccgagcgctaccgggagcaggttcggttcgatatccgcccgcgtgacgttgatcctcagtggcggatcgtgttccgtggccgcgccttcgacatcaagagcatcgcacccagcaacgaccggagcgagatcgcgatcatcgccgtagcggggttgatcaatgtctga

SEQ ID NO: 500759 - DNA, 480 bp, Stenotrophomonas maltophilia
atgcccatcgtctcactcgcacaagcccgctcgcatgtgcgagttgaggccgattaccccgaggaacagctgcaggccgccattgccggcgcgcaggatgcagcgcaggcatacctcaatcggcagatctacgaggacgctggcgccttggctctagcacggagcagctatccagccgcagtgagggccgcctcgctcgcaaaaagtcaggcgctggcagacgcaatgttcattgaggatggggacgagcgcactgccgcgatacggctggcagttgttgcccatcgggaggcgacagcaaaggcggaggcctgcatccacggcgttgttacgaatcccagcatcttctctgccatcctgctgacgctcggtcatctctacgcgaaccgcacggacgtgatcgttggggctcaggcggtggagcttcccaacggcgccaagagtctcctgcgtccataccgaagggtgatgatgccgtga

SEQ ID NO: 500760 - DNA, 471 bp, Stenotrophomonas maltophilia
atggcgaagttcatcaagcccttccgtggagtgccggaaggcgagatctatccggtccagttcgttgccggcgacgactgcccgcctgagttggaggctggcgcactctctgtcggtgcgctcagcctgaaggcagacacaccgcccccgttcctgctgggatccggtgttcagccggcgagcttggagctttccgacggtacagtcctgtcgctgggcgacgtggttggccgggcacacgcagcctcggggctgtcggtggaggactggaacgcgctcgaggacagcgaacgcgaggcgctgatcgccgagaccgtcgacaagctctccggcaaggatgacaagggccaggtcgctggcgaagacaagccagccctgatggcgcagcttgaagccgcaggtatcccgttcgacaagcgttggggggcggaaaagctggccgctgctctggccgaagggaagaaggactga

SEQ ID NO: 500761 - DNA, 1251 bp, Stenotrophomonas maltophilia
atgaccaagatgacccacggccgcgtcccgcgcggcctcgtttccgtgcacgccgatggcggcagccagcccgacgtgaaggcgctggtggagtcgctgaacaaggcgtttgccgagttcaaggccgagcacaccaagcagctggaagagatcaagaagggcagcgccgatgcactgcaggccctcaaggtcgacaacatcaatgccgacatcacccgccttcaggcggcggtcgaccaagccaacacccagatggccgcgttccagatgggcggcggcagcgccggcagcggcgtggccgacgccgaatacaccgattcgttccgtgcacacttccgcaagggtgaagtgcaggcggccctcaacaagggcgcggccgatgagggcggttacctggcaccggtcgaatgggaccgttccatcaccgaccgcctggtcatcgtctcggacatgcgccagctggccaacgtgcagccgtgctccggggcgggcctgaccaagctttacaacaccggcggcacttcgtcgggctgggtgggcgaagaagatccacgcccggagactgcaacggcgaagctgcgtccgctcagcttcggctggggcgagatctacgccaatccggcggcgacccagcagctgctggacgatgctgagattgacctggaggcatggctggccggcgaggtcgagctggagttcgccaagcaggagggcgatgcgttcttctccggcaatggcgtcaacaagcccttcggcatcctgacctacgtggacggtggggccaatgccgcgaagcatccgttcggtgctatcaaggtcgtgaacagcggggtggcggccggcatcaacggtgacagcattctggacctggtctatgacctgccatcggcattcaccgcgggcgccaagttcgcgctgaatcgcaagacgcagggtgtggtccgcaagctgaaggatgcgcagggcaactacctgtggcagccgtcgctggtggccggtcagccttcgaccctggcgggcttcgccgtgcaggacgtggcggccatccccgatgtggcagccaacgctgtcgctgccctgttcggcgacttcaagcagacctacaccgtgtacgaccgcaagggcgtgcgcgtgctgcgcgacccgtacaccaacaagccctacgtgatgttctacaccaccaagcgcgtgggcggcggcgtgcacaacccggagccgatgcgcgccctcaagatcgcggctgcggcctaa

SEQ ID NO: 500762 - DNA, 843 bp, Stenotrophomonas maltophilia
atgagcctccggcagctgcctgaaatccgtgctgagcgacggctcggcgcagcccagttcgacatgcgccccgacgcgctcgaacgctgggagcccgaagtccgcgccgccggcaacgacgcgaacagcatctcgatctatgactccatcggcgagaactgggagggaaccggcgtcaccgccaagcgcatcagcgccgcccttcgcgcgatcggcgacaaggacgtggtggtgaacatcaactcgcctggcggtgacttcttcgaaggggtcgccatttacaacgtgctgcgcgagcatccaggcagagtgaccgtccaggtcatgggcctggccgcgtcggcggcgtcggtgatcgcgatggccggcgacgagatcctgatgggcgacggatcgttcctaatgatccacaacgcttgggcggtggccatcggcaatcggcacgatatggccgacgcggcaaggctgctggagcccttcgacacggctatggccaaggtctacgcggcccgctcgggcgtcaccgaggcggaagctgcccggatgatggacgaagagacctggatcggcgccgcccaagcggtagaggacggctttgccgatggtctgcttgatggagctgctgccaccaaggatgccaagcaagcatcgggcgggcgcaaggcgctggccttggtggaggcggcgatggccaaggcaggccactcccgctccatgcggcgcgacaccttgaaatcgctgttcaacggcaagccgagcgctgccgggtccgccacgccgagcgctggcggcaacgaaacctcggccctgttgcagggcctactcgacaacatcaaagcctaa

SEQ ID NO: 500763 - DNA, 1263 bp, Stenotrophomonas maltophilia
atgtccaggttcaacgaagaagaccttaagtcgctggaccggctctggaatccgccgccggcggcgccacgcagcgcacgcgctgaggccggccagttcacgggaatgaatgatccggcactgttggagttcatccgatcacagggcggccacggcggcggtggctaccagctgcgcaatatggcggtactccgctgcctgtccctgatttgcggaaccatcggcatgttgcccctgaacctggtcgagtcgggcaggaagaagcggatagccgacgagcatcccgcgcaccgcctgctgaagatcaagccgaatccgtggcagacgccattggagttcaagcggcagatggagctggccaggcagcggcacggggatgcctacgcgcggatcgtgtggtcggcaggccggccaatccaccttatcccgcttgactccccagcggtgcgggcagagctgggcgacgactggcgcatgctctaccggttcaacagcaagaagcgtggcgaggtcatcctcaagcaggaagaagtgctgcacatccgtgacctatcggtggacggcgtgaccagcctgtccaggatgaaactggcagatcgggctatccgattggcgctggatgcggaacaggcagcgagtcggatctttgagaccggcaacatggccggtggtgccatcgaggtgcccaatgcgctcagcgacgtagcctacgagcgcatgcgcacgtccctcgacaccgaatacgccggcgccgccgcggcgcagcgctggatgctgctggaggagaacgccaaggccaacaagttcggcagcaccgcccaagaggcccagcatgtcgagaaccgcagcgcacaggtggaggaggtggccaggctctacggtgttccccgtccgctgctgttcctgagcgataccagctggggcaccggcatcgagcagctgggcatcttcttcctgcagtacacgatgctggagcacttcaccaactgggagcaggcggtcgcgcgatcgctcatcgacgagcgggatctggagcgctatcagcccaagttcaacgtgcgggcgctgatgcgcggcacgctcaaggatcaggcggacttcttcaaggccgctctcggctccggcggtacggcgccgttccacacgcagaacgagatccgcgacctgctggactatccggaatcggatcagccaggggccaacgacctgatcaaccccatgacaaagaagggaaagagcaatgagcctccggcagctgcctga

SEQ ID NO: 500764 - DNA, 1881 bp, Stenotrophomonas maltophilia
atggcggcgaagaggacgaagaccccgacgacaagctcttctgatcgcactgcggcctatgcgctggcggtggtagcaggtgagatcgtggccggccctcatgtgcggaatgcatgccgccggcacctgaaggacctgcaagacggtcacgagcgcggcctctacttcgaccaagctgcggcgcaaagggtttttgagtacttcgagacgattctgaagctctccgagggccagttcgagggccgctcttttgagctgcacccctcgcaggcattcattctcggatcgctgtttggctggaagaaagcagacgggaaccggcgattccgtcgcgcctacatcgagatgggcaagggcaacggaaagtcgcccatggccggcggcattggtttgtatgggatgacctccgacggggaggctggcgcgcagatctacgccgccgccgcgaagaaggagcaggccggaatcctgttcgccgacgcggtgaagatggttaaggcgtcaaaggcgctgatgaagcgtctggagttctccggcggcgaggggcgcgagtacaacatcgctcaccacaagagcggcagcttcttccggccggtttcgcgggacaccgggcgaacaggctccggtcctcgcccgtacttcgttcttgccgacgaagtccacgagctgcccgaccggcgcgccatcgagatgctcgagcgcggcttcaagttcaggcgacagccgttgctgttcatgatcaccaactcgggcagcgaccgaaacagtgttgcctgggaggagcacgagcacgcggtgaaagtggcggctgggcataccgaggcggtcaacgatccgacctttgtcggtgagccgctggacgatcgcactttcagttacgtgtgcgcgctcgatgatggcgacgacccactggaggatccgacctgctgggccaaagcgaacccgttgctcgggatcacgatcaccgaggagacgctgcgggacattgttcaccaggccaaggcgattcccggccagttgaacggcgtgctgcgcctgcacttctgcgtctggaccgatgctgaaactgcatggatgacccgagcgacgctggagccggcattggccgacttcgagattgccgaacaccacggaaagccggtatatggcgggctcgatctatcgcaggtgcgcgacctgaccgctgcggcgttcgtcgtccaaaccggcagcgtgccggtcaccgtcatggtggagggcgaggagcgcgtggtcgagaagccgacgtttgacgcttggattgaggcatggacgcccggcgacacggtggacgcacgccagctgaaggacaagctgccctaccggacgtggatcgaggctggccacttgcacgcgccgaagggcaagacgatcagcttccggcatgtggctcagacgctggccgactacgaccaaggctactccattcagctgatggcctatgaccggtatgtgttccgccgcttcgaggacgatgccaaacagattggcctttcgctgaccttcgccgagcacccgcagggcggcaccaggaagggcaagccgctagaagccgcagccgaggccgccaaagcagcagggcagccggtgccagagggcatgtggatgcccggctcgctaaacctgttggaagaggccctcttggagggccggatccgactgaagaagaacccggtcctcgtttcagcgctcatgtcggcggtgatcgaaaccgacaaatgggataaccgctggctctccaaagagcggtccatcaacaagatcgatccggccgtcgcactgtgcatggctatcggtgcagcgcacgcgagctttgtccgctcagcttctgtgtacgagaagcgcgggatccgatttctatag

SEQ ID NO: 500765 - DNA, 252 bp, Stenotrophomonas maltophilia
atgaccaaaccgcagatcgcggtatggcgtgagcaggtcgaaaacatgccgtggctgcatgccggccaccggctgttgctgcgccaggtctgcatcttggcggctcggatggagaccgaccccgacatgggggtttctgcccttcaggcgctgggctccctgctttccaagctcggcgcaacgccggttgacgagacaaaagtgaatcatggcggcgaagaggacgaagaccccgacgacaagctcttctga

SEQ ID NO: 500766 - DNA, 324 bp, Stenotrophomonas maltophilia
atgagcgcgcgagggctggccggtaaccggcaggccaagcgcgccctgccgacgaacagccgagcttggcgcgcgctgcgagagaccattctggttcgggacctgtaccgatgccaggaacatggctgcggtgttctctgcaccgggcgcggccaagcccacgtcgaccacgtggatggcgaccccaacaacaacgccccggagaacctgaggacgatgtgcatcagctgccatagccggaagacggcccgcgaggacggcggctttgggaacgcccagcaggtggttgtggggtgcgacgccgacggttggccgatcaagtag

SEQ ID NO: 500767 - DNA, 183 bp, Stenotrophomonas maltophilia
atgcacgcgacagtgactgcgtcggtccgcctgcgctggtggctgcggtggtatctggctgccgtggtgtggtttgcccgggccacgggaatggaaccggactgggagcgggttgagtggtggatccgccgcggcctggtgctgcgaacgacgagggttggtgatggacgctgcacggattga

SEQ ID NO: 500768 - DNA, 363 bp, Stenotrophomonas maltophilia
atgggacgaattaacggggtggagcgccgcatcctggcgcttggccggctgaagaccggcgagatgaacaagaccgaggctacgtatgccgcgcggctgcgtgcgctgcaggctgcgggcgaggtccagtggcaccggttcgagggcatgaagctgcgcctggccgacaacacgttctacaccccggactttgcggtcatggctgccgatggagtcatggagtgccacgaggtgaaggggcactggcaggacgatgccagggccaagatcaagattgccgcggccatgtacccgttccgcttcattgcggtgaaggtcaggcccaagcgcgacggcggtggctgggaagtggaggaattctga

SEQ ID NO: 500769 - DNA, 588 bp, Stenotrophomonas maltophilia
atgagcaagaacgaacacaaggacgactacatgatgcagcgcgcaggcggtggcacgatcgatcagccgatggacgacagtggctggcaggtcagcggcagcgtcgtgaacgaaaatgggcgccccgtgggtgcgagcttcaccggcaacatcgacggcaccgccgtcagcggtgaggtaaagacgggcaatgcgcaggtcaaggtgggcgagaacgactcgttcctgaatttgaagtaccagaacgaacgcgtcactggtacggtcggctacggcgtgggtaatgaagaggcccgactgaccggcaccttcgacagcaacggcaagctgtctggctccgccaaggtccagttcaagaacaccgcgatcgacatctcccctgcaagtgccggcatcacgtatgacttcggcggtggttggtccggaagcgtccgacaggagttcggcggtggcatgggaatccagttctccggcggctcgtcctttggtggtggcagcagcttcagcctgagcctgggcgcttcggggggcggtggaggctcgtggggcgtgaatgccaagttccagctgatcgtgctgacgaactaa

SEQ ID NO: 500770 - DNA, 237 bp, Stenotrophomonas maltophilia
atgaagaagaccgcgctgcggccgagaccgtccctgctgctgttgtggctgacctgcgcgctgggcgtctccagttgcgcgacgacctcgccacctgccacaccgctcgcctgtccgaagctgccgccggcgccgccgaacgtgatgcgcgagccgaattacgtccagaggttgtcggagctgctgttcagatcgtcaccgacgccgacgaccagctccgagcatgccaagcagtga

SEQ ID NO: 500771 - DNA, 465 bp, Stenotrophomonas maltophilia
atgaaggccaagatcatcggtagcagcgccgccgccgtcattgctttggccgcggccgcgctggtaaagccatgggagggctactcgccgactccctacgtcgacatggtcggtgttgccacctactgctacggcgataccagcagaccggacaaggcggtgtataccgagcaggagtgcgcggagaggttgaacagccggctcgggcactacctggtcggtattcaggcgtgtatccgggtcccactccagccccatcaggcggcggcgctgctcagctggacctacaacgtcggcgtggctgctgcttgccgctcaacactggtggggcggatcaacgctggccagcccgccgcgagctggtgcccggagctggaccgctgggtctacgccggcggcaagcgcgtgcaaggcttggtggaccgccgcgcggcagaacgggccatgtgcgagggcaagtcatga

SEQ ID NO: 500772 - DNA, 228 bp, Stenotrophomonas maltophilia
atgccgaaccggacgacctacggggccaccatgaaggacgaaatcattggcaccgccgctggtgctgtggcgaaggctgctccaccggtgacggtagccggcgcggtcgccgcaggagcgaacctcgatcgcgtggtggtagttctgacaatcatctacctggtgggccagatcagctacctgggctggcgctgggttcgcgagtggcggcagagggcgcgagcatga

SEQ ID NO: 500773 - DNA, 705 bp, Stenotrophomonas maltophilia
atgggaatgaacgaggcacgcgaactgctgtcgagccggacggggccgagggcactgagcttcgacggaagcatcggcggaccaagcactgaggaaatcttggccgccttggcgtatgttccggctggcctcggtcgcgaactgctggaggcgctgtggtggccggaaagtggtcagcggaggcgcgagcagctgcgccaggcggtggtctccctggtcgcgccggagttcacccgccagatgcacgctcttgcggacgcccgtactgactacggcatcgccaaggccagcatgggctggtgcggcgggtcgattacggaggcgcagcggcgggagctgctccgtacggaaaaggctctggacgatgcacgcgctgcggcctggccgaacaacacgatggaacagttgggagtcctggccggagcggtgatcgctgaaatggccggcgcgcgcgagtgctcgcactgctgtggcaagcgggttctgctggacccgcgcgtcgcaggtgtcgtgaactgcgtggagtgcggtggtagcggccatgagccgctgagcggccgtaagcgcgctgccgcgatcggtgccgactggtcggcatacagccggttctggcgcccggtgtacgagtggatgctgtgcagcttccgtgccgccgaggcgcgcgccgcaaggaagttcaacagggctctttccaaggccgcgtag

SEQ ID NO: 500774 - DNA, 366 bp, Stenotrophomonas maltophilia
atgtggtcgaacgcaccgccgccgaccgaggcggaggcagcacgcatcgaactggcgaagaccgggccgtgcatggcatgcctcgttcgctacgcgcagggactgatggcgaagaagcacgtgatctacggctgcgaatacaaccacgccaagtcgggaaacatccggcgcggccatttcttcggctacgcgttgtgccagtggcatcaccagcgctaccgaacggaacacatgacgcagaagcaaatggtggcccgctggggcccaccgctgcactggtccaagaaattccacgaggcgttcggatccgacgacgacctgatcgcacagcagacctacatcaacgaactgagggcggcagcatga

SEQ ID NO: 500775 - DNA, 891 bp, Stenotrophomonas maltophilia
atgtcgaccatcatcatgtcgcagtgctggccgctgcagggcctgagcgtcacgcagaaggctgtgttgatctcgctggctgatcaggcgaacgacgacggtgtgtgctggccggcggtgggcaccatcgccgcgcgctgctgcatgtcggcgcgcgctgtgcgtacggcaatggatcatctggaggccgtcggcctgctgacccgtgaccgccggttcaacagcagcacggtctacaaggtcaccccggccaacttcgacaaggccgctgcgccgtcgaaggctggccgcaaggcaggaaaagcaggtactgcaccgggcgcaggtgctgcgccccatgcagggggggcgcccgctgcaggaggggatgcgccccatgcagggggggatgcaccgggcgcaggtctaggggtgcgccccgtgccgcctaaccgtcatataaccctcaatgaaccgtcaggagaaccgtcatttccggcgggcctgccggccgcgccgctggcggaggattccgaaaccgacctgcaggccgcgtgccgcgccacctgggccgcgtacgccaccgcttaccgcacccgccacggtgtggcgcctgtccgcaacgcaaaggtgaacagcaacgtccggcagatcgtgcagcggctcggccacggcgaggccccgctggtggccgcgtggttcctgaccgtcaacgagcgctacgtggtgcagaacatgcacgacctgggcgcgctgctggcgaagtgcgaggcataccgcacgcagtgggccaccggtcggcaggtgaccgaggaagccgcccggcagacggacaagacgcagaccaaccttggcgccgccgacgcggccaaggctctgctggcacagcggagggcggcacatgctgggtaa

SEQ ID NO: 500776 - DNA, 1023 bp, Stenotrophomonas maltophilia
atggatggcttttcaggcggtgtcgacagggccgatgcggccaacgtcggggttcgtatcgacgcggggcgaaggagcgccaactgccgggcccaggacggcgagaacgcttggcagggcggggacagctgcgtccaactcccaagccgcgacgcggtccgcaggcaacgccagaacgaccgcaagatgagcgtcattggacagaccgagcttggcgagaagatcccgcttcgtgaccggggccagcccggcgaaggggccgaagatttccgggcagaggtcatggcgcgaaacgcccgtgaccgattcgatgggaatcgccatggctgggggcacgcgcccccgcgagcgccaattgctgacagcgctctggcgaacaccaagatgggaggcaagggatgtgaccccgccggcggctttcacggctctgtcgagtgcgtccattcgcggagaatcacatatcgtgatcatccgcgcaacacatttcgtgttagcgacttatcacataccgtgaagaattccggtatggccttctccgacaacctccgcgccgcccggctcaaggctggcatgacacaagaagccttggcactcgcgtgcggctggtcggggcagagtcgtattgccaactacgagtcgtcggccaccagcgcgcgcgagcccaaagtttcggaagtgcccctgttagctgccgcgcttggggtcagcatcgcgtcccttttcggggaggccccggcgtctcagtccccgcgaccggatcctgcaatccttgccgaaacccaccggttcctggacaaggcgttcggtacgcttggaaaagctttcgacattgagtccgaggcagatctgtttgccgacgtgtacgagtggatcctgtcggatgagcgacctgcagatcagcgcaacttggtggattttgctgcatggcgcgaaaagcgcgattcacaaaggggagctgtaagaaatgagcaaaacggacgcgctgctgcacaagctggtcgaacggataagcgccgcgcctga

SEQ ID NO: 500777 - DNA, 216 bp, Stenotrophomonas maltophilia
atgagcgccgtcgtcgcccaccactccagcgctcagcgcgcggcggccgccgccggcatcgtcgcccgcgctgggcgccgctggggcctcctcccctatcaggtcgtcatcgccgccagcatcgccgccaatgccgtcctgcgacagggcaagagcgcagccggcgccgtcgccgccgcacgccgcgcagcgcgcgctcaggcaggtgctgcatga

SEQ ID NO: 500778 - DNA, 189 bp, Stenotrophomonas maltophilia
atgagccgcccagtcgtcgatagctgccgcgtgttcggtggcagaagccccaagacgggcaagcctgtcggtgagcgccaccggtggaacggcggaagctggggcaagggccagtgcgagttctgccaccgcaccctgagcgaagtgcagcgcaagccggcgcttcgcgccaaagagggggccgcatga

SEQ ID NO: 500779 - DNA, 258 bp, Stenotrophomonas maltophilia
atgacccagctaaaagccttctacgtcgatgacatgccgagcatctacgccgccgctacgcccgaagaggccgcccgtctgtatgaggaagacatgggcgatccctgcgaagacggctatccccgcgaggtgcccgccgcagagctggatcggtcgatccccgaattcggcgaagacgaacagccgaccggcgagatgaccaccatgcggacgtggctggaagaagccagcccgggcttcctgtgcggggccgagtga

SEQ ID NO: 500780 - DNA, 243 bp, Stenotrophomonas maltophilia
atgcgccacctggccctgcccttctactacgccgccgtcgtcagactgctgctggcgctgctcgtgcgcgccatctacaccggcgccgcgtcgttcctcctacccgtgggcgccggtatcgcctacttccactggtgcggcgtgcgcgacctagtgtggagctggcccgccttccgcgaggaaatacggtggcgcgcggcagagcgacagcgcgcgccgcagcaggcagacgacccccaatga

SEQ ID NO: 500781 - DNA, 753 bp, Stenotrophomonas maltophilia
atgggactaaatggtccagtcgccgttaagcgtgaccacgattttcgcctctacgctcgcttgggtggcagcgtcactcactgcctccaagtccgagcacagcaccgaaacaaatccactgaaagtcctgaaaaagctctccttcatctcgtcggtcatctgttcgtaatccacgttgaactgcgtcttcagtgcagtcgcaagtccaatcgctcgcgccagacggccagccaaaggatgcccaagcagatgaagtctttccctcagcgccgacgccactgggagctcaagctctgccaacttggcaagaatcttggagcgatagtctccgtcgttaacgaatcgactcttcgcgtcagccttcttcgcttcggcaaccagcccgcgggcattcactacttgtgtcccaacatcggcaaccagccagagcaagataacgattcgctcgtctgcctcatttcttcgccgtgcgtcggcttcactttttgctatcgcgactgccgctgcagttgctctgttggccgcacgtccaagcctcaaggtcatgaaacccaagaacacagtcgccagtacagcaatcgaagacacgactactgcccaagcgtcccaccacaccacgcaatctgcaacgcctggttgcatgcaagggctgattccgctccacaactgctgcaaaccactcattccctgatccccctgtggactcgccggcattctggcatgaccggctccccggaggtatgtcgtgcgtaa

SEQ ID NO: 500782 - DNA, 612 bp, Stenotrophomonas maltophilia
atgaggaacgacaacaagtccctggcggacgtgcagcccggtgggagggtgaggctgggggatgcgcgcgcactgattcagcggtacgacgcggcgggcgcaaagttccgtgaatccctgatggacgaccgctacagcgatgcgcagcgcgtggaactgcgtcgtgaactgactgcggtgcaggacgagctgctgacagccctctccccccagccctccccgggtggtcaggatgcggcaatcaaagcgatggccgaaagcctgctttgcgccgagagttccgccaccttggaagatgcgcgcgaacaagctgcactccttcttgccgatgcgcttccgcacctcgccgccccccagccggtgggtatcagctccgactgggtgattggctacctcaccacggacgcacccgaggaatcacgcgaagcgatccgcaatgccttcgccgaatatgccgcgctgtctgccgcccgccagccggtgggggagccggccccgttccggttcatcgctgaagcagacagggcgcctcccaggtacgacatgcgggacagagagatggttggagaccagcacaagcccaacaccacggatgaaggggcgaaagagtga

SEQ ID NO: 500783 - DNA, 171 bp, Stenotrophomonas maltophilia
gtgaacgagaaacttcatatcggcggcatcgatgacgacgagcagcgctgcctacgttgcggctcgcccagcttggacacgggctgggagtgcaacgactgcggctacgacaacatgccgcactacgcggagaagaacggtcaaggcgacagccaggcggtgggcaaatga

SEQ ID NO: 500784 - DNA, 303 bp, Stenotrophomonas maltophilia
atgagctggttccgggttcctcagcagactgcggatcgcctgcgccgcagatgggaaaggttgtttgctcgaaaaccggcctacccatgggaggcgcgtgcagccgaggaccttctctacaaggtcagcacgaatgctcgcgcctgccagcttcttgccgaactgctggaaatcgagtgcgatccgggcgaatcggttgcggattacgtatcccagcagctgcgtgagccgatgatcgccagagcgaaatcagcgcacttggccgacctggaagagataacgcgaggattctccaatggctga

SEQ ID NO: 500785 - DNA, 234 bp, Stenotrophomonas maltophilia
atggctgaccaactgctcaccgctgcaatggaggggaaagagaccatcgtgtgctgggctacgccctgcgcgtaccagcgccgggatgagttccccggtgaaactggagggctcagcaattggcatgagataggccgggaattctacttggagctagagcggttgcagaaggaagccccgggagttgttcggggcatccagctgcgaaagctctacgcggcgaaggaggactga

SEQ ID NO: 500786 - DNA, 1428 bp, Stenotrophomonas maltophilia
atgcgctacctgtccctgttctccggcttggaagcagctcaccttgccctcgctgcgctgggctgggagtgcgtggccgtgttcgagatcgaccccgcggcctgcgcggtgctgcggcatcgcctgccggacgtgccgaacctcggaagcgtcaccgatatcacagacgagcagatcgccgcgcttgggcccatcgatgcagtgattggcggtagcccgtgccaagacctatccgtcgcgggacgccgtgctggcctcgccggcgcccggtcgtccctgttccaccaccaactgaggattttctatgcagctcgacatttttgcggggcccgctggctctggtgggagaacgtccccggagccttcagcagcaacgacggccgagattttgctgtggtggttggtgaaatggcaggatgcgacctcactgtcccccgcgatggctgggccagcgaaggcatggcagtcggtcagcacgggctcgtcgaatggagcgtgctggatgcgcagtggttcggactggcgcagcggcgccgtcgcgtgttcgctgtcctcgatactggaaactggaccgatcgacgcccggtacttcttgagcccgacagcctgcgcggggattctgcgccgcgccgaggccaaggggaaggaattgccagcacccttacggctggcgctggaagcagtagcggcccaggcatgcgagccgaatgcgacggcggaagcggcctgatacagcacactctcggatacggcggcggccgcaccagcggggagattgaggtggcggcatgcctcaccgcgaaagggatgcgcatcgacttcgaagtggagacgttccttgtccagccggtggcgcacacgctgcgtgctggcggattcgacggcagcgaagacggcaccggccgcggcaccccgctgatcgccttcgactgcaaggcggcaggtgataccggaatatcgatcggagacgtccccggcaccctgcgcgccgcgcacggcggcggccatgcagccgtggcttacgcgatccaagcaggcgcgaccagagtcaacccggccagcggcccggacggtgtcggcgtgcaagctgatcacgcatacacgatcgaggcgcgcgccgaggtgcaagccgttggatacatgcccaaccaggtccgccgcctcaccccgcgcgagtgcgagcgcctgcagggcgttcctgacgactggaccttggtcccgaacgctcggggcaagccgatggcggacggcccccgctacaagatgctgggcaacagcttcgccgtgacggtcatccactggatcggcgagcagatccaacacgcgcatgaccgatccagcgagatccagcgcctgcgcgatgcagcaacccaggccaccgagcagctgcgcgcggcgctggccaggaaccgagggaagaccgcatga

SEQ ID NO: 500787 - DNA, 222 bp, Stenotrophomonas maltophilia
gtgatcggcgaagttcttcagttccgcgacctgcaggagctgtgccggccggggaagcgtccccggctggctacggttgagcgctgggccaagcaacgcagcatccggatccaatacgacggccaaggcggcatctggaccaccacggccgccctcaatgaggccttgggcctcaccgcctcggctttcgagaacgagagctaccccgcttcgctgatctga

SEQ ID NO: 500788 - DNA, 1176 bp, Stenotrophomonas maltophilia
atggctagaccacgcaaggctccgcccaaccttccagcgcacatcgactacggcttggtgcctcccggtatctactgggatcgcaccggccgtggcagatggtgcgtacaggatccgcacccggacgggcacggttttaagaggaagactgttgccgggccgactgcccgcctgtccgatctgcatgccatcgccgagggccggcgcggcgagacgcagcgcggaactatcgcgtacgtgattgatcagcatgccaagagccttgcgttcacccagctgcagccgtcgacccagcagcactaccgcgactatgctaaggccatcaaggcctatccgctaaagaacggaaccaccctaggcgctgcggtggtggatcgcctttctcctggctttatacggcggctgatcgatgtgatcgctcaaggcagacccggccagaagccgagcgatccggccatccctggctaccctacgaaggccaaccactggctgcgatacttgcgccgcgtgttcggctgggcacgggagcatgaccatgtgaccacgaacccggcggccggtatcaagcaggtaaaggagaggggcgcccaccgcatgccggcggtcgatgtgttccgtaaggttcaagcctatgcgaaggaatgcagcgcgcgcggtcctcgggccagaggcgcagtgccggcttacctgtgggcagcgatggagttggcttatcaagcgcgcctgcgcggaatcgaggtgctgacgctaaccgacgcgcacgtggacggtgaggtgctgcgaacgaaccgacgcaagggtagtcgcgacaacctgatgcgcaagggtgccgagaccgaggaggccatcaccatgctgcgggcacggcgcgcggcgatttgggagaagaaacggggagtgattccgatccgggccgaggaccgctatctcttcgtcagtgaggaaggcgagcggttgaccgaggatggttggcagactgcctgggggcgcatgatgcggaacgcggtgaaggacgggatcctgagtcaggacgaccgattcggactgcacagcctgaagcatcggggtgtcaccgataccagaggcgacaaaaaaagagcaagtggccatcgcaccgacgcgatggtggatctgtacgaccacgagctcccgctcgtggacccggcgggtacgtag

SEQ ID NO: 500789 - DNA, 903 bp, Stenotrophomonas maltophilia
atgaaccggccgcacggcttctatactcccctccgttaccctggcggcaaggggaaattgaccgcctatgtcgaaaaggtcctcgagcttaatgggctttacggcggtacgtatgtggagccttacgccggcggcgctgccgtggccttggagttggtgctcagaggcttggtcaagcgggtgcacatcaacgacctgaaccctgcggtccacgctttttggcaggctgttctgatgaacccggatgagttgatccgtcgcatcgagaggtgctcggtcgacatggatacttggaactgggctagagcagtgcagaccgtggaaggtcctgatccaatggacctcgcattctcaacgtttttcttgaatcgaaccaaccggtctggaatccttcttggcggtgtaatcggcggaaaagcgcaaactggtccgtggaagattgatgctcgcttcaataagcgagatctaatcatgcgcattgaaacaatcgccgatcattccggtgccattcggttacatcacgaagacgcacagtcgcttgtcaagcggctcgcgccgcggctggcgaagaagaacttgatttacttcgatccgccgtactttgtaaagggtcaaggcctttacatgcaccattatgatccctcggaccacgcttcggtcgcaaagactattgaatcacttcccagtagctgcaattggatggtgtcgtacgatgaccaccctgcaatcagagatctctactcggcctacgaagaactgacatacacgcttaattacacagccgctcaggagagaggccgaggaacagaggtgatcttctactcacctagacttgtggtcccggcacccgttcggccaatgagagttatggtcgcagctgcgcccgctttaacacagagatga

SEQ ID NO: 500790 - DNA, 1011 bp, Stenotrophomonas maltophilia
atgaggctccaagcagttccgtttgacgcggatccccacacggctgctgattggctcgagatgaaggccatgctttctcctcgcgacaaggtggcttttgccgatatcgagcgatcatgggaggccaacaggatctccgaagatgaggatccttccggcggtgacgtgttttacgaccagtggctaaacgaacgactggacgtgattcagcgccgtatggacttgctcggttccgcatacccgttcgaattctgcgacaatgaaactgccctccgctttatgggttccgctgagctagtggatgggcgagcggtatatctcctttcgctgtttctctcagttgcctccaatacgataatatttgtcaataaactccccatcaccaagtggatgcgggacacgtttcagacttgctctggctgggctgcgtcaggtgcgattgaaggttcttcttatgtgttcggatggccgcgctctgacggatccaacttcgtcactgcactgaagcatgtttacgtcaacctcatggcagatggtgagattctgccgcgtgacaccgctccgcctggtgcttcggggcgagaaaaagatggcggtatagatgtcgtagcttggaaagtgaggatcgacaaagcgggcgggaagctgcatttgctgggtcaagtggcgagcggcgcaaactggcgcgacaagcccattactccatatatcgattccctgcaaaagctctggctcacacaacaatggatccttcccccagtccatgccatgttcattccgttttccatcgttccggagcccgggattacgtatgccgagcaggtgcgctttcactctgcgacctacggcgcgatcttctatcgtgaggtgctagctgcttatgctcagcgagggctagagttggggagatctggggcagtgctttgtcatcgctcgtctgagctggccacgctcatttctaaatctagaagcctcatctctgtgttaaagcgggcgcagctgcgaccataa

SEQ ID NO: 500791 - DNA, 1131 bp, Stenotrophomonas maltophilia
atgccatcgaagaacgtcgacatagagaagatcgaggatttccctccaggcgaactggtcttcgatgatcaaaatcctcgcttggaggatggaattgatggcaacgacccagcgggcgagaaggagatcatccagtggctgcggaatcttgccgctcttgacgaactgatcgcctctattacccacaatggatttaagaggattgagcccctggtgatccatgggcctgacggtggtccttataaggttctagagggaaatcgacgtctcgcgtgcattcggttactaaccaatccgcagctcgcagatgagctgggcgttaccgtgcctcggcccgtgccgcaagcggtcctagacagtattaagacggttcccgtctatcgcgtaaaaaatccgtctgacgccagggcgtttattggctttaagcacatcaacggtcctcatcgttgggagtctttcgctaaagctaagtacgtaacggactggtggaagcaagagaggacgtctggcgtaacaatcagtcagattgctgaaagtctgggtgacgataataatacgattcggaacatgattgccggtatgcttgttttagagcagggtaaggctctaggatttgatatcgcagaccgagcaaatcgcgggcgattcgccttctctcatttgtacacggctctttcccgtggcgagtacatggagcacttagggcttcgcaaaggatggtctcaaacgctcgatttggaccctattcctgctagccatcaagagcagttgtccgaagtccttctctggctctacggtagcaaggcgcgtaagaagccttcgctgataaagtcccagaaccctgatcttgcggatttgggtgaggcaattgctagccccgtggctctccaggtgctgagaggtggggccagcttgcaggaggcgcgtcaggcatttcgaccgcccgagacaatgctcaatgagctcctggtgcagattaacttgaggctgcgcgaggctactcagctggcaggtcgtgcggaggatttgccagaggcgtttgctgagatagcgaaggaaattcagactcaatctagggcgctagcactgctagtcggttcagcaattgcagggaagcaaggtgacgaatga

SEQ ID NO: 500792 - DNA, 744 bp, Stenotrophomonas maltophilia
atgaacctcaccgccttcggcctggccagcctgatcggaatgaccgccaccctcccggttgctgctgccgagccggcccatcccaccatccgccatatggcgggtgcgccggtcgcgacctcgctggatgcggcgaagactgccgtgctggtgatcgacttccagaacgagtacttcgatgccaaggccgtaccgggctttgcgggtggccgcatggtcattcccgatggcgtggccgcactgcgccaggccaagcgggtagtcgaattcgccgatgcccacggcatccgcgtgatccatgtccagcacgtgctgccggccggcgcacccctgttcgcgcagggcagcgtcaatgccgccttccatcgcgacctgcagccgcgccagggcgagaccgtggtgcagaaggacaatgtcagcgtgttcgccggcgcgtccgcagccgtgctcgaccaggtactgaagagcgccggcatcgacaccctgatcatcaccggcctgcagacccatgcctgtgtagtgggggctgcgcgcgatgccgccgcggcgccacgcggctaccgggtgatcgtggccggcgatgccaccgccagccgcgacctggacctggccggcggccagcgcatcggccatcgcgcgctgcatgaagcctctctggcccagatcgaggacaccttcggcgatgtcatgacgactggcgcgatcctggcgctgccggtacgcaaggccggtgacggcgcttga

SEQ ID NO: 500793 - DNA, 234 bp, Stenotrophomonas maltophilia
atgcccggcggagacgtgaacgaaaagccgccgggcatggcccggcgctaccggatcacggccgcgcgccggggcatttcccgcgatccaaccgcccaagagccccttcttgttgaaggggcgcgccgacaggcgggggaagaggaggaatgcgcgggcaattatgcctttgccggggtcaggaccatggtctacttgggtagccgggcccggctaaggcataattgccggtga

SEQ ID NO: 500794 - DNA, 297 bp, Stenotrophomonas maltophilia
atggaattcagcttcacgctgatgtatcgggtgcccgataccggagaagatctcagtgcatttgagcgatgtcttgcagagtcgggatgtgacgatgcattgctgggcagcggtttgccgggcatcttggcgttgcgattctggcgagagggaacggccgcaaacgatgtcgtgcgtgacacatgcgcgcaggtccagaaggcgctcccggaagccgagttgatagcggtgcattttgatgtcagcaatgctgccagcgtctctacctgcagtttcgccagagctgagcctgcttga

SEQ ID NO: 500795 - DNA, 804 bp, Stenotrophomonas maltophilia
atggacgagcacaacgccacccctgatggcatgccgctgccgttggcgtggcagaaggcgttggcggatgcgcgcatcgagcggcagtcgatgggtgtttcgcgggccgacgttgcccgcgtgctgcggcagggccgccccgatgcctttctcaagtcggaactgatcgacgccttcagtgagctgggcgatgagatcgcgcggctgcgctggttgcaggcacagggacaaccggcgccaacggtgattgccacggccgaagaaacgggccggcgctggttgctgatgagcgcgctgcctggccgcgatctggcctcgtcgccggaactcgcgccgcagcaacgggtggagatactggccgacgcgctgcgcgggctgcatgcgttgccggtagcagcctgtccgttcgatcagcggctggcctcgcgcctgccggccgcgcaggcacgggtcgaggcggggcgcgtggacgccgatgacttcgatgacgaacgcctgggacagagtccacagcaggtcttcgcccaactgtgcagcacacggcccgatcatgaagatctggtggtcagtcatggcgatgcctgccttccgaatctgatggtggccgaggggcgtttcagcgggttcatcgactgtgggcgactgggcgtggccgaccgttaccaggacctggcgctggccgcgcgcagcctggtccacaacttcggtgatacgcgctgggtcacaccgttgttccaacgctacggcgctgtggccgacgagcgccggttggctttctatcggctgctcgacgagttcttctga

SEQ ID NO: 500796 - DNA, 426 bp, Stenotrophomonas maltophilia
atgccacggatgatcaccgccctgctcgacagccgcctgctgtggttcctggcccgactgctgctggcggtggtgttcctgtcatcgggtctggccaagctgctggcgtgggacaacagcgtggccgaaatgcaggcggccgggctgcaaccgcctgtgctgttcaacctcgccagcgccgtgctgctgctgggtggctcactgtgcctgctgcttgatcgcctgctctggctgggcagcggcgcgctggcggtattcatgctgctgaccatcgccatcgtgcatgccttctggaccaagcacggcacggaacagcagctggccctgttcttcgcactggaacacctgagcgtggtcggtggcctgatctgcgcggccatcgccagccgcgcgcgggctcagaagaactcgtcgagcagccgatag

SEQ ID NO: 500797 - DNA, 1035 bp, Stenotrophomonas maltophilia
atgagcgcggttgagcggcgattgctcggcgttgatctggcgcgttacctggccttggccggcatggtgctggtcaacttccgcctggcgatggccgtgccggcagagggtgagggttggctggccggcttcttccatctgctggaaggcaaggcctctgcgaccttcgtcaccctggccggacttggcctggtactggccacgcagcgccttggctggatgccggccagcgcgcagacctgccggcgcgcgctgttcctgctggtgctgggcctgctcaacctgaccctgttcccggccgacatcctgcactactacgcggtgtatttcgcgctggcggtgctgtggctgcgtgcgtcgccacgggtgctgctggccagcatcgccggcctcgcggccgggtcgttctgggcactgctgcactggaattacagccagggctggaactggcagacgctggaatatgccggtctctggcaatggccgggtgccgcgcgcaacctgttgttcaacggcttccatcccttgctgccctggatgtgcttcttcctgctgggcatgctgctggcgcacctgccgttgtcacaaccgcgggtgcagcgtgcgttgctgctggtgggcctgctgctgatcggcgcaggccaggccgtgcagcaccttgcacagggaacgccctggcagccgtggctgggaacgcagccgatgccgccgggaccggcctacgtgttgaccggtgcgggcgcagcctgcagcgcgattgccgcatgcctctgggtcagccgccggtatccgggggattggctggaaccgctggctgcagcagggcgaatgaccctgaccctgtacgtcggccacatcctgctgggcatggggacgctggaatggttgggcctgctcgatggcagcgcgtcgctaccgaccgtgctgctgtgggcgctgttgttcctgatgctggccacgggcgcagcgtggctgtggtcgtggcggttcacgcgggggccattggaagcagtgatgcgacgcgtcgccggctag

SEQ ID NO: 500798 - DNA, 1005 bp, Stenotrophomonas maltophilia
atgtcatccgcttcggcgcagcatctcggcgaagtcctccagcagtcctatggcatcaccgcgaccgctgtggtgccacgcccggttggcgccgatgccaacgccagcgtgtatcgcatcgatgcacggcgcgggcagtggtggttgaaatgccgcagctaccaggtggccccagccgtctgggacaccctgcattggctgcgcggcacgctggggatcgaggaaatcgttgcgccctggccggcgctggccggcggggcatcggtgcagcgctggggcctgcagttcaccctgttcccgtatgtggaaggccagtccggtttcgaggcggcattgagccgcacgcaatggcaacggttgggcgaggtgctgcggcgcctgcacgaggcgtgcccgccaccggcgctgcaggaagcgctgccgagcatccggatggaaaccgcggcactggagaccgtcgggcagtggctggccggcgaaggcctggcggctgccaaggatgggctgggccgtgccttcgtctccgtctgggaccagcagcacgcgcgcatcgcggcgctgcacgcgcaggcactgcagctgcacgcggcgttgcaggatgtgccggtgcggctgcacctgtgccacaccgaccttcatgccggcaatctgctgatgggcaatgacggcggcctgcacctgatcgactgggatggcctgtcgctggcaccgcgcgagcgcgacctgatgttcatcggtggcgctgtcggcgggcgctggggccgcgagaacccggtgggattcgaggagggctatggcggtgaccgcggcgaccctcgctggatcgcctggtaccgtcactggcgcatcctgcaggacctgatcgagttccagcaggtcctgctgggcagcgatggagaggaccggtcgccgcagctgcgccggcagtcgctgcatttcctcagcgaacagttcgccccgggcaatgtgttcgacgcggccgagcgggtgtatcgcgcgctgtag

SEQ ID NO: 500799 - DNA, 558 bp, Stenotrophomonas maltophilia
gtgaagaagatgatcgttgtagcagccgtattgaccggagctttggccgtgaacgcgtccgcccaagaggtggattacctgggagcctcgcccaagctcttggcagaagccaatgcgcaggcggcggacttgccggcgggcgttcagctggttgaacttgagcgttggcgcagtagggatgacaccttctcggcgcggccgctgaacactccgggtggaatgcagcatccaggcaggaaggaaggcactttgggcttcatctcctactatccattcgaaggcagtgtgacaatgtacgcatgcctcaacaacaactggctggatagcttctcttcgatggatccgaattgcgaaggccatatgaagaccacgaacggcatgccgattacgggttacatcgcggctgcgcagctcccgggcactgtccccttgtaccgctgcatgcgcggtggtctgaaaccgaacaactgggcagatcacttcgatacattggatgccaactgcgaaggcgtgaagtatccggtaaacgaaggaatcatgggctacatctggctctga

SEQ ID NO: 500800 - DNA, 465 bp, Stenotrophomonas maltophilia
atggatcaccgcctgcagcccgtgcaaccccacgactacgtgctcatcgccgggtggctggattcggctgcagccacgttgcgctgggccgggccgggcgtgccctatccactgccacccgatcagttcgagaacgtattgcagctgcgcgaacgcccgggatggctgctgctggcagaaaacggcatgcgcgtgggtttcggccaggcctggcgcacccagccgggtacgatgcatctgggccgtctgctggttgccccgcaggcgcggggctgcggtctcgggcggaggttggtacacgcgctgatcgagcaggcgttccagtctgatgccgttgaacggctgaccttgcgggtctatcgggacaatgccgccgcagttgcgttgtaccggtccctcggcttcgagccggtggacactgcatccacgccagcgctgctgttcatgcagcgggcctggcgctga

SEQ ID NO: 500801 - DNA, 438 bp, Stenotrophomonas maltophilia
atgaccgtgccgtgggccgccgtcgcggggggcgcgttgatcggtgcggcggcggtggttttgctggcaaccacgggccgggtagccggcatcagcggcatcgccgctggcagcgtgcgcgcaacgccgggcgatcgaggctggcgctgggcattcctgctcggcctgcttgccgctgccgggggtgtgctgtactggcaggccgtgccaggccaagcgccccgcaacctgttgcgtgacgccttgccggcgtggcagctgatcggtgccggcctgctggtcggcttcggtacgcggttgggcaatggctgcaccagcggtcacggagtctgcggcctggcccgcggctcaaagcggtcgctgctggcggtgctggtgttcatggcctgcgccatgctgaccacgttcctgatccgtcacggcggaggtttcgcatga

SEQ ID NO: 500802 - DNA, 438 bp, Stenotrophomonas maltophilia
atgagccgcgcgatggtggccgccggtgcggcaggcgcgcttttcggcgcaggcctggcgttggccggcatgaccgatccgcgccgcatcctcggtttcctcgatatcgctggcgatttcgatcccaccctggcctgggtgctggcctctgcactgctggtcagcgcggtcggccagcgctgggtgctgcggcgcccgcggccgtcatgcgcaacgcgcttccaattgcccgccgcgcgcgctgtcgatgtgcgcctggtgctgggcgcggcattgttcggaatgggttggggctgggcaggctattgcccgggccctgccatcgccgggctggcggtgggatcgcgcgaagcgctttggttcgtgccggcgatgcttgcaggtttctggctgcacgatcgcctggttcgccggggcttcaccgctgtatcaccctga

SEQ ID NO: 500803 - DNA, 1053 bp, Stenotrophomonas maltophilia
atggcacggatgaagtggaaggaaagggcactgctggcggtcgcgctggctgccgcagtggcaccggcgctggcctgcacgcgcgcggtctacctgggcgacaacggtgatgtgatcaccgctcgctccatggactggaaggtcgatgtggcgaccaacctctacgtgctgccgcgcggcatcgcgcgcaccggccaggccgggccgaagtcgctggcctggacggcgcgctacggctcggtggtggccaccggttatgacgtatcgaccaccgatggcatgaacgagaaaggcctggtggccaacctgctgtggctggtcgaatcggagtatccgaagcagcgcggcaacaagccgggcctggccatctcactatgggcgcagtatgtgctggacaacttcgccaccgtagacgaggcggtcgcggcgctgcagcgcgagccgtactcgatcgtcaccgacaaggtgccgggcgaagaccgccaggccacgctgcatctgtcgctgtcagatgccagtggcgacagcgccatcgtcgaatacatcggcggtcgccaggtgatccaccatgaccggcgctaccaggtgatgaccaactcaccgatcttcgagcagcagctggcactcaacagctactggcagcagatcggcggcacggtgatgctgccgggcaccaaccgctcagccgaccgtttcgcgcgcgcctcgttctacatcaacgccattcccaaggcggaagacccggtggtggcgctggccagtgtgttcagcgtgatccgcaacgcctcggtaccgtatggcatcaccaccccgggcgaaccgaatatttcatccacgcgctggcgcaccgtggccgaccacaagcggcggttgtacttcttcgaatcggcactgacaccgaacaccttctgggtcgacctgaacaaggtcgatttcggcggcaaggtgctcaagctcgatctcggtccggaccagcgcaataccttttccggcgacgcgctgggccacttcgtgcccagcgcaccgttcgcgttcctcggcgtcgacggttag

SEQ ID NO: 500804 - DNA, 780 bp, Stenotrophomonas maltophilia
atgacccatcagcggctgtccctggtgcttgccatcagcctcggcctggcgctcaccgcctcggcctccgcgcaggaacgtacgccaccggccccgcactgcatggacgcggtcggcgtccaggaagtggagcaggcgtcatcgcgttcaatcgccctgcgagccgcctccggccaggcctatcggatcgacttcagcgaagagtgtcccggcgtccgcagtgctaccacgctgaaacttgaagcacccgccggctgggcctgcggtcgccccagcgagcgtgtggtggtcgatggccgcagctgcgcgatcagcgcggtgacccccgtgcaggatcgcgactacgccagcgtggcccgcgacagcgaccgcctgcgcatggccaccctgcccgccctgaccatccgcgagcgcagggacatccgccgcagtttcggtggttcgccgtcgtactgctttgccacgcgcaacgtgcgcgcgtggtcgtccgacccgcagggcatgctggtggagaccaatccgcatcgcaatgggggtcaccgctactatcgcgtggagcttggcagccactgccgccagctcgaccgtgcgccacagctgagcttccactccggcatgcagaacggcctgatctgtggcaatccgggcgatcgcatcctcaccgccggattcgagaatggtgacctgcgcaacgacgcgctggcgccgctgccgcagtacacccgcggcggctgcacgatccaggcggtctatccggcgtccagccaggcgtcgaactaa

SEQ ID NO: 500805 - DNA, 951 bp, Stenotrophomonas maltophilia
atgcgcaacaacccgatggccgtgggcatcgccaatggcgtggccgctggcgcactatggggcgtggtctttctcgcgcctgccgtgcttcagtcgttcaatgcgctgcaactgtccgccggccgctacctggtctatggcctgatggcagtcgccctgctgctgccgcggtggaagcggctggcaccgcggctgggccgtgccgaatggatcggcctgctgtggctgagcctggcaggcaacctggtgtatttcctgctgctggcgaccgccgtgcagtgggccggtggcgctgcggcatcgctgatcgtcggcctgataccggtggtggtcaccctcgttggcgtgcgcgagcagggggcggtgccgctgaggcagctgctgccggcgctgggcctttgcgtgctcggcgtgggactggttggctgggaagcgctgatgtccgagcacctggccaccccgtggcggcagcgcctgatcgggctgctgtgcgcgttcggtgcgctgttctcgtgggcgctgtattcgatcggcaacagccgctggctggcgcgccgaccggatctgtccagccacgactggtcgctgctgaccggcgtcaccaccggcggcctggccctgctgctggtgccgatggccttcatcgggcacaccggcagccatacggcggcgcaatggagcgggttctgggcgatcagcgccggcgtggcagtggtggcctcgatcctcggcaacgcattctggaaccgtgccagccgtctgctgccactgaccctgactggccagatgatcgtgttcgagaccctgttcgcgctgctgtacgcctttgcatggcagcagcgctggccctcgctgctggaagccctggcaatcgtgttcctggtggccggtgtgatgctgtgcgcgcatgcccaccgcacgccacgggcgatcgccgaacatgccggctga

SEQ ID NO: 500806 - DNA, 138 bp, Stenotrophomonas maltophilia
atggtccttgatgccgcccacgccagcctgatcgcccccgccattgcgggcagtacgactgcgccggtcgcgaccatcaccaccattaccaccaccaccgtcaccactgccctggtgcggcccgtcgtcttcgtgtaa

SEQ ID NO: 500807 - DNA, 1194 bp, Stenotrophomonas maltophilia
atgtctacctcctcgctgtctgttgcggccgcaccggcgaccgtgccttccgccccattggtgctggcgatggcggccggtgccggcttctcggtcgcgtcgctgtattacagccagcccatgctgggcctgatcgcccaggaccttggcgccggtgagcgcgccgccggcctggtgccaaccctgacccagctcggctacgcgctgggcatcctgctgctggcaccgctgggcgaccgcttcgaccgccgccatctgatcctgttgaagtccgcgctgctggcgctggcactgggcgccgccgcgatggccgggcacctgccgggcctgctgatggccagcctgctggtcgggctgatggcaacgctggcacaggacatcgttcccgccgctgcggtgctggcaccggatgcgcagcgcggccagatcgtcggccgggtgatgaccggcctgctgctcggcattctgttgtcgcgggtggtcagtggcgtggtggctgaagcgtggggttggcgcacgcagttcgtgctggcggcggtatcggtggcggcgatgggcgcggtgatggcgcgtgcactgccgcgtttcgcgccgaccagcacgctgcgctatccggcgttgctgggttcattgctggcgttgtggcgtgagcagccgcagctgcgccgtgcagtggccagccagtcgctgctggcggtcggcttcagtgcgttctggtcgaccctggcgctgatgctgcatgcacgtctgggcctcggcagtgctgcggcgggtgcgtttggtattgcgggtgcggccggtgcattggccgcgccgtttgccggccgtttcgctgatcgactggggtgccatgcggtggcacggctggcgattgcggtggcgctgctgggcttcggcctgctgctggccgaaggctggttgccggccgccgcgctgctgccgttgctggtggtgagtgcgctgctgttcgacttcggcttccagtcggcgctggtggcgcatcagaccctggtgtacggcctggtgccgccggcacgcagccggctcaatgcgctgttgttcaccggcatgttcatcggcatggccgccggtggtgcgctgggcagcctggcgctggcgcagtgggggtggcacggcgtggcctggctggcggtggtgtgtgcgggcggcagcctgctgctgcgtttgaagtaa

SEQ ID NO: 500808 - DNA, 930 bp, Stenotrophomonas maltophilia
atgaatgacctggccaccggcgctgatcgcctggatctgctgcgcaccttcctgcgcattgtcgatgccggcagcctgtctgctgcggccctgcagatgggcaccacccagccaacggtcagccgacgcctgcaggcactggagcggcagctcggcctgcgcctgctgcagcgctccacccatggcctgcaactgaccgaggacggcctgcgctgccagcgtcatgcgcagcgcgtggtcgacgaatgggagtcgctgcaggccgagctgaacggcgaaccggaaacgctgcgcggacgcctgcgggtgatggtgccgcacgcctttggccaggcgcagctgctgccgaccatgctcgcattccttgcccagcacccgcagctgagcctggagtggatcctggaagatcgccgcccggacttcatcgccgaaggcatcgactgcgcggtccgggtgggcccggtcgacgaaccgcgcatggttgcactgccgctcgcggaagtgccgcgcatcgtcgtggcagcgccctcgctggtggacgccacggcggtcagtacgccggaacaggcacagtcactgccgtggatctcgctggtcacctactaccgcgaacgcctgctgctgcatgatgcgcagggccgggcgcatacgctgtcaatcagcccgcgcctgctcagcgacaacctgttcgtggtacagcaggctgcacgcgccgggctgggcgcagtggtggtctcggcctggctggtggccgacgacctcgcacaagggcggctggtgcagctgctgccggactggcaggcgccggcactgccggtccacgtcgtgtttcctgccgcgcgccagcagccgccacggctgcgcgccttcatcgatgcgatgaaggctgcgttgccgcagctgcacggcatgcggccggcaccgcgctag

SEQ ID NO: 500809 - DNA, 1458 bp, Stenotrophomonas maltophilia
atgttccgttcccgcctgttgccccttgccatccttcttgcggtggcgccgctgtcggcatctgctgccgagcgcgccgacctgctgatccgcaatgccaccgtggtcgacgtcgagcacgccagcacgctggccgggcagagcgtggtgatccgcggcgaggacatcgtcgcggtgggcccggacgcgcagctgcgcagccagtggagcgcggcccgccagatcgatgccaagggcaaatacctgatcccggggctgtgggacatgcacgtgcacttcgggggtggcccggcgctgatcgaagagaacaaggcactgctgccgctgtacatcgcgcacggcatcaccaccgtgcgtgactgctccggcgatctgcccgagcaggtgctgcagtggcgtggcgagatcgccaggggcacactgttcggcccgcgcctgctcagttccggcgcgaagatcgaaggcatcaagccggtgtggaagggcacgatcgaagtgggcagcgaggccgacgtcgacaaggcgatcacccgactgcagcacgacaaggtcgatttcgtgaagatcaccgacagcacgctgaagccggatctgttcctgtattcggccagcgccgcgcgcaaggccggcttcaaggcctcgggccacattccgatggcgctgacggtggagcaggcggtcgatgccggcctggcctcgatcgagcacctggactacgcattcaaggccggcagcagggacgaagcgcagatcgccgccgacttcggcgccggccgcatcgaccgcgcggaagccaaccgccgcctcgacgccagcttcgaccgtgacaccgcgatgcacgcctaccgtgattttgccaagcgcggcgtattcgtgaccccgaccctcaacggtggccgtatcctcgatttcctggaccaggatgaccacgccaacgatccgtacctggcctacatcggcccgggcctgcgcgcgacctaccagtggcgcgtggaccgcgccgcgaaggcgacgccggcacagatcgaggcgcgccacgcgcagtaccaccaggtggcggccgtgctgccgttgctgcaggaggcgggcgtgacgatcattgccggcaccgatgcgggcttcctcaactcgttcaacttcccgggcatcgccctgcaccaggaactgcagctgttcgtgaaggagggcctgagtgcgccgcaggcgctgtcggccgcaacccgttccggcccggcctggttcggccagatggaccgctacggtggtgtcgcgcagggcaaggccgccgatctggtgctgctgaccgccaacccgctgcaggacattgccgctaccgagaagatcgacagcgtgatcctgcgcggcaacgtgtatgaccgcgccgcgctggacaagatgctggccgacaccaaggccaaggtcgcagcgtggaacgccgaggctgcgaaggcgcaatga

SEQ ID NO: 500810 - DNA, 702 bp, Stenotrophomonas maltophilia
atgcgcttccattgccccgctggctggcctgcaccgttcacgcgcgtgctgctgtggtgtctgctggccatggtcgcccctgcctgcactgctacgtccagggccgacgcagacgcgcgcctgcgtgatgccgccagccgcggcgatgccggggcggtgcgcggagcactggccgatggtgctgatctggaggcgcacgatggccagggccgtacggcgctgctgctggccacgcagggcaacaacgtggatgcggcgcgcgaactgatcgaggcaggggcggacgtcaatgccaaggatgcgctgcaggacagtgcctacctgtatgccggcgcgcgcggcctggatgagatcctggcgatgaccctggcgcacggcgccgatctgcgcagtaccaaccgctatgggggcactgcgttgattccggccgccgagcgcggccacgtcagcaccgtgcgcatgctgctgcgtgcaggtgtggcggtggaccacgtcaaccgcctgcactggaccgcgctgctggaagcgatcctgcttggcgacggtggcgagcgccatgtgcagatcgtgcagctgctgctggaggccggtgccgacccggagctggccgacggcgatggcgtaacgccactggcgcacgcgcgccagcgtggctatgccggtattgaaaccctgctgcgccagcacggcgcggcgcgctga

SEQ ID NO: 500811 - DNA, 438 bp, Stenotrophomonas maltophilia
atgtccgaccaacccccgacgcgcttcgatcccctgcctgcagccctgcagacgcacctgcagcaccagcgtgcactgatcgccgcgcgcgtggccgccagcttcccgacgttgccggtgcaatggccgctggccgccagcacattgcagcgcgtggtcgatgccgagctgatcgatcgtgacgactgcggcggctgggaagccctgggcgtggcgctcggtgacaccctggcccagcgcgtgccaggcctggcctggatgcaggttaccgatgcctggggcatcgacgcggtgctgcgctatgccgacagcagcctgcagatcggcgccggcaccctgctgctcaagcgcgtggagcagggcgaggtcatcgacatcgcccatctgctggcgtggctggaagaattcgtcgctacccgcgccgacgattacgcctga

SEQ ID NO: 500812 - DNA, 1932 bp, Stenotrophomonas maltophilia
gtgagcggctgcgacgcagcgtcggacatttatggcggcagcgtgttccgtgccagcaacccgcgcctgggctggtactgcggcagcaacgaggccgcggccagctactggacggtgcagaccgagaagcgcaacctcaatggctatggcctggcgaccttccacctcaacgagaccaccgacctgttcgccgatgtcgccgtgggcagcgcgcgcatttacaacaacacgcgcgcgccgacctggacctcggcgcgcaactacttctacaaccagaacagcgggaacctggagagctggtaccgccgcttcgcgccggaagaaatcggtggcctgccgcgcaatgccaaccggttcctggaaaactcgtggtcgttcaacgtgggcgcacgcggccagatcggcgacagcggctgggactacgaggcggtctacagccgttcgcgctacgagaaccgcacccgtcgcccggtgctgctggccggcatcaacgagtacctgctgggcccgaagctgggcgtgcgcaatggcgtggaggtctatgcgccggacccggtgcgcctgttcaagcctttgactccgaacgagtacgagggcctgtccgactatcaggaaagccgcaacgcggcgtggctgcagaccttcagcgccagcatcaatggccgcctgttcgcactgccgggcggcgatgctgcgctggcggcggtggtcgaggccggcagccagggctaccgcaaccgcccggacccgcgcctgggcaccggcgagttctggaacaccagcgccggtatcggtgccggcggtgatcgtgatcgctatgcggccggcgttgaactgcagttgccgctgctgcaatcgctgaccaccacgctggccggccgctacgaccagtaccgcgcaggcggcgagcacatcggcaaggcgacctggagcttcggcgtcgagttccgcccgatcgagagcctgttgatccgcggctctgccgcgaccagcttccgtgcgccggacatgaactacgtgttcgccaccgagacccgcggctacaacccgggcatgaccgattactggcgctgccgtactgcgggccagtcgtacgacaactgcgactacaacggcctgtcgatcgactatagcaaccgtgccaacgcacagctgcagccggaaaccgccaaatcctatgggttcggcgtggtctggtcgccgctgtccgggctggatttcagtgctgactactacgacatccgcatcgacaatgaggtcaccagcctcgacaccagccgtattcttcgtgatgaagccgattgccgcctgggacgcacgttgggtggcgaagcgcgcgatatcggttcaccgctgtgccaggacgcgctgtcgcgggtgatccgcaacccgtccaatgccacggtgcagccggaccaggtaacccgcgtgctgatcaatccgatcaacgcggcctccgagtcggtgcgcggcctggacctgaagggcaactggcgcttcgacgccggccgctatggccgcttcaccacgcgcctggcctataccgtggtgctggagcacaagtaccggcagttctccgatgatccggagcgtgacatccgcaattcactggatgactaccagtggcgcagcaaggccaatggcagcatcacctggaaccagggtgactggaccaccacgctgtacggcaatcgtttcggttcactgccgaagaccgatggcagtggccgcatcgcgccgtacatgacctacaacgccagcgtgttccgccagttcggcgagaacctgtcggtgggcgtgatcgtcaacaacctgcgtgacagccgcccgccggcggacaggaacgggggcggctggccgttctacccggtcggcaactacgacccgtatggccgccagtactggctgcagctggactaccggttccgctga

SEQ ID NO: 500813 - DNA, 372 bp, Stenotrophomonas maltophilia
atggtctggcgcttttccgatacgcatcgtgcatggatgaccaaccgcgccacctacacccacctcgccccgctgcgccccgtccttcgccgccacctgctgcacctacaagcaacacccatcaccctgcgttcgttccagcgcaccgatctgccgcgctggcgcaccttcgacgaccgtcgccagcgcggccaacggccgtcctacggcattgatgaagaggcccgcttcctcgccagcgtccatcgttcacgcctacaggaagacaacgatctgctggtactgggcgtgttcgacgacgcgcagggcatcctgcacgaccagctgcatgtccgcctgcagtcgctgcattcgcgctgcgcagaactgtag

SEQ ID NO: 500814 - DNA, 393 bp, Stenotrophomonas maltophilia
atgacactcgcccccacccgcgacctgcagtccatgcagcaacaggcagctgactgcctggccggttacgctgaagcgaaccttctcaatcatgcaggcttggatgcgctcatcgcccacctgcgcgcatatccggattcgggcgaacccatggccctgccagactgggatcaggcaggctcagagcttcagatcgcgggtcgaggcgatccattgccgccatctctgttggggcagatcgccacagacaagcacgaggagttgaatgacctgatctgttcctgcgttgaagtgggaatcgcagatctgtacggcgctacgacggatgttcctgaccagatgctggccagagcactggccatcctgcagcgcaacacttcgcagcagacctga

SEQ ID NO: 500815 - DNA, 759 bp, Stenotrophomonas maltophilia
atgattgactaccagctcaccggcaagaccgcgatcgtgaccggcggcgtgtcgggcatcggcctggccgtggcccagacgctggccgcatccggtgcccgtatttcggtctgggacctcaagcaggatgcagtggatgccaccgtggcgcagttgcgcagcaccggcacacaggccatcggcatcgcgctggacgtcaccgacgacgcggcggtggaggcagcggtgcagcgcacgatcaaggaactcgacggcctgcacgtggcggtcaacaacgccggcatcagcgggccggccgccgccagcggtgactatcctatcgatggctggcagcgcgtgatcgatgtcaacctcaccagcgtgttcctgtgccagcgtgcgcagatccaggccatgcgcgcggccggcacgggcggcagcatcatcaacatggcctcgatcctgggccaggtgggctatgccggttccactgcgtacgtggcggccaagcacggcgtggtcgggctgacccagaccgccgcctgggagcatgcggccgacggcattcgtgtcaacgcggtcggcccgggcttcatcagcacaccgctgctggagaagatggacccgaaggtgcgcgccacgctggaagggcggcacgcgttgaagcggctgggtacgccggaggaagtggccgcattggtagcctggctggccagcgacgatgcctcgttcgcgaccggcacgtactacgccatcgatggtggctacctcgcgcagtga

SEQ ID NO: 500816 - DNA, 954 bp, Stenotrophomonas maltophilia
atgtcccgatatttcacttttgctgattaccgccagttcggcgaacgccatggctacgactaccggatcgaagggagtgaactgcgcgacgaccaatgggcagggcgtggcgacgtccacgaacagtcactgcgcggtggcctgggcctgatcgcctcggacgtgcacaaccgctttacctatacggccaccgctgtgcacgatgccggcctgaccatccgcctgatgctgcagggcgaagtggatgtccagtttcctcgtcgcaagggcttcaccctgcgcgccggcacaggcatgaccaccagtcaccatgaacctgtttccatggccggtctgcatcctggtggcagccacctgcgcggggtcagcttgagcgtaccggccgatctggacgtggacatgctgcgcctgccggcactgcaacggatccttcagtcccctctgcagtgccgccactgggccattccgcacgcgatgctgccgacgctcgcccaactgttcgacagcccctggcaagacgacatcgatgcgctgtggcgcgaaggcgtggccctgcaggtgttggccgtcggcctgcaggcccaggatatgcagaccgagcatgtacgcacgctgcgcgccggccagcgcgagcggctagagcgcgtgcgcagctacctgcatgacgaccccagccatgcccacagcctgatcgaactggcccagctggcctgtatgagtccgagttccttgcgccgccattttgcccagcaatatggaagctcggtgttcgactacctgcatgagcagcgcatgcgccatgccgaacagggcctgcgcgagaacggatggaccgtcgagcaggctgccgccgccagcggctaccgccaccccagcaacttcgccgccgcgttccgcaagcgcttcggcctggtccccagccgctggcgcacgggcccgtcgaaggtgggctga

SEQ ID NO: 500817 - DNA, 1911 bp, Stenotrophomonas maltophilia
atgcgtgtgcgtgccgtcgctgtagccattgccctttgcctgtccagcaccgtgctggccgccgataccccgccgatgaccccggacatcagcggcaagcccttcgttgcccccgatgtcggtcgtgactacgacaagcgcgtggtgatggtgccgatgcgtgatggcaccaagctgtataccgtgatcgtggtgcccaagggtgcccgcaacgcgccgatcctgctgacccgcacaccttacgatgccgctggccgcgccagccgcagtgattcgccacgcatgcgcgacctgctgccgcagggcgacgaggtgtttgtcgacggcggttacatccgcgtgttccaggacatccgcggcaagtacggctccgaaggcgattacgtgatgacccggccgctgcgcgggccattgaacaacacccaggtcgaccattccaccgacgcctgggacaccatcgactggttggtgaagaacgtgccggagagcaatggcaaggtcggcatgctcggctcgtcgtacgagggcttcaccgtggtgatggcgctgaccgacccgcacccggcactgaaagtggccgcaccacagagcccgatggtcgatggctggatgggtgacgactggctcaactacggtgcgttccgccaggtcaacttcaactacttcgccatgcagaccgagaagcgcggcaagggtacgccgctgcccagcctcggctacgacgactacagcaccttcctgcgcatcggctcggcaggcgactacgcgcgtttcaccggcgtggaccagttgacctggtggaagaagctggtcgagcatccggcctatgacggcttctggcagggccaggcgctggacgcggtgatggcaaagacaccgctgaaggtgccgaccatgtggctgcagggcctgtgggaccaggaggacatgtggggtgccaaccacgcctatcaggcgatggaaggacgcgatagcggcaacaaccgcaattacctggtgatggggccgtggcgacacagccaggtgaactacagcggcagcgaactgggtgcgctgaagttcgacggcgataccgcgctgcagttccgccgcgacgtgctcaagcccttctttgaccagtacctggtggatggcgcgccgaaggccgatacgccaccggtgctgatctacaacaccggcgaaaaccactgggaccgcttgaagggctggccgcgcagctgcgacaagggctgtgctgccagcagcaagccgctgtacctgcgcgccgggggcaagctggcgttccaggcaccggcggcgggcgagggcgacttcgaggagtatgtgtccgatccggccaagccggtgccgttcgtgccgcgcccggtacgtttcggtgaccgcgacatgtggaccacctggctggtcaaggaccagcgcttcgtcgatggtcgcccggacgtgctgaccttcatcaccgaaccgctggccgcgccgctgcgcatcggcggcacgccggtggttcacctgcaggcctcgaccagtggcaccgacagcgactgggtggtgaagctgatcgacgtgtatccggaccaggaagcgtccacgccggagatgggtggctacgagctgccggtgtcgctggcgatcttccgtggccgctaccgcgagagcttcagcgatccgaagccgctggccgccaaccaggtgctgccgtatcgcttcgatctgcccaacgccaaccatacgttccagaagggccaccgggtgatggtgcaggtgcagtccagcctgttcccgctgtacgaccgcaatccgcagacctacgtgccgaacatctacctggccaagccaggcgattaccagaaggccacgcagcgcgtgtggcacagcgctgcgcaggccagctacatcgatctgccggtgtattga

SEQ ID NO: 500818 - DNA, 387 bp, Stenotrophomonas maltophilia
atggatatcaccgcagaacatgaaatccacctcctgcacgacaagctgcaggcttggctccgtgccgacgtcggcaccgatgcgctggaggatctgatggcgcacttcagtgcggacttcagcatggtcggtatcgcaggacgccgaatggaccggaaggccgtgcaggcactgttcgcgggcggtcatggcgcgcgtccaggactgcagatttccatcgacgccgtgcaggcggtggaggcgccatcaccgctggcggtgctgcgctatcgcgaagggcattcggtcgacggcggcgcacccgcatggcgggagtcgctggcggtactgaggcacgagcaggggcgctggtgctggctggcgctgcatgaggtgacggcagcctga

SEQ ID NO: 500819 - DNA, 927 bp, Stenotrophomonas maltophilia
atgagccaggaggcgatcgcgcgcgaggccgcacgctggtggctggacggccgcgacggcggccgtgacgagcgtgcgttcagccagtggtaccacgccgatgcgcgccacgccgcgcagtaccagcacctgcaggcgctctggctggccggtgatgcaacacccagcctgcagcggcaccagctccggcggcagcgccggcgcctgcgcgacgccggtacggccgtgctgctgctctgtgcgttcggcctgtatacccaccaagccgcgccaccggccgcgcagacgatgcggacggcggcaggcgagatccgcgaagaagtactgccggatggctcgcgcgtactgctctcgcccggcagcgaagtccatgtccgcatcgatgcacagcgccgacagctgcagctggagcgcggccaggcctggttccaggtcagcgccgacgctgcgcgaccgttccaggtgcataccccgcacggtaccgtcaccgcgttgggcaccgcgttcgatctggcggtactgcgcggcgacagcgtggtcacggtcaccgagcaccgcgtcaacgtggtgtccggcagcagcacccgccaagcatccgaagggcagcagatgcgattcgacgcgaaggcatccgccacgctgcttccagcggagggggctgccctggcctggcgcgagcggcgcctgcactgggtctccgcacccttgaccgaggtcacccagggcctggatcgctggcatggcggccacacctggatcatcggcgcacagctgcgccagcagccggtcaccctgctcggcagcgccgacggcgcggcgcgcagccgcgaccagctggccacacagctgcgtgtgcgcgtgctccgcctgggcgcgggcgtgcaggtgtggctgccgccacgcaggggacatcgcgatgcaccctga

SEQ ID NO: 500820 - DNA, 2547 bp, Stenotrophomonas maltophilia
atgcaccctgacatcggccctgccgctgcgtctacccaggatgacgacgcgctgcgtcagcccctggagctcccgatgccgtttcaccgcccccttgtcctcgccctgtcactggcctgcgccattccgcttccactgttgtcggccagcgcgcacgcgcagaccgtcacgcgccacttcgatcttcctgcacaaccgctggccagcgcgctggatgcgtacagccggctgaccggtgtcgatctggtgatcggggcggcattgccgagtggccagacggcaccggcgctgcgcggacagttcgatgatgcgcaggcgctgtcgcgcctgctggtcggcagcggcctgcgcccccgcttcatcgacacacgccgtgcaacgctggaaccggcgccggccgaacccaccgacggcagccgtcgaaccggcccgctgcgcgtacagggcgataccgcgcgccgccacgcccccagcgccggtgccaaccagtacgtgccggccatccgagatggcttcgcgccctccgtcggcagcgaacgcgtagccatggccgagcgccaggacggcaacagcctgctgcgctcgatgcccggcacccacagcttccattcgcgcagccagcccggcctgcaggtcaacatccgcggcatgactggcgccgggcgggtcaacaccatgatcgatggtgtcacccagaccttccgcaacaacgcgggccatggctccggtggtccgttcgcctacgtcgacccgttcctgctggccggcgtggacgtgcaacgcggtgcggtcgccggtggtgatggcgcaggcacgctggccggcagtgccaatttccgcacactggatatcgatgacctgctcggtgaagaccgtgactggggcctgcgtgcaggctaccgccacggcaacaacggctacggcaatggacgcaccttcgccggcgcctggcgccacagcgaggacggcggtgatcgccagttcggcctgctggccgctgccagcagcagccgcagcagcgaatacgccaccgcgcgggggcagaagaacgacgccgacccgggcagccagcagcccagcagctggctgctgaaagcacgcctgcagccgagcgaccagcatcggctggacctgagccacatgcattacgaaaacgacttctaccacaactacccgtggcagatttccgcacgcaaccagcgcgccagctaccactacacgccctattcgccgtggatcgacctgcgcgcgacctttgccagcaacaagacccggctgttctatccgcccgtggaggattccagctacatcggtcgccgcacccacagcagcctgagcagctggaccctcgacaacaccagccgcttcgatatcggcgcgctgcaggcccgctggaacaccggcatcaagcaccagtcggatatccatgtggccgacacccccaccctgcgcggcgccaacccgcagggccgcagccagctggacagcgtgttcagcacgctggaactgcagtacgacgtctacgcgctgaccgcaggcctgcgccaggaccgcttcggcatccgtggccacatcccggtgtgctcggatgtccccggccagtgcgcggagatcaatggcggcggcatcgacgtgcgccgcacccagcacgcgctcagccccagcctggcggattcatggcaggccaccgactggctgcaactgttcgctgaagtctcgcgcacctcgcggccgccacgcgtccaggagatgttcttcgagaagatcccactggaaggcatcagcgatgccgatggcgtcggcgccaacccattcctgcgccgcgagcgctcgcgcaacctgcagttcggcgccaacctcagcaccgactcgctgctggtcgacggtgacctggcccagctgcgggtcacccgcttcgacaaccgcatccgcgactacatcaagccgcaatacctgctgatcgtgcatccaccggaagtggagccagtcgtggtaccgatcgacagcgatccgcagctcactgcctggaccgacgcactggacgtggacgacttcagcaccaccacgcgctggatgaaccacccgggcgtggtgcgcatgcgcggtatcgagctggaagcgcactacgccagcgcgcactaccacgcgacgctgagctggacccgctcgcacaccagcgcgcccgccatcgaattcgtcaacctggaagacatcaccgccctgcccgaccgctactggacgctggacgtgggcggccgctggtggcagcagcgcgtgcaggccggactgcgtgccgagtactccgggcccaccgaggaaggctacgacttcttccagacccgcaagaccggtggcaccggtgtactcctcgacttctacgccagcttcaagccccagcccaacaccaccctgtggctgaacatcgaaaacctgcagaacaaagcctatgacaacaatgcctcgatcgacagcatcttcagcccgatcctggaccgcggcaacggccgtggccgcaccgtctcgatgggcgtcaatgtggcgttctag

SEQ ID NO: 500821 - DNA, 801 bp, Stenotrophomonas maltophilia
atgtggcgttctagccgtcgctggctgccgctctgcctgcttgcgctggccgcaatggtcagcgcgcagccgatgcccggcacggtgatcgacctggccagtggccagcccctggacgaagccgcattcgtgaagcgcgcagcgaatgccccgcgagtgctgctgggcgaacgccacgatctggccggtgaccacaccgcccagcgctggctgctgcacgcgctgcagcagcagcgtccacaaggcgcgctggtactggagatgattgccagcgaacgccagccgcgcctgcagcgggtgcagcgctggctggccaacggcaaccatgccgacggtgcgcgcctgcaggagctgctgggctgggatacacgctggccgtgggtggcctatggcgggctggtacaggacgccaccgctaccggcattcccctgctcggcggcaacctggcgcgtgccgaggtcaatgcgttgctcgcttccgacaggtcggtacggttcccgatgcccaccgcacggcaccgcctgtcggccgtggtgctggcccagcatgcggacgcagcaccgatgctggaagggatgctggccgtgcaacaggcccgcgacacgcgcatggcacaggtaatgaccgaggcaccggcacccacgctgctgttggccggtcgctggcatgtactgcgcggtaccggcgtgccgggctacctgccagcggacacaccggcgctggtgatcgcactggcctcgcccggtgaatccgtcgaggcggccgacgccgacctgctatgggtgctggacgatgagtga

SEQ ID NO: 500822 - DNA, 2289 bp, Stenotrophomonas maltophilia
gtgtacttcaagtccctggactacccggtcattgtcatcgacaacgactacgagtcgccgcgcatcggcggcatcctgatccgcgccctggtggaagagctgcgcagcaacgaccagcgggtgctgtgcgggctcaacctggatgatgcgcgcgccggcgcccgtacctacgtggcggcctcggcggtgctgatctcgatcgatggcagcgaagaggtggatggcgagttccagcgcctcaccgccttcctgcgcgagcagagtgcgcgccgcgccaacctgccggtgttcctgtacggcgagcgccgcaccatcgaaaaggtgccgagcaagctgctcaagtacatccacggcttcatcttcctgtttgaagacaccaagagcttcatctcgcggcaggtgatgcgcgcggccgaagactacatgaagaatctcttgccgccgttcttcaaggcgctgatccatcatgcggcagagtcgaactactcctggcatacgccgggccatgcaggcggcgtggcattcaccaagtcgccggtcggccgtgcgttccaccagttctacggtgagaacaccctgcgcagcgatctgtcgatctcggtgccggaactgggctcactgctggatcacaccggcccgatcaaggatgccgaggaggaggcggcgcgcaacttcggtgccgaccataccttcttcgtcaccaacggcacctccaccgccaacaagatcgtctggcatggcacggtggcccgcggcgacgtggtgttcgtcgaccgcaactgccacaagtcgctgctgcacgcgctgatcatgaccggcgcggtgccggtgtacttcaccccaagccgcaacgcacacggcatcatcggcccgatcagcctggatcagttcacgccggagtcgctgcagcagcgcatcgccgccaacccgctggccagccaggcctacaaggccggttccaagccgcgcattgcggtggtcaccaactcgacctacgacggcctgtgctacaacgccgagaagatcgccgacgaaatcggcagcgcggtcgacttcctgcacttcgacgaagcctggtacgcctacgccgcgttccatccgttctatgagaaccactacggcatggccaagggcaagccgcgcgagcaggatgcgatcatcttcaccacgcattccacccacaagctgctggccgcgttctcgcaggcgtcgatgatccacgtacgcaactcggcgcagcgcgacctggatgccgagcgcttcaacgagtcgttcatgatgcacacctcgaccagcccgcattatggggtgatcgcggcctgtgacgtggcctcgaagatgatggagggcgaggccggccgttcgctggtgcaggaaatgcatgacgaggcgatcgccttccgccgcgcgatgctgcacgtgcgtgacgacctcgggcgcgacgactggtggttcagtgtgtggcagccgaccaaggtcgagcgcagcctggacaagggcgatacgccggcgccgctggtggccaagcgcgaggagtggtacctgcagccggacgcgcactggcacggcttcgagaatctggtcgatgactacgtgctgatcgacccgatcaaagtgaccctgctgaccccgggcctggcgatggacggcagcatgggcacgctgggcattccggcggcggtgctgagcaagttcctgtggggccgcggcatcactgtggagaagaccaacctgtattcggtactgttcctgttctcgatgggcattaccaagggcaagtggagcacgctggtcaccgagctgatggccttcaaggagctgtacgactgcaacgcgccgctgagccaggcattgccgacgctggcggcggactatccgattgcctacgccggctggggactgcgtgacctgtgcgatgcattgcacgcgttcaaccaggaattcgaggtcgccaaggtgatgcgcgagatgtacgtggatctgccgacgccggtgatgaccccggccgatgcctacaaccacctggtgaagggcgagatcgagcgggtcgacatcgagcagctcagtggtcgcgtcgcggcgaccatgctggtgccgtatccgccgggcattccgaccatcatgccgggcgagcgattcggcgacagcgacgaaccgatcatccagtctctgcgtattgcccgtgaacagaatgcgcgcttcccgggcttcgagtcggatgtgcacgggctcatcatcgagcacgatggcgatgcgacctcgtacaaggtggaggtgctgaaggcctga

SEQ ID NO: 500823 - DNA, 303 bp, Stenotrophomonas maltophilia
atgaatgcctggaacccggttgcggtacgcatgttcatcccggcgctggtcggctggtgcctggcgctggccacctgcctgcgcgccgaacagctgcgcggcgacccgcacgcgcaggcgttgttgcccgtgctgcagcaaggcgcggtcgcgctgctggtcctgagcctcgcctgcacggttgcggcctgcgtgttgctgtggcggcatggccgcggcgacggcgggcgtctcgcttccggcactacacccgtgccgcgtccatcagcaggacccggcacggtgcgcgctggaacgcgttga

SEQ ID NO: 500824 - DNA, 813 bp, Stenotrophomonas maltophilia
atgcaggaacaacgctcgctcgctacgcgcatgagcctggcctgggagatggccaagcgggacgtgttcgcccgctacaaggggtcggtgatcggccttgcctggtcattcttctacccggttctcatgctgggcgtgtataccttcgtgttcggcgtcatcttccgctcacgctggaccgttgcagggcagggtacgggagagcagccgctgacttcggagtttgcactgatcctgttctccggtctggtggtattcggctttttctctgaatgcctgaacaaagcacctggattggttactgccaatgcccagttcgtgaaaaaggtggtcttcccattggaaatgctgccgatatccactgcattgtcggcgttgttccacatgctggttagtcttgtcgtgctgctgatcgcgatgctcctgctgaaggggagcgtgcctgttactgcggtggctttcccggtcgtcgtgctaccgctgctgttcgccaccttggggtgtacgtggctcttttcggccttgggggtctacctgcgtgatcttggtcaggtcatgcccctggtaacaacgatgttgttgttcctttctccggtgttctacccgattacggctgtacccgcctccttccgtcgtgttgttgaaatgaacccgatcaccggagtgatggacggtgtgcgcgatacgttgatcttcggcaactggcctgagccgaaactgctgatgtggcagttcgtcgtcggcctgttgatcatgctggcggggctgttggtgttccagtacgtgaggaaaggattcgccgatgtcatctga

SEQ ID NO: 500825 - DNA, 1338 bp, Stenotrophomonas maltophilia
atgtcatctgattccctcatcgaagtccgcggcctgggcaagcgctatgacatgtttgccaagcccgttgaccgactggtgcagctgatgaccgagccgctgcgccgtggactcggaatgtctcctgtccagcacagcaaggaagtgtgggcgcttcgcaatgtcaccttcgacgtaccccgtggcgaggcgttgggggtaatggggcgcaacggctccggcaagagcaccatgctgcagatgttgtgcggcacgattacccccaccgagggagaggtccaggtgcggggccgcattgccgcactccttgagctcggggcgggtttcaaccccgaattcacagggcgtgaaaacgtcttcctcaacgggcgcctgctgggcctggacagcgctacgatcgaggcacgtttcgacgatatctgcgcatttgcagacatcggcgcctacatcgatgagcccaccaagacctactccagcggaatgttcgtcaggcttgcctttgccgtagcgacatcggtggatgcggacatcctcgtggtcgatgaagcgttggctgtgggcgatgcgagattccaggcgcgttgcatgaaacgcattcgtgccattcaagatgaaggggcatcggttctctttgtgagtcacgatgtcgcagcagtgcgaacgctgtgccagcgggcattgtggttggagcgcggtgcgatgaaggagctggggccggtgctgcaggtcagttcccgctatatggagtccatattcgcagacgatccagatgcgctccatccctccggcggagttggtgagccttcttccgaggatgagattgaagtaccggctgtggagacgcccgttgtcgaggtggccacccgggaaaagcccctcgctcattgggggcagcaggtgggccttatccgggaggtcaggatcggcagcatggaaggcactgactgtgagcttctcgaatggggacagacctgccggatcggcattcgcctgacactcccgctggactattcacccgataccttccgtgttgcgttttcaatcaaggatcttcgcggccacgacatcgtcgtgtccagtaccgcagacaccggcagccccgccccgaccgcatggtccgcaggcgcggaagttgagatcgagttcgtattcgagaatggcctcgtcgaagggaagtatttcctggtggcggcagccgagaggcgtattggccctgtcgtggagtactacgagtacatcgagggtgttcgctacttctccgtaatgagttccatccgacactttggcatctatcagccaaagatcgaacatctgttcaaggagctgtcccgtgtctga

SEQ ID NO: 500826 - DNA, 3474 bp, Stenotrophomonas maltophilia
gtgtctgatgcaatcgtcaattccaagggctactggaacgaacgtttcggtgacgactgggaaagtctcggtggtcgtgaacagtcacgcttctttggtgctcttgcattgcagatgctgccgtcctggctggtatcagccagctcccgtggccagttgacctggtgtgactgggggtgcgcactgggagatggaacacaggagctcgcacagggtattgcgggcgctcatttcactggcgttgatttctccaaagttgcaatcgccgatgcccagcagcgattccccggggtgaccttcctgagcgaggattggctgggggctgatcagagggaggctgcgcagaggttcgatgtcctgttcagttccaacacgctggagcacttccatgaaccctggaaagtgctggggacgatcgctccgcgggccagccattgcatcgcactgatgctgccctaccgggagcgccaccggatcgaagagcaccatgcatccttcatgcccggcaacattccgcagcaggttgacgggaaagtgctggtgcacgccagcgtgcgcgatacgcgcaatgacaatccgtgcttctggccaggggagcaggtattgctggtctgggctgaccctgcatggctgcgcgcccagggattgaacctgctggatctccagattggaaccgagcctcccagcccattgcagccacagcttgctgcggccctggaactcgcgctgcagctgaatgaagggttgggaacattgcgcagccatgttcccgcacagcctcagcaggttgcaatgctggaccaactacgtgcggacctggatcgttgggcattggtgcgcggtgctaccgcggcggcgactggtccggcctggagccaggatcaggttgcgcgcgatctgcgcgacgccgcggttctggagcaggccctgcaggcgcttcagccattgctggtcggaagcacattgctggatcgcctgcaggatgcgcttggtgatctgaacaccgctcgtgacgcgcttcagcagcagctggatcacagtacccagttgctggcggaagaacgtcgcgaactggacggcaagttggaccagcggcgggaaatgctgatcagcgccgaagccatgctgcgccaggcggccgagtcacgcgcgcaggctgatcacagcctggggacgacgctgcgactcggcgaggaaatcgtgagtctgttgggcccctcggtgggggccacgctcgacgctgttgccgggaaggtggaggggcagtctgttgaaatccagttgcagcgtctgcgattgcgcctgctggccatggatcaggagttgaacgaggtgtacaagagcaggtcgtggcggatcacccgtccgatccgcgtgatccggcggttgctgtccaacccgatgcaggaactgcgcaatctggggaagcacgccccgcgcaaggttcagtcggcagctcgattcggcatccgaacgctcagaaatgggcggttggatccttcggacaaggcgcgcctggcggaaatgctgtcgccctcgcccaatgttctggtggctgatccgcttgcaaatgttgactattcgcatctgccgcggttggcgcagttcgatgctgcatcgaccgatgtcttcatctgggcggtaatcgattggaacttccgcgtgcagcggccacagcatctggcgatggccttggccgccaaaggacatcgggtcttctacatctccaacaattttgtcgatgccgccggtcctggattcaaggtcgatgcgcttgatgacagtggccggttgttccaggtgaacctgaatctggctggggcaccgcagatctaccacgcaatgcccgatgcagcccaggttgaatcgataacgtccagtctgtcggcactgcttggctggacccggtcgacgcgctgcatgtcgttcgtgcagcatccctactggttgacgccggcccagggcctgcccaatgccaagctggtctatgactgcatggaccaccatggcggcttcgaagacaacgccgccggcatcctggagggcgagcgtgagcttatcgaacgcgccgacctgctggtggtcacgtcgcagtggttgcatgacgagttgagtccgcgcgcgcggaacatcgccatggtccgcaacgcgacggagtacgatcacttctgcacgcctcccgccaaggtcttcatcgatgcgaaggggaggaagatcatcggttactacggcgccatcgcggagtggttcgatgtcgaactgctgcgccgcgtggccttggataatccggacgcgctgattctcatgatcgggcgcgatacggccaacgtcgctgcacagctgcagggcatcgacaacgtgcggttcgtgggcgaagtgccatacgccgaactgccctactggctgcatgcgttcgatgtctgtctgcttcccttcaaggtcatcccactgactctggcgaccaatccggtcaaggtctacgagtacctcagcgcaggcaaggctgtggtctcggtgaacctgccggaattgtcccagttcgagggattggtgcggctggcagagaaccatgacgagtacttggctcaggttcgtcttgctctggccgagaccgttgaacaaagcgagctgggcgcccgccaggcgttcgcatcgaggcagacctggctgcaccgcgcagccaccctcgattccgcactggcctcgatcgacgaaccgttgatcagtatcgttgtcctgacctacaacaaccttgactacaccaagcaatgcctgcatagcctggaggtccatacggactacgagaacgtcgagatcattgttgtggacaatgcgtccactgatgacagtccggggtacctggccgagtgggccaagggggcttccaatcgccgcttcatcgccaacgatagcaatctcggtttctcggcgggcaataatgtgggcctggaaatcgccaagggcgagtatctcgtagtactcaacaacgacacctacgtgacgccgggttggttgcgcaccctgcgcaatcagcttcgccggcagccacgcgcgggtctggtcggcccggtcaccaacaatattggcaacgaggccaagatccagatcaactatgactcgatggagcagatggttgagttggccgggcgctacacgcgtgctcatgctgggcgaagcttcgagatcgcaaccagcgccttcttctgcgtgatgatctcgcgggaggcctacgtcaaggtcggcgggttggacgagcagttcggcgttggattcttcgaggacgacgattactgccgcaggctggagcaggaagggttggttcgattgtgtgcagaggacgtattcgtccaccatcacctttctgccagtttcaacaagctcaaggccgaggcaaagcaggctttgtttgagaagaacaaggcgctgtacgaggcaaaatggggcgcatgggtaccccatggatatcgtcagtag

SEQ ID NO: 500827 - DNA, 1131 bp, Stenotrophomonas maltophilia
atgagtcaagcgcccaagaaggtgctgatcgtgtttggcacccgccccgaagccatcaagatggctcctgtcgtcgcagccctgcgacagaccgcaggcatcgagcccatcgttgctgtaaccgcccagcaccggcagatgctggaccaggtgctcgacctgtttgcgattactcctgacgaggatctcgatgtcatggaacccggccaaaccttgcaggggctgttcagcaagattctgctgggcatgtgtgaagtgatcgggcgacacaagccggatctggtcctggtacatggcgataccagcacgacgctggcatcagcgctagccgccttctataaccgtgtgcccgttggccatgttgaagctggattgcgcacgggtgatatctatgcaccctggcccgaagaagccaatcgctgtctgaccgccccgctgaccacgatgcactttgcccccacccagcgcgcccgtgacaatctgcgccgcgaaaacatcgatgacggacgaatcttcgtcactggcaacactgtcatcgatgcattgctgcaggtaacgaaccggatcgagcacgacgcgccgttgcgtgatagcctcgctgcgcgcttccccttcttagacacctccaagaagctcgtcctggtcaccggtcatcgccgtgagaacttcggaggcggcttcgagcagatttgccaggcacttcgcacattggccgaccgaggcgacacacaggtcgtctacccggtccatctgaatccgaacgtacaggaaccggtcaaccggctgctgggcaatcatcctgctatcacgttgataccgccacaggactacctgccgttcgtgtatctcatgtcccgcgcctacctgctgataacagactcgggcggcgtccaggaagaggcgccgtcgctcggcaagccggtcctcgtcatgcgcgacgtgactgaacgtccggaggccgtggaagccggaaccgttgtgctggtcggcaccgataccgggcgtatcgtgaaagaggcgagccgccttctcgatgacccggtcgcctacgagaagttctcgcggagccacaatccctacggtgacggcaccgccgcaatgcgcatcgcccacgccatcgtcgaccattga

SEQ ID NO: 500828 - DNA, 408 bp, Stenotrophomonas maltophilia
gtgggcagaatcatcatgatcacaatgatcgggctcttgagcctgagcgcttgtaagcgcgcgccggccgatgtctcagggattgcctatcaagtcttggaagagcatacggatggggcgtgcatcgtatgcgtggagccctctgaccgcgcttgttccggcgcgggccgcgcaggggaggttcgctgggatctgccagccgcaatggagactgagcgcgtgaagatccgtttgatgcgatccgatggaactgactccgagctggcggagggctcctccaaagggaaggtgctgctaggcgagtccctgcggactggagatcgcatcggagtattcgaggcgagcaacaatcgcgagctggcgttcatccggcccgcaactgaattgggatgtgacttggcgccctag

SEQ ID NO: 500829 - DNA, 1515 bp, Stenotrophomonas maltophilia
atgcaaactcgcatttacccgctgtacgcatgggccaactggcgtacggccttggtattgctgttggcagtcgccgcgttcaccaatgccgctgcttacatttcctacgcaggcataccattcgtcacgtctgacggctggtatttcgtcgacgcgttcctgcagaaacacttccactcgggacttacactccaggatttctatgtaaagcgtggccccgatgatcatgctcaaccgctccagaagctgttgctgctatggaacgcggaatcgtttgacctggatttcgtaatcgaatcgtacatgggcctcgccattgccgcgcttgcatggctgctcatgttgcacgtcatggcgatggacaattacaggcgtggaacatcttcctggtggatgttgcctgctgcaaccagcgctgcgtgtttcgtgtcccttagtggcggcatggtgttcaactggtcgcttgtcacattgggatatctcgggccgctcgcagcagtggttctggcaatcaccgcgtggaatgccgtagttgaaaagcaatggtggccactggtcctgacggccttggttgtccaattcaccctcgacggaacggcgctgatctgcgcccttagcttgatctgcgcacttgcgttgcgtgaattccgcagccgttgtcaaagtctccgttcaacgctcgccgcaagtgcaatcgttgccggcgccctcagtgcctacaaactggtcagccatctatatctgcatgctgcattgtccagcgctcctgccgaggaagcaggaatagcatcggtactgcacctgggcgtggccagcctcgggaaaatgctgttgacaatggctgcactctcggtcgccgacttggcacctctgcagtcttacttccctgcgcgaggtcagcttctgcatcacttgctcggcggccttgtgattgccgcccatggctggttctggtggcgggcactacatgacaagtggaaccgcacccagttcacctccatcgtgctgatgctcttctgctacggtgcgggcgccggcatcgtgatcagccgcgtatcagtgttcggacccgaatatgtgtcccagcagcgctatctcatgttgtaccaactcggtacggtggcaattgctctgatggcatccggctctgactggcgtatctggcgtccactgcaacgagttgcggttctggctgggcttctcatgttgatcctggtacaggtcccactcagcagagccacctggcgcgaagcgccctacgttcaggcgtacggaaacaacctcgggcgacagatgattctgctgggcgctgatccaggcgcgaagctggcatcgtgcgcaccgactctcgttgtgtgcgcagcggacagcgacgaaaggcgtcgctcgatcacgcttctgcgcgaccaccaccttaatgcgtactcacccaggatgctggggcgatactcgatgcagacaattggagcccccgtcggagcaatggagattgttccagcggcaccagccaaataa

SEQ ID NO: 500830 - DNA, 1128 bp, Stenotrophomonas maltophilia
gtgattccgttcaacaagccgttcatgactggccaggaactggtcaacatcacccacgcgcatgccaatgggcatctcagcggtgatggtcccttcaccaagaagtgccacgcctggctgaatgcgcgtaccggtgccagtgcctcattgctgacccactcgtgtacggccgcattggaaatggcagccctgttgctggatctggaagacggcgacgaagtgatcatgccgtcctacacgtttgtctcgacctccaatgccttcgtgcttcgtggtgcggtgccggtgttcgtggatatccgcgccgacacgctgaacatcgacgagacgctgatcgaagcggcaatcacgcctcgcaccaaggccatctgcgtagttcactacgcaggagtggcctgcgaaatggacgagattctcgccattgcctcccggcacggcctggccgtagtcgaggatgccgcacagggcatcatgtccacgtacaagggacggccgctgggcaccatcggcgacctcggcgcactgagcttccacgaaaccaagaacatcatttccggcgaaggtggcgcgctgctgtgccgcgaccacacccacgccgaacgtgcggagatcatccgcgagaagggcaccaaccgcagccggttcttccgtgggcaggtcgacaagtacacctgggtggacgtgggttcctctttcctgcccggcgagatcaccgcggcgttcctcgctgcccagatggacgctgccgaggacatcaccgcgcgtcgcctggccatctgggaccgctaccacgcctgggcagcaccgcacgaggctgcaggtcgcctggtacggccgaccattccggcacacacgacccacaacgcgcatatgtattacatgctgctgccatcgctggaggcacgcaccgcattcatccagtccctgcgcacgcagggcgtgcaggccgtcttccactacatcccgctgcactcgtcgcccgcaggcgtcagcaatggccgcgtcggttcaacgatgcaggtcactgacaatctcagcgagcgcctggtgcgcatgccgttgtgggttggtgcggagcaggacctgcctgacatcatggtcgcagctgatcgtgcactgacctcctga

SEQ ID NO: 500831 - DNA, 627 bp, Stenotrophomonas maltophilia
atgtcgcagaagaccgatgggttgcacgcagtgctatcacacccagcggtctatgacctgctgcagaacctgttgggggcccgccggtcccgtgcacgcctgatccaggaccatattcgcccccgccagggcgatcatgtcctcgacatcggctgcggtaccggcgagctcttcagccagttgccagcaggactgcgctacatcgggttcgatctgtcccaggcatatatcgaagctgcacggaagcggttcggcgaccgggcccgtttcgaatgcatggacgtggccgattatgaagtaggccaggagctgcagcagaaggccgacctggtactggccatcggcatcctccaccaccttgacgacgcgcgtgcgaggtcactgatgcgcaccgcacatgccgccctcaagccgggcggtcgtttcatctcgctcgacggcgcttacgtcgatggccagtcggccatcgcgcatggcctgatctcacgcgatcgtggccagagcatccgcactccatccgcctaccaagcactggctgaggcggagttcggcatggtcaagggccaggtcagaagcgatatgcttttcgtaccctatacacactacatcatggaatgcgtgcgctag

SEQ ID NO: 500832 - DNA, 366 bp, Stenotrophomonas maltophilia
atgagctacgttttcattgccctgaccatcctgctgaccgtctacggccagctcacgctgaagtggcaggtcagcctcaatcccggggcgaccatcgacggcctgaatccgcgcgcggtcatcaccctgctgctcaatccctgggtgatcagcgccttcgcggcggctttcggcgcctcgctgtgctggatggcggccatcggccggatgccgctgagcaaagcctatccctttaccgcgttgagtttcccgcttgtggcaaccctggcggtatggctcttccgcgagtccttcgactcgcataagatcgccggcaccgccttgatcatcctgggcgtcatcgtcctgtctcgttccggagcctga

SEQ ID NO: 500833 - DNA, 1224 bp, Stenotrophomonas maltophilia
atgaccagactgctcttctcgatccacccggacgccacgctggatgccgaactggcgcgcctgtctaccctgccaccgctgctgccgttcagcacgccactgcgcgaattcgttgcggatttctcccgccgcgtcttcacgctgccgcagctacgccagcatcccgagctggccacccttggccactggttccgcggcgccgcggtcaaccagctttcgcagcgcctcggaacacgcccgaccgagctggatctggcccgcggcctggtctttcatctggctcctgccaacgtggacgtcctgttcgcgtacgcctggctgatgtcggtgctctcaggcaacaccaatgtagcccgcctgtcgcagaagcagagcacccagcgtgatgcgctggtctcgatcctgcacgacatgcagtgtgaaggcctacacccgcaggtactggaacgtacggtgctgctgacgtatccgcatgacgatgcgatcaccactgcaatctcccgtcactgccatgcgcgcatcatctggggcggtgatgccacggtcaccaagatccgttcattgccgatcgccccactggctctcgagctggccttcccggaccggttcggcgtggcggccatgcgcgcagccacgctggccgaagccagcgatgccgatctgcaggaactggcccgccgcttctgcaacgacgttctatggttcggacagcaggcctgctcttcgccgcgtaccctgtactgggtcggtgatgaggcggagattgcaacggccaaggcgcgtttctggccagcggtgcgcacccaggccgccagcctggacgacgagcccgcagcgctgatggcccgggtgacagatgccaacctgctggcggcaaccggacacggcgtgcattcggccgatgccatcggactgtacccgctgcggctggaggccgcgcgagccgatggcgggatccgcgaaattcagtccgggcacggcctggtggtggaggtcgacctgcccgcgctggatgcactgacgcctcagctcgacgaccgcgaccagacgcttgtccagcatggtttcgcagcttccgacctgcgtggcttcctgtgcggtctcggcaaccgtgccatcgaccgcgtcgtgccttttggtcgcgccctggacttccatccggtctgggatgggaacgacctgctcgatgtcctcacccgcaagatcaccctgccagcgacctga

SEQ ID NO: 500834 - DNA, 1107 bp, Stenotrophomonas maltophilia
gtgactgtgcctgccacgccggctgccaacgcggccgctgccctggaagtcgaagtcttcggcctggaccgcatccagaagcgtgcctggctgctggaagggctcaatcgcctgaccggccaccatcaagcgcagtgcgcgccgtatgctcgcatcctcgcgggcctttggccggccggcgacgcggccagcctggaacagataccgtggctgccggtccgcatgttcaagctgctggacctcaagagcatcgaggatgacaaggtatcgcgcacgctggtctccagtggcaccacgggcgcagccgtctctcggatcttcctggatgccgacaccgcgcgcgcgcaggcccgtgcactgacccgcatcttctcccacttcgccggcgccaagcgcctacgcatgctggtggtcgacgattccagcttcctgcgcgatcgcagccgcttcaacgcacgtgccgcaggcatcctcggattctccaatttcggtcgcgaccatctgtacctgctggacgaagacctgcaaccggactggaccgcgcttgaacaatggctgcaggcccagccggatgagccggtgctgctgttcggctttacattcatcgtctggcagtcattcgtgcaggccgcacgccgtgacggcaggcaaatccgctttccagccggcagcatgctggtgcacggcggcggctggaagaaaatggacgagcagaaggtcgacaatgctgcctacaaagccgcgctatcgcagaccttcggcatcgagcgcgtgcacaactactacggcatggtcgaacaggtcggctcgatcttcttcgaatgcgagcatggccacctgcatgcgccggcctacgccgacgtgatcgttcgcgacctgcaggacctgcacccggtgccgcacggcaccaccggtgcgatacaggtactgagcctgctgcccgaaagctatccaggccacagcctgctgaccgaagatctcggcgtgattcatggcgaggacgactgcgcctgcggccgccccggcaagcacttcgccgtgctcggccgtatcaagaacgtagaaatccgcggttgcagcgatacccgcacggtacccagcgcatga

SEQ ID NO: 500835 - DNA, 1401 bp, Stenotrophomonas maltophilia
atgccgttctggaacctggaacaacatggcgcgcgcatcgcgctgatcgatggcgagcaatcgctggacttcaccgcactggcacgcctggccgatgcgcacgcggcgcgattaccagacgggcgcggcatgggattgttgtgcatgcccagtcatgtcgatgctgtcgcgctttacctcggcgctttgcgctgcggccgccaggttccattgctgttgcagccggacaccgacccgcagctgctgggctccctggtggagcactaccagcctgactgggtcgccagcccgggccaggccgccaaaggctaccggactgtgtacagcggccaggtcttgtccttgcacgtgcgcgacgcggcaccggcaccggacgcaccgcacccggacctggcgttgctgctcagcacatccggcagtacgggttcgtcaaagctggtgcggctgtcatccaccggcctggatgccaatgccagcgctatcgtcgactacctgggcctgcgcgccgatgatcgtgcgatcaccacgctgccactggcctattcgttcggcatgtccatcctcaacagccacctggctgtgggtggatcggtagtcctgagcgaggacagcctgatgacccgcgaattctgggacagcgcgcgccgccaccacatcacctcgttgtccggggttccggccaccttcgagatcctgcggcgcatgggccttgcccgcctgcagctgcccagcctgcgcatgctgacccaggccggtggtcgccttcgcgatgagctggtcgcccatttcgccgagtccagccaggcccatgggctggagttcttcgtgatgtacggccagacagaggcctctccgcggatcagttatgttccggctgcacgcatcatcgacaaggttggcagcatcggggtgcctgttcctggcggccggatgcaggtcgacgcaacgaccggcgaactgatctattcgggcccgaacgtcatgatgggctacgccgccacacgtgccgatctggccaagggcgacgagctgcagggtgtactgcgcaccggcgatctggcccgcgtcgacgaagatggcttccactacattaccgggcgcgccaagcgcttcctgaagatctccggcaaccgggtcaacctcgatgaagtcgaggccatgctgtcggcggcgctgagccagcagatcgtctgctcgggcagcgatgacgatctggtggccttcagtcacggcgcccatatcgctgaacaggcgcaggtacgccagttggtacaggagcgctacaagctgttcggtggccacatccgtaccctccacctggatgcgctgcctctgatggccagcggcaaggtggattaccagagtctccggcagatggccggacaaggagctgcaaggtga

SEQ ID NO: 500836 - DNA, 744 bp, Stenotrophomonas maltophilia
atggccgacgccgcgcccgtaatcttggtcaccggcgcatcgcgcggcatcggccgggcaatcgccctgcagcaggccgcacgacacgcacagctggtgctggtggcccgcaacgaagacgccttgagccagctggacgcagaggtccaggcgctcggcgcaccgccgacattgtacgcggcgctggacctgaccgatgctgatgccatcgccggtttgttcaagcaggtcttcgcccgcttcggccggctggacggcttggtcaacaatgccggcgtgctgcacgaaggcctgctgggcatgatccgcagtgaagacatcgaccaggtgctggccgtcaacgtcaaggcgccgttgatggcgatgcagtacgcttcgcggctgatggcacgcagcggcgcaggcagcatcgtcaacttggtgtcgatcatgggtatgaacggtgccgccgggctcagcctttacgcggcgagcaaggctgcgcttgtcggcgccacgcgctcggcctccaaggagctggccccgcgcggtatccgcgtcaatgcggtctcaccaggtttcatcgacaccgacatgacccgtgacatgcctgaggccgcgcatgccaagcgtgttgcatcgattgcaatgggccgtgccggtacgccagaggaagttgccgcactggtggccttcctgctcagtgatgcctcctcctatgtcaccggacaggtgattggcatcgacggacagatggtggtctga

SEQ ID NO: 500837 - DNA, 249 bp, Stenotrophomonas maltophilia
atgaatgacatcgttaccgaagaccaggtcgttgccgtgttcgcccgcgtgctgggcatcccggccgacagcgtgaatgatgaactgcgttacgccaccatcccgcagtgggattcaatcgcccacatgtcggtagtggcggctctggaagaggcgttcggcgtgatgatcgacatggacgaagtgatcgacatgagctcggtcggcaaggcccgcgaaatcctgcgcaagcacggcgcggctgtttga

SEQ ID NO: 500838 - DNA, 759 bp, Stenotrophomonas maltophilia
atgaacgtggtcatcgacaacggccagggtcggattgcggcacgccttacgccgtgggatgagcgcgcgctgggcttcgccaccgccgaggtgacagccttggagatcacccgcgtggagcaggcggttccgctgctgtccgagctggagcaatggtgcgccacgcatgccgtgcactatctgttcgggcgtatcgacgcgacccacatggtggccaagtctgccctgctgcagcaggggtacgccttcgtggaaacatcgctgaccgtctcgcgcagcgggtttgccaacctgccaccggtaccgcgcgggatgctgccaacattgcggcctgcaaccaccaccgatgtggccgaactgcgccgcatcgccgcgactgatttcgcccacggccgcttcctggaagacccggccatcgacccacagcgcgccgcactgcgcacggccaactggatcgaagacctggtcagcggtggcttggcctatgtcgctgagtcgcgagggcgcaccatcggtttccatgccgagcgcgtgtccgccgacaagagcaactgcgagctgctgctgaccggcgccaccgggccctatgcgatgctggccctgccgctgtggatcactgcattggagtcactcgccgcgcgcggggttccacactgcacgaccctcgtttccgctgccaatacgggcatcctcaatctctatgcccgtctcggcttccatttcaacagcaccctctttggattcaggaaatttctatga

SEQ ID NO: 500839 - DNA, 984 bp, Stenotrophomonas maltophilia
atgacagacgcgatgtcctcctccccgttcagcggggaaccctgcccggaaatttcagtggtagcgccggtttatggctgccaagggtgtctggaagacttggttgaccaggtagcggccgcgatcgcgacgatggacgtgaacttcgagatgattctggtggatgacgccagcccggacggagcctgggcccggatcgcggaactggccagcactcgcccatggttgcgcggactgagattgtcgcgcaacttcgggcaacattcagccatctccgcgggcatcgagcacgcgcgcggccactggacggttgtgatggactgcgacctgcaggacgcaccgggcgaaatcccggccctgtaccgcaaggccaaccaggaacagctggacgtggtgttcgcccagcgcctggagcgccaggacaaggcgctgaagcggctttcgtcgtggaccttcttcagcgtactcggctggctcaccggcgtcccccaggatcccagcacggccaacttcggcatctaccaccgcaaggtcatccaggcggtatgtcagatgcccgaacgtgaccgctcattcccgttgatggtcaagtgggccggcttccgtacaggcaagctgccggttcagcaccaggcgcgcgccatgggcgaaacctcctacaccctgcgcaagctgctggccctgtccaccaacatcgcgttgggatactcggagaagccgttgcggatggtcgccggtaccggcatcgcctgctcgctggtcgccttcgtgctggtcgcgctgagcctgctgcgctggtgggacggtgacatcgaggttgccggctatacctccatcatcggatcggtgtggctgatcggcgggctggtgatgttctgcctcggggtggtcgggctgtacgtcggtcaggtgttccgcaacgtgcagaagcgcccgtactacatcgtggccgacgcggtgaacgacgcacgggaagcccgatga

SEQ ID NO: 500840 - DNA, 2517 bp, Stenotrophomonas maltophilia
atgatgaagcatggaatcggggccgccgcccgatcattcgccagggacctggcgctcgcatggatctatcttccgatcagcctgttggcctgtaccatcatggctcttctggcccggtcactgttcggcctgcagtacagcaccggtgcagtggtggccaccgccctgctgctgggaactggaataggactactgggcccggcactacgtaatcgctggtgcgggggcgccttgatcaccggcctggccagtctgctgctggtcggcaacgcagtgaaagtcgggatgctgcatgccccactttccgtagcggatctgcaggcactaccgattctcctatcaacactatcgggaggtccactcctgttggcgggcgttctgatcgcgatcgccgtactgcttccgctcgccagtattcgctttcgttggcgaagtcttcccgcgctggcactcctgatcggcatgatcgccgtcattccggcactgtccaatccctcacaccccttttacggtttcctgctgccactggaaggaagtggacaggaagtggacagcaaagacaccatgctcgtgtcacgccgtaacgatcagatgagcctgctcaaggcacgcggcccgcttctctatctttcagaagactggcgagtgcagcgcgaggacacccgtgagattcccagtgcagccgaaatccacgctctacctctgaagaaatggcatccaggcaacatcgcgaaaaagcgcaacgtccacctggtcctacttgaaagcgtttgggatctttcattgctcgaccactaccacagcaatcgcagcgcgctggacccgcgcttcctcgcgctttggaaaagtgcgggacaaccgtatctgctctcccctgaaatggggggagttaccgccaatgccgagttcgaggtcctgtgcggtttccccgcgccgaggaactccgtggcattcatgaatctgctgcgcaggccatcaccctgcctgcctgcggcgctcgcacgtgcgggctatcacaccatggccagccatgcccacaacgctgacaactggaatcgaatcactgcatacgagaacgccggattcgagcactactatcctgattctgccttcgagctggatgaccttgaaggcggcatgctcgctgacggctcgttcttccgccagaacatccagttcctcgatgaggtcgggacggatgtccccgtcttcaactacttggtatccctgtcctcgcactggggatacctacgcaatcaggaacgacgcccggacttgatcagaattgagcctggcaatgcgccggtcctggaggcctacgccaacgcagtggcctacaccactgcggcgttcatggactggtctgaagccatcatcgctcgggatccagacgcgctgatcattgcgttcggagatcactccccctccctggacgccgatccagacccctatacctttgtgaatggcgcagacccagcggatttcgacagccctgacactcggcgtcgggtcggcatgagccgcactccgttgctgatcctcgatggcaggcgcggcgcagtcgccaccggcacgaacattccgatgtacgaactgccaggcctgatcggccaattgttgggcaacaacgccctgctaccgcaatcagcccagcaaggtcccatgatcctccggcctttccgtggccatctactgagcaacgatgacggccgctggtttgactgcggaaacagggagtcccccgtccggaaccagagctgcgaccatgcttggggccagttttcaccattgcgcctgttgcgtcaggacaccctgcttggcgaaggacactacctttccgcacagcatgcgttggccttccgcaatccgaggctgaaggcaatctccgtcgaacagcgccatgctgcatgtgaattcgacttggacgactggagcccgcgcattgcaacttcagggctcggattcaacgtgcaatcggatggatcgagcgccatgtggttcagcatgaagcacctgcggggcatgcccgtagtccatgtcggtgaagtcgcaggaatcagcaatcaaggtgaccacctacttacagcgtcttttccagcgggggccatcgccggccttgctggccgccaacccgtcacgcttacctgccccggccaacgtccggtacaggtgggcacgcttgcgttcgagactcgaacgcatgcatcgcaaccagagaactgcagcttcaccgtcgaccaatggggccctcataccggcaccggagggcggggcttcaatctcgacccagacggccgcagcaccgtgtgggtcacaatgaagcagctgaaagggcagccgctgatccatgtgaacggcatgacgggcaacagcacctttggggagaatctcgtgacggctgccttcacggatatggcatcacttacggagcccacctctctgccggtaaccatcgcatgcccaggccaacccgcagtcgagcttggtgcaatccagctgggggccgccgcccactga

SEQ ID NO: 500841 - DNA, 393 bp, Stenotrophomonas maltophilia
gtgaccctgtcccgcccgttcctgctgttcctgctggccggcggcaccgctgcgctggccaacatcctgtcgcgcatgctgtacagccactggatgccgttcaccccggcgatcatcgccgcctacctcaccggcatggtcaccgccttcgtgctgacccgctggttggtgttttccggcagcacacgccccctgcaccactcggcgttctacttcgggctggtcaacctgttcgcggtggcccagacctggctggtctccaccctgctggcctaccacctgctgccatggctgggcgtggacgtgctgcgcctggaaatcgcccacgtggtaggtgtggcggtgccggtggtgtccagctacttcggccacaagtacctgtcgttccgatga

SEQ ID NO: 500842 - DNA, 1287 bp, Stenotrophomonas maltophilia
atgagcgagcgcatcgccgttctcggcgccggccccatgggtcttgccgtggcttaccagctggcgcgcgacggccatcagcccgtggtgttcgaagccgatgaccgcgttggcggaatgactgcgagcttcgacttcggcggcatgccgatcgagcgctactaccacttccattgcacctccgatcacgatttcctggccgtactcgacgagttggggctgggcgaacgcatgcgctggaccgagacccgcatgggctactggttcggcaagcgcctgcaggcctggggcaacccgatcgccctgctgcgcttcaggggcctggggctgatggccaagatccgttacggcctgcatgctttcgtgtgcacgcgccgcaacgactggcgcccgctggaccacgttgaagcctcgtcctggatccgccgctgggttggcgccgaagcctatgaaacgctgtggcgccggttgttcgactacaagttctacgactatgccggcaacctgtccgcggcctggatctggagccggatccggcgcatcgggcgctcccgttacagcctgatgcgcgaaaagctcgggtatctggaagggggttcatccaccctgctcgatgccctgcacgcggacatccagcgccatggtggcgaggtgcggctgtccagcccggtgcaacgcatcgtgatcgaggaaggccgcgtgcgcggcgtccaggtcggcggcgagcatctgcccttcgacaaggtcatttccacggtaccgctgccgttcgtgccacgcctggcgccggacctgccggaggcgatcctggcgacgttccgcgcactgaacaacatcgccgtggtctgcgtgatcgccaagctgcgcaggccggtctcggccaatttctgggtcaacaccaacgacccggacatggacatccccggcatcgtcgaatacaccaacctgcgcccgatggatgcacatatcgtctacgtgccgttctacatgcccggcgagcacgagcgctatggcgacagcgacgaggtgttcgccgacaaggtgcgccgctacctgtgcatgatcaatccgcagctgggcgcagatgacttcattgacgtgcgggtcagccgctaccgccacgcgcagccgatctgcgagccgggcttcctggaccggctgccgccgcgccggctgccggtggaaggactgtgggtggccgatacctcgcactactaccccgaagaccgcggtatctccgagagcatcggctttgggcgtgccatggcccgcgaggcggtggcgtga

SEQ ID NO: 500843 - DNA, 948 bp, Stenotrophomonas maltophilia
atggactccgtgctggagcagaagatcatcattcccggtggtgccggcctggtcggccagaacctggtcgccatcctcaggcgccagggctatcgccggctggtggtgatcgacaagcacgctgccaatctcggggtgctcgcgcgtctgcatccggatgtggtgaccgaacacgccgacctcgccgaacctggcgcctgggagcgccatttcgccggtgccgacgccgtggtgatgctgcaggcgcagatcggcggcaccgatccgctgccattcgtgcgcaacaacatcactgccaccgacctcatcctggatgccatcgagcgccacgccgtgccctacacggtgcacgtcagttcctcggtggtctgttcggtggccgatgacgactacacccgcaccaagcgtgagcaggagcaacgggtcgccgcgcgcggcattccatcggtcatcctgcgcccgaccctgatgttcggctggttcgaccgcaagcacctgggatggctgtcgcgattcatgcgcagggttccggtattcccgattcccggcgatggccgctacatgcgccagccactgtatgccggcgatttcgccaccatcatcgccagctgcctgcgttcgcgcattgcgggtcagcgctacaacatcaccggcctggagaaggtcgactacatcgacatcatccgccagatcaagcgcagcacgcgtgcccgcaccctgctgctgcacatcccctaccgcctgttccgcctgctgctgaggacctgggcgctgttcgaccgcgacccaccattcacagcagcgcagctgcaggcgctggtggcccatgatgagttcgaagtcatcgactggccttcgatcttcaacgtaaggccgacgcccttcgcgcaggccatcgacgccaccttcaacgaccctgagtacggcgacatcgccctggagttctga

SEQ ID NO: 500844 - DNA, 738 bp, Stenotrophomonas maltophilia
atgcagaacgtcctcatcatcggcgccacctccgcgatcgccgaagccgtcgcgcggcgttacgccgcacgcggcgcggcgctgttcctggtcgctcgccgttccgaacggctcgccgccatcgccgacgacctgcgcgtgcgcggtgcacgcgccacgcacacttcttcgatggacatcaacgatctggccgcccacgccgagctgctggcgcaggcctggcaggcgctgggacgggtggatgtggtgctggttgcacatggcacgctgcccgaccaggcagcgtgtgaggcctcggtggaagcctgcatggccgagttcgccaccaatggcacctccaccctggccctgctggggcctgcggccaatcggctggccgacgccggcagcggcgcgctggcggtgatcacttcggtggccggtgaccgcggccgccagagcaactacgtctacggcgccgccaaggctgcggtcagcacctacctcagtggcctgcgccaacgcctggccaagcagggtgtggcggtggtcgacatccgccccggcttcgtagacacgccgatgacggcccacctgcgcaagggcccattgtgggcaacgccggaccaggtcgcacgccgcatcgtcgccggcatcggccgcggcaccccggtgctgtatgccccgggcttctggcggttgatcatgacggtgatccgcctgctgccgcaggccctcttcaacaggatctcgctgtga

SEQ ID NO: 500845 - DNA, 1305 bp, Stenotrophomonas maltophilia
atgcgggccgacgcgcattcctgggggcgatatccgcgcgcgccgcagtcgctggtcagggtgcacgatcggctcgccacgctgccaaccttcgagggcactgcgctgccgcatggtaacggacgcagctatggcgacagctgccagaatccgggggccaccctgctggactgtcgcggtctggaccgcttcatcgcctttgacccgcccagcggacggctgcactgcgaagctggcgtcaccctgggtgagatcatcgcgctcgttctgccgcaaggctggttcctgccggttaccccaggcacgcgtcacgtcaccgtgggcggtgcgatcggcaatgatgtgcatggcaagaatcatcatctggccggcagcttcggtcaccacgtgctgtccttcgagctgctgcgcagcaacggcgaacgccgcgtgtgccggcctggcgatggcgacggttggttcgaagcaaccgtcggtgggcttggcctgaccggactggtcacccatgccgagttgcagctgcgccgcgtgccgggcagcagccttgaggtggagaacatccgtttctccagcctggccgacttcttcgcactgtcacaggacagcagcgaaagccacgagtacagtgtggcgtggatcgactgcctggcacgtggccgcgccctcggccgcgggcatttcacccgtgccaaccatgccgtgcaaccggtcgacgaacgcccggccacgccccgccggcagtggaagatgccgctgacgcccccgatatcactggtcaaccggctcaccctgcgcccgttcaatacgctctattaccggcgccagccggcgcaacgccgacgccaggtctcgcacctgctgccctttttctatccgctcgatggcatcagccagtggaaccggatgtatggtccggccggcttcgtgcagtaccagtgcgtgctgccaccgcacgcggccgcagatggagttcccgccctgttgcaggaaatcgcccgcagtggccagggttcgttcctggcggtgctcaagcagttcggcacgcggccgtcccttggcatgttgtccttcccgcgcccgggtaccaccctggccctggacttccccaacaccggcgagacgctctgggccctgctgcagcgcctggaccagatcgtcgatgccgcgggcggtgcccagtacccggccaaggatgcgcggatgaccgccgcctcgttccagcaggcgtacccgcgctggcgggacttcagccgattcatcgatccacgtttctcgtccggcttctggcgccgggtcacggagtaa

SEQ ID NO: 500846 - DNA, 1443 bp, Stenotrophomonas maltophilia
atgcccccagcgcctcctgccccctcccctgcagcccacgaccgcgccctgtgcgtggacctggacggcacgctgctggacacggacctcctgtatgagtcactgctggtgctgttggcgcgcaatccgttgtacctgttcctgctgccgttctggctgctgcagggcaaggccgcactgaagcggcagatcgctacacgcgccaccgtcaatccatgccacctgccgtacaacccaaaggtactgcaactgctgcgcgacacgccgcagcgcccgcgggtgctgtgtaccgcctcggaccagctgctggtcgcgccgatcgccgcacatctgggcctgtttgaacaggtcatcgccagcgacggccagcgcaacctgtccggccccaacaaggcgcaggccctggtggatgcgtttggcgagcgcggtttcgactacgccggcaatggcacggtcgacctggcagtctgggcacgcgccgcaggcgcctgggtggtcaacaatcgcagcgctctggccggtgccgcagcacaacgcacccagctgctggggcactggcccgccacatccaggcggcaggcatggttgaaggcgctgcggccacaccagtggctgaagaacctgctggtgttcgttccgctgttgaccgcccaccgcttcctggaagcaccggcagtggccgatgcgctgctggcctttgcggccttcagcctgtgcgcctccggcgtctatgtcctcaacgacctgctcgaccttgatgcagatcgccggcatccgcgcaagcgccatcgcccttttgctgccggtcgcttgccgctgctgcacggcctggttgcaggcccgctgctgacgctgtgcgggctggccgttgcactggcctgcagcccggcattcgccgcagtgctggcgggctactacgcgctgaccgtcgcctactcgttgcgcctgaagcgcatcgtcatgctcgacgtggtcctgctggccagcctctacaccctgcgcatcatcggcggaaccgtggccatcggtgcggaactgtcgttctggctgctggccttcagcatgttcattttcctctcgctggcactgctcaagcgctataccgaactgcacgcggtgctggcacgtggcaagacccgcgccaacggccgtggctacggcgtggaagacctgccgctgctgcagtcgctgggcgcggccgccggctactgcgccgtcctggtgatggcgctgtacatcaacagccccgatagcgtggagctgtaccgcaacccgaagctgctgtggttcatctgcccggtcctgctgtactgggtcagccgcgcctgggtgatcgcgcatcgcggcaacatgcacgatgacccgatcgtgtttgccgccacggatcggcccagccaggtggtggccgtgctgtgcgccgggtttgccctggtggcgatctga

SEQ ID NO: 500847 - DNA, 771 bp, Stenotrophomonas maltophilia
atggacaacaacgcgcccctgcccgccggcgacgtgccggccccccgcaatgatcgctcacgcatcctgcgggcgttcaatgtcagcctggccgccgtgctggtgctggtggccgtgttcgccctgcagggcacgttcgactggcgaccgtgggcggtcgcaccgctggaagccaagggcctgctcggcctgatcggcggcccgatgctgcatgcctcggtcgagcacatcgccgccaacagcatcgcgatcctgatcctcggcaccctcgccggcagcgtgtatccgaaggccaccgtacgcgcgctgcccctgctgtggctgggttcgggcctcggcgcgtggatgctgggcaatcccggcagcgtgcacctgggcgccagtggcgtgacccacggcctgatgttcctgctggccagcctcggcctgctgcgccgcgaccgtgcggcgatcgccaccggtctgatcggcatgctgttctacggcggcatgctgatgaccatcctgccgcacgccgatggtgtgtcctggcagtcgcacatgggcggcgccttcgccggcatcatcgccgcgctgctgttccgcaacgccgacccactgccaccgcgccagcgctacagctgggaagacgaagaagacgaggctgagccgctgtccgacgacgaactggagccgccgtcaccgcagcgcgtgccggtactgtggcagccgcgcgagggccaggactacgtggtgatcccgttccgccgcccggacgaaccgcgcggatga

SEQ ID NO: 500848 - DNA, 681 bp, Stenotrophomonas maltophilia
atgcgcaaagccgaccgcctgttccagctggtcaacctgatccgcgtgcgccagccggtgaccgccgccgtgctggcggcggaactgggcctgtcggtgcgcagcatctaccgctacgtcgatgatctgtccgtggccggcatcccgctctatggcgaggccggtatcggctatcgccttgatcccggtttcgaactgccgcccctgagcctggatgcggcagaagccgaggcactgcagctggccgtggagatgctggcctgcagtggcgcgggcgacctgcaacctgcggcgcgttcgctgctgcacaaactgcaggcggccatgcccacgcgtgcgaccagcccacgcactgcccgcgcgctgcgtgccatacccgtttcgctgccgtgctggcagccactgcatacggctatcgccgacggccgcagtgtgcagctacgatatcgcacgttgcagggcgcatcgagcgagcggaccgtgcacccgcttggcctgttccactggggccagcactggacactgggcagctggtgcgcgctgcgccaggactaccgcgatttccgcctggaccagatcgaagccctcgctgaagcagaggggctggacctgccggcgcaggtcggtctggaagcctatctgcgccaccaacagcgggcctgggcgctgcgcggccactga

SEQ ID NO: 500849 - DNA, 303 bp, Stenotrophomonas maltophilia
atgcaccctgcttcttccgtcctcgaactggccgtgttcaccgtcaaaccgcacgcccgtgccgacatgccgatgctgcgtgagcggctgcgcgcggccatcgcgcagtttcccggtctgatcgactaccagccgttctcgccgatggacggcgacgaccgcttcgtcgacatcgcgcactggcaggacctggccagcgcgcaggcggcggcacaggcgttcgccggtggtgatgcgcgctttgcaccgtacatggccgccatcgatgagctgcagctgatgcagcacttcctgccgggttga

SEQ ID NO: 500850 - DNA, 528 bp, Stenotrophomonas maltophilia
atggcccttatcgctctggatgacccacgatgggccgaactgcagcatgcctatggcgctgcggatgacattccggagctgctggccaatctcagtatcccgaaaaacgaaagatccgaagacgatccgatcgaggacacctggcacgagttgtggaacagcctgtgccatcaaggggacgtctacagcgcttcgtttgcggctgtgccgcatattgtaagaacacttctgacatggccagagttgctaacgtttcacttcgttggactgccaatctcgattgaaatgcagaggcgggaagccatcattccgcttctcgatgtcgtggagccagagtattcggaggctttacagaagctcgcgcgatttgctgcgagcattgtcacgggaaggcatgatgaacgtatgagctcgtgcctgttgacaatactcgccttggaacatggaaacttcggtgcagcgcggatgctgagtcagattgcacctgaggaagtggatgagatgatggagctgttccggaatcgctag

SEQ ID NO: 500851 - DNA, 360 bp, Stenotrophomonas maltophilia
atgcgcgcattcattctggccctggctctggccacccccttggccctggccgcaggcccggcccacgccaatccgttcgcggcccacaccaccggcactgagatcacccagaagcaactggacgagctggaggtgggcaaggcgacccaggaccaggtccgcgagaagtttggagcgccgacgcgtcgtgagcagcttggcgacacccaggtctggtactacgactacgccaagatcaagcacttcggaaagaacgtgcaggaatcgaccgtctttgagttcggcaaggacaacgtactcaaggtgaaatccaagggcgcggctcccgccaagaccggcaatccgttcctgggtggctga

SEQ ID NO: 500852 - DNA, 1476 bp, Stenotrophomonas maltophilia
atgaatcctagagaaagcgcggcgctttcggacgatgtctataaggacccgcttccgcccgtcagttccgacatcaccgtcggcggaacaaagtatgaggtcctcgcttgtcgtgactctgggagcggatatcagggtgttgtctacctcaacatcaatacaaaggaagtcatcgtcgcccatcgcggtaccgagtttgatcgtcagcccatgcttgatggcggcatcgacgccgcgatggtcaccgccagattcaacgcgcaactgactgacgcgctggcgctgacaaagcaagccctcaggctggccgaagaaaggggagccgggccagtacacgtcaccggccactccttgggcggcgctctcgcgcagatcactgcacaccactacaacctccccggcgacgcgttcaatccctacggtgccgccgggctggcatatcgccttcctgaaggccagccagccaacgccgcacccttcaccaaccatgtgatggcaggcgacctggtcagtgccggcggtccccattacggcaaggtcgagatgtatgcgctgcccagggaactggagatcctgcgcaacgccgagcacggccagcgcatcgcctcgatcggaacacccgggatgaagagcggccatgtcatgtccgccgcggtggcggtccagttgggcgattcccatcgattggttcatttccttgatcgcatgaccgacaagggtccggtgcaatctgtactggacaacccacaggtgcgggtcacggatcctgaggacctgcgccggattgccgactaccgcagtgatgttcatcaactgcgtgcgggtgcgaccgtgcttgtcggcggcgggcccggtctgctgcgcgacggtatcaatttcctgtgcggtgtcgaggaagccggtgcatacgcccgccgcgaggctgaagcggagcagcgggcccagaatgcgctcaagccgggggagcagctgatccaggatgcaaccggcaagggctcgccctctctcagcaatcccgctttctctcccaagaaccctttacaggagagcattgaatcaaccttggacaaggcaggcctggatcccaggaaggaaggccatccagaccatgcgctctaccggcagattcgcgacggtgtatccgtcgtggatgccaggcacgggcgcagcttcgatgaaaccagtgagcgcgtgtcggccggcctgcttgcggcggccaagggcagcggcctggaacgcgtcgatcatgttgtactgggcaattcacccagcgatggctcagcatctcgcatgttcgttgtgcagggagcgctcgacaatccagcacacctgcgggcgtcggttccaatcagtgaggccgtcaatacgcccgtagaacagtcgctcgccaaggccgagcagatttcgcaggcacagcaggtcgcccagcaggacctcgcccaggagcaggccctcactgcgaggcggatgggctag

SEQ ID NO: 500853 - DNA, 684 bp, Stenotrophomonas maltophilia
atgttccaaggatcaaggacaatcctgcagcgacatggaccgctcatgctgaaatccgcccccagccttgctcatgttgcgttgatcgctttgatcacactggccgctgcgggctgcagcaaggaacgctcgttcccggtctatcgcgagaatcctgcgccccaggatgcgctgccgattgtgattcgggtccacgatgcacccgtggatgtccccgttccttcggtcttcgtcacgtatgagatagacccactctgtctccctccggtcaacaattgggagggggtgcagtacgagccgaaccagcacaaggttgaggttcaggcacagcgcctcagtgcaactgaattcagcagtgctgttttcaacgacggcatggaagttgccgactattacggtcgtggcccttgcacttggacacccgtgcttgtggaagcttcattccccttcattatcgatgatcgcccaatccgagcgtccgtcgcagcactattcacggaaattgagggcgggagaaccttcactgcttacgtaaagcgcgcattgccgcccttgaccacaggacagtcgacagagcggacgccaaccgagccttcaagttggtacgaaaagatgcccccagagaagcgcgaggaatactttccaatcgaagtctccacacggattgaaggagcatcgcaatga

SEQ ID NO: 500854 - DNA, 345 bp, Stenotrophomonas maltophilia
atgtcccgtctgctgattgcgtgcgtggccgtgctggcactggccggctgcgaaaaatcccgcaacacctcgatcacccgcacccatgccaacggcgtggacacgctgtacagcaagagtacggtggtcgatggcgaggcgcgcttccagtgcattgccagcagcagtggccactgccattacctggtgctggacccagcgtgcagctccgatgccgcgtgcaccacaccgccgctgcgccggttcgccgttgcagcaggcaagaccgaggccatgcgtgggctacccgacggcttccgccagtgcgtcagccaggacccgatggaacactgccaccgtgagtga

SEQ ID NO: 500855 - DNA, 411 bp, Stenotrophomonas maltophilia
atgcacaccacgaccgctcctgtttcgccgctggcgccgtatggcgccaccctgctgcgcctggccctgggcgtgctgttcctggcccatgcgctgaccaagctgctggtattcaccccggccggcacggcggcgtacttcgagtcgctgggcctgcccggcgtgctcggctacctcaccatcggcgtcgagctggtgatcactgtcgcgctgttgctgggcgtctatgcgcgctgggtgggcctggtcggcgtaccgctgctgctgggcaccatcgtcaccgtgcacggcgccaacggtttcggtttcgccaatgccggcggcggctgggaatacccggcgttctgggcgctggcgctggtggtgctgttcctggtcggcgatggcaagtggaccctgcgttcgcgctga

SEQ ID NO: 500856 - DNA, 1041 bp, Stenotrophomonas maltophilia
atgtctattgatctccgcgtgatggccactgcactcggcgccctgttctgcaccaccgcacaggccgtggcaccagacgccatcgacctgccgacagcacaggcacaggcccagttgctggacatgctggagaaggaatcgctgtaccgcgaccgcgtggactggcgggccatccgcacgcgcctgaaggcggcgcagaacgacccggctgaggcccgcgcggtgctccggcaggccatcggccgcagttccggcgggcacggggcttggatcagcgcaaagcagctgcaggcgaaggcagaacgcctggcgcgcgccaatggcgcagcaacagcggtccagaaagcaacgacggccccggccgaagcgcttgacccgcgcatcggccgggtacagatcgagggctacggtgtcatgcagagccccacggcgcaccagcagatgaaggagcgtgccaagcgctggcaggcgatcatcgatgaccaggacaacggcagccgctgcggctggattgtcgatctgcgcggcaacaccggtggcaacatgtggccgatgctgctgggcgtggcgccgctgttgcgcgtcacgcccagcgccgacgagaacgtgggttccttcgctgccgcagatggaccgtcgctctggcagctgacctcgtccagtgtgcgtcttggcggtcgcgtgcggatcgatcttggtgggcccggctatctgctaaaacatccgggcgcgcccgtcgccgtgctgaccgggccgcgcactgccagctccggagaggccaccgtactttccttccgcggtcggccgcagacgcgcagtttcggccaacccacctcggggctgtccaccgccaacgtgatgcggccgctggctgatggcagcgcgctgctgctgaccaccagcgtgatgcgggaccgcaatgatcgtggtgatggcttgaagatcgagcccgaccagcgcgtcgagggggacgccgccaccgtggccgccgcccaagcctggctgctggcccagcccgcctgccagggcacccggtcatga

SEQ ID NO: 500857 - DNA, 303 bp, Stenotrophomonas maltophilia
atgaaagtggttgctttggcgacgctgaaacgattctgggaacgtcaccctgattcggaagcagcgctgaggtcctggtatgacgaagtgaggcacgccgtctgggacacaccgcatgacgtacgccaacgttacgcaagcgcaagtttcgtggccaacagtcgtgtggtgttcaacataaagggcaacagctaccggctcatcgtcgctgtgggttacaggtttcaagtggtctacatcaagttcattagcacccacgccgagtacgaccggatcgatgccgacactgtggagcttctatga

SEQ ID NO: 500858 - DNA, 360 bp, Stenotrophomonas maltophilia
atgaacatccatcccatccgtacggaaagcgactacgaaaacgcgctgcgcgagatttcgttctatgtcgacaacgagccggagctgggcagcgaggatggcgatcgatttgaaattctcgtaacgctggttgaagcctacgaagcgaagcactacccgatcgagccgccagatcctatcgatgcaatccgcttccgcatggagcagggcggtctgaccgtgaaggatctggtgccctccatcggccagctcaaccgtgtctatgaagtgttgaatcgcaagcgcggtctgactcttgaaatgatccggaagcttcaccgcaacctgggcattcccgcagaaagtctcatcggccgctga

SEQ ID NO: 500859 - DNA, 1221 bp, Stenotrophomonas maltophilia
atgaagatctatcttgtcggcggcgccgtacgcgaccgcctgctgcagcgccctgccggcgaccgcgactgggtggtggtcggcgccacgcccgcgcagatggaagcacagggctacaccgcagtcggccgtgatttcccggtgttcctgcacccgaagaccggtgaggaatacgcactggcgcgcaccgagcgcaaatccggccgcggctatcgcggcttcgtggtcgatgccgatccggcggtgacgctggaagaagacctgcagcgccgcgacttcaccatcaatgcgattgcctgcgacgaagacaccggcacgctggtcgatccctatggcggtgtccgtgacctggaacagcgcgtgctgcgccatgtcgggccggccttcgtcgaggatccgctgcgcgtgctgcgcgcggcgcgcttcatggcccgttttgcaccactgggcttcagcgtcgccgaagagaccatggcactgatgcgcgaggttgccgccagcggcgagctggacgcgctggtgcccgaacgcgtctggcaggaactgcgcaaggcgctggtcagtgagcggccctccgccttcctgcgcacgctgcacgatgcgcaggcactgggcccgatcctgcccgaactggaagcactgtacggcgtaccgcagcgtgccgaattccacccggaagtcgacaccggcatccaccaggaaatggtcagcgacatggccgcgaagctcgcccccggcgatgacctggtcggcttcgctgccctcacccacgatctcggcaagggcctgaccccgccggaggaatggccgcgccacatcatgcacgagcagcgcggcatcaagccgttgaaggcactgtgtgcgcggttgaagattccagccgagcaccagcagctggctgaagcggtgtgccgcgagcacttgaacgtgcatcgcatcgacgaactgcgcgatgccaccgtgctggaactactgggccgctgtgatgcgctgcgtcggccggagcgcgtggcgcgcatcgcactgtgctgcgaagccgacaagcgcggccggctcggcttcgaggacgccgactacccgcagggcgaaacgctcaagcgcctgcaccaggcggcgctgtcagtgcaggcacgtgatctggataccacgcacctgaaggggccggccattggcgaggcgctggccaaggcgcgggtgaaagccatcgccgccgcccgctga

SEQ ID NO: 500860 - DNA, 342 bp, Stenotrophomonas maltophilia
atgaaagcactaactgccgtgccgagcgtcatgatggtgatcacgctgcttcttcctctggcaggtgaatcgagggcaggcggcgtgatcgagtgcaacaactgcctctctcccagcgatgcggcctcggcctcaggagaggggttgacggttgtggtggatttcgagagagccgagttgaccgctttcgacgttgaacatgcccctgagatcggaaggtggcgagcacatccgaccccggttccggcgcagattgagatggcttttctgcggatcctggacgcgacactgtcagcagggcaagcgccgctcatgcagcaattaccgcatgagcggcagtga

SEQ ID NO: 500861 - DNA, 1281 bp, Stenotrophomonas maltophilia
atggcaacgctcgagctgtttcagtttcagcgattcgaccatggagaggctgacggccagcatctttggtcagtctccatgtccatcaatgacgtccctgaacccaagcggcagttgccatacattcgcctggcttccgggctaccttggacggaagcgaatacttggctcgccagtcgcgcttgcgatcctgccgaagatctaagcgcaaagacaatcattagagatgctcgcggcctagtcagctacgccaactttctggaagccaatggattggcgtggaacgacttggataagccggattcagaaaagcctacctacctgtacaagtcgcacaggaacctcaatgtaaaagagggtacgggtgcatactcgaccgctcaaacagaattacgagcagtcgccaacttctacatctggtgcacctctaccggccaacttgcagacgaatgcaagccgttcttgactcgaacgacccaggtccaagtctttacaaggttcggatcaaagacagtcgagaaaacagtctcgagcatgcccctgaaacgacgaaggaccgcgcctagatcgaccttggaaggtggactgaagccagttccggcagaacttcagaagcgaatcctgacgctatccgaggcacatgcgggcacagaagtgacattgatgctcgccattggcttttcttctggaattcgcttgggcagcatcacagacctcaaatgcgaaaccatcgaaagggctgcgtcgacgaacctgaaaggccacaagtccatcaagatcggtcccgcgcacggggtgatgacgaagttctcaacgaactactcccccgtcataccagacgcgctcatccaacgccttactagctacataacttcggtccggcgcctaaaacgcgccatcaagcatgaaggtcggtactctcagtacctcttcctaaccccgcagggtcgtccctatcatgatgacgacggcattccgagcagcgccattggcgtagccattcataggataaggacgatcgcacaagccggcgacgtcccgatcgaagattttcgatttcacgactcccgagcgacattcgcatgcaacctgctagatgccgcgatggccatagggatccctgtgacatccgcgctttcaatcattacggagttcctgggccaatcagatgagcggaccgctctccgctatgtccagcacgcgcagaagagacgaatcgtcggcaagtacaacgacgtctatgggcaatggctccttgagctcactcatgagactccctga

SEQ ID NO: 500862 - DNA, 1656 bp, Stenotrophomonas maltophilia
atgagactccctgagcctctcattattccccgccccaagactggtagatccttgccatgggatctctccaggctagccttcatcggtgccgccaagcgcccgaccatgacggttgatacagagatacgctcggggaagtttgggaaatacgatctactgcgatacgaacttctcaaatccattcacaaacacatagtagagaggcacgtcctcggcgaactggctgactcgactcgcgaaacaatatttaacacgctcaggacgttctttaactactgcgaccgagagtcagtccaagtctctccgaaaacattcttcatcgcggtccaaggttggaccagatcgttcaaaacagcttccccgcacgatctcgcacagcagcagtacgtcgttagaattctagccggcgtaactgggcaagactcaacactgctgttgaagtcatttgggatctccaagcgcggagcaccattggcgctgaagactaacgatgcgagaagcgaagtcgttcagcagtacgtcgcggacctcatctcgcttatcgactgcctccaaccagataagctctacgcgcccctgccattgccaatccaggtcaggaagagcggcccgatctactaccactactctgggacgtggaagtcgacgtcgaccaagtacggctacgatgtcgcaagacggcaaaatacccttaagggcacaagcctacatcgcaggttccctctgcttaaccttagggtaactgcagaggcattcctattcatagcaatgaccggaatgaatcttgccgaagttcaaaagatgaaggtcgaacagtacagcagacggtccgcaggagatcactacgaatttagggaattcaaggctcgcgccgggcatgacgtgttgttcaccatccccaagccctacctgcccatcttctctgcatatctgaaatttcgcgaaacccatttgagcgaattcaagtcaagcctgctcttcccaatctatcagcgaggcggtccagcaagtcgaaaatttcacagtggcaacctaagaaatatcttcaatgagcttggcgttccgttcattacgaccgtcgaactcagaaagatcaagtccaatagcatcatggaggtaagcggagatccgggaacagagtccttgattctccaacatagccgtgaaacgttcgccaagaactatgtgcgtagaagcccacaacgagcggcgagtgaattcactgcgttcttcaagtcagaagtagccgcgcttcgggtgtcgcgtgcagtcgatggtgcgccatgcactcagaaggacaaccccaagccattgacgatagcttcacccgatgcacccactcccaactgcgacacgatggcgggatgcctcttctgtgaaaactacaagggagtgtcgagcctagactacatttggagattgaggagctaccttcagctgaagcgactcgaactcaaaagtcacctctacccaaacagagaacattcgcggccgatacttgaaaccatgcgccgcatccgatcaatcatccgcgccttctcgcagaagaacaagcaacacgaggcatgggcacagatcgcagatcgcaaggtgaatgacggacagttccatccatcctgggacctcctcattagattcgcgcagggagatgcttga

SEQ ID NO: 500863 - DNA, 1875 bp, Stenotrophomonas maltophilia
atgctcacctcccgacttaaatcgaaacaccgtgacgtccctcttcctagcggccttgccagcatccacgacgtacccccagatttcgtagtctcctacaaatcagatggatcaccttgcagccgatacggagacaactgttggatattctccgcataccacacgtcatcgatctccatgcggttcgccaatgatgagaacacggatgatctagagcagagcaacgcagctgcggcgaaagtcgtagtactggcactactctacattggccaccaccccctcggggccggcagcttccacaccaaactctgccgcctaaaggacatcctcaaggcctgcaactccacacaaactctgatctcggagttcggaagttccaaaaaatgccaggcagaacttcgaaagcgaatccgcccaagttcacttggatccgcaccactgcttatgcatgaactggccctgctgagtgaagaaataggctttacgctttgcccaccggcacttatcccaagcttctacccaacaggatattcagccaatcaaacactatacgtccctaatcggatccattcttacgtcttgaatcaatgcgatgcgattgtatcgctcgcaaccactcatatcgacctacttaagaatgcgatacgtagccaactgcacgaggcgttcaaccttgtcccggcaccggacagccaacttgctacggaagacctttccgcgttacctgcgagactagtgggcatcttcgacaccgcatacggcacgctggagcaccgccacccattcctgacttacatcacggcgatacgagatgccgccctgattttgctgtgcgcgcatagcggcatgcgcatctcagaggctcgcgagctcaagcgagggtgcctccgtcagcatcaagacgccgccatcggaccggcaaatttgatagtcggagtgcccgcaaagatacagcctataacggaatcgacttggatatgtagcgacttggctgcaaaggcaatccatgtgctggaagccatttcctcggtacatcatgagatgcgcgacaccaaactggtctcagggagcttcagcaactggctctttacgtccgtactaggctggaagaagaagcggcacagtatcgatccaccgcgggtttcaatgatcgaaaggattaactatccgtggctatttgatcctgagactctgaaggtcactgaagacgaccttagagtatccgaactcatcaacggtagctctggggggcgtgttgtactcggaaaggtttggccgttttccttccatcagctgaggcggacattggtagtgaatgccgtgcgctctggccgagtcgcgctcggctcgatccagcttcagctgaaacatcttcaccttggaatgaccgagtactatgtgcgcggataccacagcctctcgctcaacgagtcgatgcgcattgagcttgcggaggagcttgccaatgaggcggcccgagtcgcgaaggggcttgctgactcgaagcacttctctccccatggctcagcccacaaggatcgccttctggagttgatcagcacctcagatctaaaggggcttgcgaagctcgctagccagggcacactttccgtgagacctaccctgctgggtgtctgcctaaagaagggtaactgtgagcatggtggctatgacacgctgtcccattgcgtaacgtgtcccgaagcactgctggacaaaggaaatgtagtacgtgcggagaagttgattgcccacagcgagcctctattggaagcattgcgcccttctggagatagcccgaggatgcgtgcgcttgagggccaagtttcagcgcttaaggacttcgtcatcagagtgagatctaatgagcaatga

SEQ ID NO: 500864 - DNA, 912 bp, Stenotrophomonas maltophilia
atgccaaattgcgttcgggagagacaaaattccgaggatgcgcttcggctcttgcgagcaagattgcgcatacacactggcgtaaagcgagctcagcgctactactttatattcgtttttttcctacccatagtctctatcgttaccgcatctacgccgtgcctttcgggcggcacaaagtgggtcagcctggtcgctcttctggtgggtgcatcagacgctttgtggatagatcgctggcgccgaggcagaatcaagctgtcggctagactgcaagagcaattcgacacgacagtcctcgacctgccctggaatgccttcgtggccggccagagggtcgatgcagaggaaatcgagcgctatggaagcaagccactgaagccggcacgggaactgggactccgtaactggtatccgcaatcggtggacccgctgcctatgagtagcgcgcgcttggtttgccagcgcacgaatctttggtacgactggaacctacggggggactatcagcgctacctgaagatacttggctggatgtacctaacagtactaatagtgatctcactccagaagccattagtcgacgttatcctgacgatgctcgttcccttcggtccatttgccctgtggactatcagagagtctcagcgtcagggtgacactattgccttggtcactcgtctcaaaggcgaggttgacggttcgctggataagttccaacccgacgatgagcccgacaagctcgaagcaagagcacggcagctacaggacgccatcttctcccaccgtgcgtctagcccgttggtgagtgacctcgtctacttcttcaagcgtacagggcttgagcaggaaatggaggcgggcgctagggacttcattaggagactcaatgcaggggacgttgcgaaatga

SEQ ID NO: 500865 - DNA, 1407 bp, Stenotrophomonas maltophilia
atgaagcacctcaaccacttcagcgcatttcttgagaatgtcgtcaatctcaacagcactcgactcgatcagctggacaactccttcgtagcaatcgaggggttccttaaagattcgaactaccttccgaagatcattcgactttacaagcacggctcatgggcccaccagaccatcattcgccctttggatggtcggccatttgacgcggacgccattctgttcgtcaggcccgtacagggatgggctgcggcagactatgtggatcagcttgctcgcacattcgaagcgagccccaggtacgcggacaaggttaagcgctatccctactgtgtgacccttgagtacgctggcgaccgcaaaatggacattgctccctgcgtcgttgatcgcctgtatgccgggtcgaatgaggtgtgcaaccggcgcaacaacacattccaggactcgaggccggaagagtacacctcctggttgcgcggcaagaactcaatcagcggcaacaattcattccgcaaggtcactcggctcgccaagtatcttcgggactacaagggaaccttcacttgtccgtctttccttttcaccaccctactcggtgagcgcattcacgagggcgatcgacacggaaatgacttcagcgatgtaccaacgtccctgaggactctctttcgccgcttggatgactggctacaaggccatcattacccgccccatgtcccaaatcctgtgctccctgctgaggatcaagcctccgagtggaccgaggaacagtatcggaacttccgcaacgccatccatcgatatcgtcagtggattgatgcagcgttcgatgaacaggactctacccagagcattgagctttggcggcgaatcctcggcgactcatttgccgtgcttcggaaaccgacggtcgccatggaggcagggctggccggtgcagatgtccaactggatgatgtcgatgtgctcaagactggcgggttgcagatggtgccgctggagattctcgagccgggtcatcgcaagcaaccccagtggcccctagccaacttccgcttgccagcgactatctcgggctacttggtcgatgcggctggcgccccttcgcgcgtagtgagaagcggcgaaccaatgcagcccaaccaggacattcgctttgaggcgaagcttggcggacttgcaccaaatcacacctacaggaccatgtggcgcgtgactaacaccggggcagtcgctagacgagccggcaagcttcgaggggacttcgtgggttcggaccaaccacatagccgacgcgagacgctgagctatcgcggggtccaccaagtcgaggccttcgttctgagtaccaccgacaatcagattgtcggattcagccagcccttctacgtcgtagtggagtga

SEQ ID NO: 500866 - DNA, 3762 bp, Stenotrophomonas maltophilia
atgtttgaggtcgttggctcggatatcgagcgtctttctgatgcagaacttcgctcccttgtactgcgcttggcgagcagtgagctgcgcaagcaaggattgccaatctccgcggtcactgccggcgggcatcaagatgcacctgatggcggtttggacgtacgagttgcgtgttcagttgcaatggcccgggctgactttgtcccgcgggcgaacactggcttccaagtaaagaagcccgatatggcggcaggtgccatccgcaaggagatgtgcccaaagggcgcgctaaggccagcaatagcggagctggcacagctgcagggtgcatacataattgtcagtgctcagggttcagtcgccgacaagcctcttcaagagcgtcgagaggccatgcgtgcacaactcaccagtctcgcatctccaactgacctgtatgtggacttttacgatcgtgatcgcatcgctgcttgggtcaatgagtacccgggcgtggccgcatgggtccgctcagtcgccggcagagcgctcaatggttggacctccatttatcgcttgagcagcaacaagacaacgacagcattcctcgctgatggctctacctgcctactggatgagagccgcaagcctgggcaggcacttgagatcctaagcggtgtggagcggctcagggacgagttgcgtcgacacggccgatgtgttcgcctcatcggcctatcgggagtgggcaagacgagacttgtgcaagctctgttcgaagacagtgtcggcactgagcccctagatcctagtattgccgtctataccgactactcaaccgagacacgtccgtcggcacgagatatggcttgcgacctgatcaaccgcggagagcccgcgatactgatcgtcgacaactgcaatccggagacccattcggagcttgcgaagatctgctcagaatcaggcgccccaatcagtctcctgaccgtcgagtatgacgttcgcgaggacgagccggagcgaactgatgtcttcaggctcaagggagcatccagcgacttgattgaaaagtggattgagcagaacttcggtcacatatcggaggttgatcgacgcacaatcgcggcgtttagtgacgggaattttcgtattgcgaacgcgcttgccgagaccctcgggcgtggagagactttgggcaaggtaaagagtcgggaccttatccaacgtatattccgccaacggaacgttgaagatggatcacttcagatggcggcagaagacctgtccttggcatactctgtggacggcgaggacatctctgctgagagtgagctggcgcagattgctgagatgcgcggagttgacgcacgctcgctctatcaagtcattgtcgagttgcggcaacgaaacgttgtgcaggcccgaggtcgctggagggcgatcctaccgcaggcaattgcgaatggacttgctagcaccgctgttgcgaggactcaccaggataccctcgacaacctcattcgcttggctacgccgcggctgcgggcctcaatctcgagaagacttggatatctgcacgacgtgccagaggcacgcgcagcggctgctcgctggcttagaagtgatggcgcatttggagatctgttcaacccggcgacgcaggatctcaggatcatcaccaatcttgctcccttggctccaggtgatgccatgggtcgcatcagcgaagctgtgcagatctatcctgagatcgccgattgcggatcacgaaaacgctgggaatggattcgcctgataaaggcgttgagctacgagacggagcacttcaactccgctgcgcagcttctgatgcaattcatagccactgagccgacggggaaccaggtcgactcagcccgcgaagcattctcagagatgttccaattgtatctttccggaacgcaagcgagccccgagactcgccgtgcactggttgcgaaccttcttggatctgacgaagaggactcacgggcgtgcgggctgttggctctccaagctctactaaagacatcgtatttttcatcgagtacgagctttgattttggcgccagatcacgtagctgggggtggcaccctcagtccagtagcgatgtgtgtgactggtacgttcgcgccattcgcctatgcgtgcacctttctgacaggatcgatgagcctcgccagattctcgcccagagcgttagaggcttgtggcgctacgaagcctgccatggggcgctggaggatgcagctgaggcgctcttgaagcgcgcccattggatagatggctggatctcgctgcgcgccaccctacgcttcgatggaaagaagatgccgagggagtacagaactcgtctagaagcactgatcgaccgcctgcagcccgttgatcttctcgaccgcgcacgagcggcggtgcttggtcgcggtgtcgatgggttggaagccagcagcgctgaggctgacgatgagagtggcatgcacgcctggaagagagcatctctgatggcgcaaggtgtcggccgtgagttggcacttgccccttcagtcagagaggtgttcatgagcgagctaatggttgcaactgacgtccagcgcgcctacgaatgtgggatgggacttgcggagggtgcacccactctgcttgaaacgtgggagctgctcctctcagattacgaacgtgcggacgcagcgcgacgtgacgcgacagttctcggcggattcctgcgccaggccaaggaactcgatgctgaatttacagagggcgcactcgagagctccctaagccggggtagcctgattcctattcagccctacctgcaggcacgcgttggcctagaccaggttggaattagccgaatgcgcagagccctagccgcaggtctgcttgaggcacctgcattcgtgcacattgccaatggactggtagagcactcaccgcccgcgttgttggccgcgctacttgcagatattgcgcgtctcgcaagtggagagtgggtggccttggaaattcttcacatgtacttcttctcgaacaagagcacgtcgagcacagcaccgagggctttggttgaggtcggtcagggtattctcgctagtctcaagttcaagagtgcatcagtacaacgtgtacatagcgcgggagaggtcgccaagatctgttgctcaacgagcgatccagagcctgcccgtagcgtggccgagtcgctctgcctcagtttggaggctggcgacatccacttccacgaagtcagggagatcatcaacgcactttgcgaggcacatccgcatgtcatgctggacacattcctccttcgtgcatctgaagactcgctgggtcgaagatgggacacgggaggaagcaaaggcttggcgtacaggtccatggggctgcaagcgattcagtcctgggcatcgatcaacgctgtgcaccgataccctctgttgggagccgtgatgtggttgttcagcagaggcgacttcgaggagggcacgaagatcgacccgatcttcgagggcttgctgagaggggcgcccgatagagtcatgttcttgggtaagttcgatcggcaggtgtatccgctgcgctggaatggctcgatcaaggatatgctccgtaatcgccgctcagagctgacacgactagctgccgagatgcctggcgaagtggcagattgggttcattgcggactcccactcatcgagcgatggatcgctaacgccatagagacagagcaccatcaggaagaggcctttgaatag

SEQ ID NO: 500867 - DNA, 687 bp, Stenotrophomonas maltophilia
gtgattaccaacaatgtgtactccagggtgttccagttgaaggtgggccactctacaggcacgatctttgtcatggagcatgaagatcgacagtattgggttacggccaaacatgtcatctcggactgggaccgagaacagcctttagatgtcatgcgatcagatgggtggtggcagatcaggttgcgactggttggtgagcaccagtctgccgacgtggcggtgttggcggcgaacttcgccgtcaaggtgtacgaagccgaggcatccatgaagaacttcgcgatatctcaggaagtattcttccttggcttccccttcgggtggtctgcccacgttcccgcacacgtcaatcgcgagtttccactaccattcattaagcgggcgatcgtgtcggcagtgtgccctgccgttgccggagagcgggagatgctgatacttgacgggcacaataaccccggcttctcgggaggtccggtggtctttgaagacaagtggcaacctggaagtggacttcgcattgctggcgtcgtttccggctaccgattcgagcccgaggatgtatttgcgggagaagaaccgatcggcgcatacgtgaaagcgaacacgggactgatgttctgcgagacgatcaagcgcgtgcacgaagtaatcgaagagaatccaattggagttccattcgtatag

SEQ ID NO: 500868 - DNA, 138 bp, Stenotrophomonas maltophilia
atgcttggcgttccaatctcgattcccaagacctgctatgggtatggcggcagctatctgcccatgaagcaagagcatatctgtgctctcagctacgccgacaccgaatcggaactcaactcgtcgatgaagtgttga

SEQ ID NO: 500869 - DNA, 489 bp, Stenotrophomonas maltophilia
atgcgccggtatctgttttccgcactactgctcgccggcagcttcgctgccttcgcccaggaccgcttcgtacccgtcgagcggcgcctcagtgcatcccaactggccgaggtcgggctcagtccagcgcagttgcaggcgttgaaccgggtactgcgcgaggcagagagcacggccgccgcgtcgacggcagcggtggccccggtcgctgcgccgctgcctgccaatgtgccggcaccggcagcaatgcatctgggcctggatgacgaaccggtcagtgcccgtgtggtcggagaggtcgcaggctggcagcccggcacgctgttcacccttgataacggccagcaatggcaggtgatgaagggacagatgaagctgcgcacggtgttgcagtcgccgcagatcgccgttgttccaggaattgccgggcgctggttcctgcaggtcgacgaagacctgcccaaggccagagtgtttcgcgtgcgttga

SEQ ID NO: 500870 - DNA, 507 bp, Stenotrophomonas maltophilia
atgcaaccgcgcaagaccgaactcgcccgaaccgcgctgcaggcccatcgcgcgccgctggacatgcgccagcgccggttgctgatcctgtgcgacggccagcgcaccctggccgacctcaccggcctgatcggccaggacgcggcggccatggtcatccagctggtgcaggccggttacctgagcaccgggaccgccgccacagccgccccgccaccacccgcagccgcggctgcacccgcaaccggcagcgaacgccgccgctcactggtggccgcgcgcatctacgtgctggggatcctggagatgcagcgccacccacaggcagtggccctgttccgcgaactgcaacaggcccgggccgagagcgatgtcctgcaggtacttcagtctgcgatgcggacgctgcccgggctgacctcggaaggctactgccagcgcgtacgccaacgcctgctggaagcgctgccgttggagcactgcgacgcgttcgccgaggtggcctga

SEQ ID NO: 500871 - DNA, 2409 bp, Stenotrophomonas maltophilia
atgcgccgggcccaccagggtgacaccatgaaattctccgaaaactggctgcgcagccatgtcccgaccggcgcctcgcgcgatgaactgagtgcagtgctgaccgccatcggcctggaagtggaagacgtgaccgcgctgggcgaaggcctcgatcacgtggtcgtggcacgcatcgtcgaggccgtgcgccatcccgaagccgaccgcctgcaggtgtgcagggtcgatgccgggcagggcgagctgctgcagatcgtctgtggtgcgccgaacgcccgcccgggcctggtcgcgccactggcgatggtcggtgcgcagatcggcgagttgaagatcaagccggccaagctgcgcggcgtggagtccaacggcatgctgtgctctgccaaggaactgggcctggacaacgatgcctccggcctgctggaactgcccgatgacgcaccggtcggccaggccctggtcgagtacctgggcctgccggacgccagcatcgagatcaagctgaccccgaaccgcgccgactgcttcagcctgcgcggcatcgcctacgacgtcgccgccgccacccgcagcgaagtgctggacttcgctgccgacgccattccggcagtcggcagccgtgagctgggcatccagctcgacgccggcgccgaagcgccgcgttacctgggccgtgtcatcgaaggcgtcaacgctgccgccaagactccgttgtggatggccgagcgcctgcgccgcagtggcgtgcgtccggtctcgctgctggtcgacatcacccagtacgtgatgctggagctgggccagccgatgcatgcctacgacctcggcaccctgcagggcagcattgccgtgcgccgttcgcgcgcgggcgagacgctgaagctgctggacggccgcgatgccgcgctggacgacagcttcctggtggtcaccgacgccgatcgtgcgatcggcctggccggcctgatgggcggcttcgacacccgcgtcaccgacgcgacgactgccgtgttcctggaagccgcgcacttcgcgccggctgcgatcatgggccgtggccgcaagctgggcctgcacaccgatgccggccaccgcttcgagcgtggcgtagatccggcactgccgcgcaccgccatcgaatacgccacccgcctggtgctggacctggccggcggtaccccggcgccggtcaccgaggccgtgcgcgccgatgacctgccgcagccggcgacgatcgtactgcgccgcgcacgcatcacccgcgtgctgggcatcaccatcgacgacgccgaagtcgagcgcatcctgcgcgcgctgggcatggacgtggctgccacggccgagggctggcaggtcgccgcgccgagccgccgcttcgacatcgccattgaagaagacctgatcgaagagctggcccgcatccacggttacgagcagatcccgaccacgctgccgggcggtgcctcgcgcgtggcgatgccgagcgagacccagttggacgcgctgagcgtgcgccgccagctgatcgcccgcgacctgcaggaaaccgtcaatttcgccttcgtcgacgacgcactgctggcccagtggcagctgcgcgacggcctggtgccactggccaacccactgtcggccgaactggcggtgatgcgtccgtcgctgctgccgggcctggtcgccaccctgggccgcaacgccgcccgccagctcggccgcgtgcgcctgttcgagctcggccgcgtgttcgcccagcaggccggagatggccaaccggcaccgctggaaaccctgcgcgtggcggcagctgtctgcggtgaggcccaggcggtgcagtggggcctgccgacccgcaaggtcgatttccatgacctgaagggcgacctggaatcgctggcggctgccagtggtgcggtactggagttccgcctgtcgtcccgtgcctacggccacccggcgcggtcggccgaggtgttccgcgatggcgtggcgatcggctggatcggccagatccacccgcgcctggccaaggcgatggatatcgaggccgatgtctacgccttcgagctggatctggaaccgctgaccgcccgccgcctgccgcgtgccggcgagctgtcgcgattcccggcggtgcgtcgcgacctggcgttcctggtgcctgaacaggtggcctggaccgatctggcggccaccgtccgccaggccgccggcccgctgctgcgcgacctgaacctgttcgaccgttacgtcggccagggcgtcgagccgggattcaagagtctcgctatgggcttgattttgcaggacaagtcgcgcactctgacggaccgcgacgtggatgcggtggtggccgaggcggtcactgccatcgagcgtgaacaccacgcccggatccgcggctga

SEQ ID NO: 500872 - DNA, 693 bp, Stenotrophomonas maltophilia
atgaagacccttggcctgatcggcggcatgagctgggaaagctcagcgcagtactaccggctcatcaacgaggcggtgcggcatcgcctcggtggcgcgcattcggcgcaactgctcctgtggtcggtggatttcgccggcatcaagcagttgcagcacgatggtcggtgggatgtgctgggcaaccacatgctcgatgccgcgcggcgactgcaggccggtggcgccaagctgctggtgatctgcaccaacaccatgcacacgctggccgaccggatcgaagccgagtgccggttgcccctgctgcatatcgccgacccgaccgccacggcgatcctgcaggcaggcatccgcaaggtgggactgctcggcaccgccttcaccatggagcaggcgttctaccgcgaccggctgcaggaccgcttcgggctgcaggtactggttccggaggctgatgatcgccgctgcgtgcacgacatcatctaccaggagctgatcgccggcgtggtcagcgagcactcacggcaggcctacgccggcgtgatcgcgcgcctggtcgcgcgcggcgccgaagcgatcatcctcggctgtaccgagatcatgctgctggtgcgcccagaagacagtgcggtgccgttgttcgacaccaccaccctgcacgcgcttgcggcggtggacgctgcgctggcctga

SEQ ID NO: 500873 - DNA, 312 bp, Stenotrophomonas maltophilia
atgatcgagaacgccctgttcaaggcgctggctgaccccacccgccgccacatcttcgaaaagctggccgatggcgggcggcatgccagcgcgctacgcgagggcattgcgatcagccagtctgcgatgtcccagcacctggcagtgctgcgcgatgcagggctggtgcgtgagcagcgccaggggcgcttcgtccactatgaagtcgatccgcgcgggctggcccacatcggacgctggctgcagcgataccgtgcctactggccggcgcggatgtccgcactgcagaacctgctggaggagatggactga

SEQ ID NO: 500874 - DNA, 351 bp, Stenotrophomonas maltophilia
atggacgatgtactgaaggaagcggctcccgcgctggtgatggagcagcggttgcctgcgccgccggaacgggtctggcgcgcactgttcgatccggcactgcgtgagcgctggttgcctgccgccgatcttgccgatccacagccctgcctgtgcgaggaggggcgggagctgggattccgcttgcgcgatgcacagcccccacatctgcacagccttgtgtgttttcggctgcgcgctgatgaggatgggggaacggtgctgaccatcgtgcatcggctcaccgaccggcgcgcgctgataccgccggcgtccaacgatgaccatcgcacggtgatgcgcgcggcttga

SEQ ID NO: 500875 - DNA, 609 bp, Stenotrophomonas maltophilia
atgcgggacagaatgcagctggtaccgatggtggtggaacgcagcgagcgcggtgagcgctcctatgacatctactcgcggctcctgcgcgagcgcatcatctttctcaacggcgaagtcgatgacaccgtatcggcgctggtctgcgcgcaactgctgttccttgaatctgaaaatccggagaagccgatccatctgtacatcaattcgccgggtggggtgatctccagcggcctggcgatgtacgacacgatgcaatacatctcggccccggtgcatacgctgtgcatgggcaccgcgcggtcgatgggttcgttcctgctgatggccggcgagccgggtcaccgcgcggcgctggccaatgccagcctgcatgtgcaccagccgctgggcggggtgcagggccaggcttcggacatcttcatccacgccgaggagatgcagcgcaccaagcagcgcatcacccaactgtatgcgcggcattgcggacgcagtttcgaggaggtcgaacagaccctggaccgtgatcggttcatgagcgccgagcaggcatgcgaatggggcctgatcgaccaggtactggtacggcgcgacgcgctcgcggcctga

SEQ ID NO: 500876 - DNA, 477 bp, Stenotrophomonas maltophilia
atgaaaatatcaaaggctggctgcgcatcgaaccacgcacaccaccagcgcgggttctctctgatcgaactcatggtggtcctggccatcatcatgattctctcgctgatcgcagtcccgcaatacaagaagttctctaccaaagccaagctggcggcggccctggccgagctggccggcgggaaggctggagtggaggcgtggctggccgaacggggggatttctatggctcggacaaccgcaagctgggagtaccggagagcagtgagcgctgtgaaaccatcacggcaaagtatcgtgcagatggcggcttcgagatcgattgcctgctgcgattcgatgctggctacaacgtggggacatggcggcgcaatctggtgctgatcatggacacgcgcagccgtgaatggcgctgctggactgccatcccctattacgacctcctgcccaaaggctgtggccccgacaatccatag

SEQ ID NO: 500877 - DNA, 1251 bp, Stenotrophomonas maltophilia
atggacggcgacaggggcagggacggcaccggtggggcgcgcttggggatggaccacctggctgtggtggcactgacgttgctggtgggcggcagcgtgatcgcgctggtgggccagcacacggcggcacaggctggccccgccatcgtactgagcctgttgctggccgcactgggggctggcctggtgctgtgctgcctgcaggatctggtgctgcgactgccggcggccgatggcctgtacgggctgctggccgccagctgggggccacgggtggccgtcgttctgggcacgatcctgttgcttgagctgacggcgaccacggcgggcgcggcacagtccatggcccgccatgtacatgcggtgctggctaccggaggcctccatgccaacgactggctgcccgtgcagatagcggcggccgtgggcctgctgacgttgagcgtgctcgcgttgctgccgccgcggggtgtggcccttgcggcctgtgcgctgctgacggtgaagatcggtgtgggggtgttgctgctggcgctggcggcgcgtcacgtgcactacgggcattggattccctggctgcctccggcgaccgcgccgtatcgcttcgggctggggggcgtgctggcggctgcggtgccgctgctgggcatatttgccagcgtgggcctggcactgggctttcctgcgctgcgccgccagggtgcgatgtggcagccggcggtgctggcgctggtctcgttgctggcgatgctgctgctgatcgtgctggcagcattgcaggccgggctggtcgagttttccgcgctcgccagtacccggccactggccgtggcgctgcaggtgcacccccagctgcagtggatgctgccattgttgcccctggccggggcagcgggcctggccgccctgcagttggtgctgctgatgctggccgtccggttggctacatcgttgtggctccgcgcagctgacgcggcgggacgatcccgcacgcgcctgagcgcaatggtggttgcgctgccggcggtgatgctggtgctggggctaccgcagggcaccttgccggcgctgccgggtccggcaacgctggtggtgatggcggcgctgtgcctggcggtgctgcggcggcgtcgggatgacaccccgcaaggcgcagccggctgcgggctgatgatgtcgatgctggcccccttggcagccgcgctgtgcgtgcttgcggcgttggaacgcctgcgcgcatggccgggctga

SEQ ID NO: 500878 - DNA, 255 bp, Stenotrophomonas maltophilia
atgcagatgcgtcgaatgcaagaagaggaagggcaagcaagaggctttgagtaccgcctggcagaagagctctcaaagctcatcccccagctaacggattgggacatcaagccgcccacgggtgcacagatggcatatgcgacttcgctctgcgcacagttgggcattccactgcctgcagcaacacgtcgatcgcgggcattgatgcagatcttcttggcggaagccaaagcgctccatggccaacgcagctga

SEQ ID NO: 500879 - DNA, 675 bp, Stenotrophomonas maltophilia
atggtcaccaagtctcgatcaatcaatacctcgtggaaggactggcacggacacactcaccacggtactcagacaagatcctatgagacctatcccagggaatacgttgcaccacctggtgaattcctcactgctgtagatacagacagtggtatcgcaatggctactaggatcattgaccggacggagccagaagagagcattgcaaacctcctcaacatctacctggaatgcttccaacacttcgaaatcgttgacccggacctcgcggtgccggtcagggtcgagaagatcaactggcgcattctccctccggggaagttcccgttcgatagagcgatgcaggtattggatagttatctgaagcagttgaccgacagcgaccgcgcagtcgctaagcagcgcatccggaccatcactcgtcacgagcccgacttcatggcagtcggattaggcggtttcagtgagtacatcgtttttgggttcacgggaaggaatcgatacgtgttcgagagtcccgagtcaggcaatgccacttacatcttcaggaacgagtgggaggcggtgtctcagctcaccaaacgccagatccttcaagagcagctgcaggagaccaggatcatccacacctcgcgttgggccgtagaggtctcagaagcaatccaacggaagtga

SEQ ID NO: 500880 - DNA, 2067 bp, Stenotrophomonas maltophilia
atgcccgcagcaagaaaggtcgaaacagcgcaggcagcgaccctgcatccttccttccaagttgactatgacagtgatgtctggacctttgcccagaccacggtcggccaacagaaggagtttgtcacagttgactgggcaatccctgtggcacgcggagagttgctcacggactacaagcacagaggactgctctctgagctgaagtgctacctcaagaccgccatcattgaggacaccgtacgtatgacggttgggtctatccctggcacttacatgggcatgagggagctggtgaagttcatgggagagcgggagatccactccctcttcgatatcaccacggcgatgagctgggactacgtcgaaggtctcgaagagcagtacatgacggcccgaagtgatgccggtcgagacagggcgtggacgcatgcgaccgcctacaaactcatccatccacttacacagatctacgaaatcgcggacagcttgcgcgccagaggcggacaagcaccgtgcgaagcgccgtttgacggaagaaagacctacgacgtcgtgacagagccgctcgggcttgctcgaacgggtggattgatgcctgtcccggacgagatctcggtaccgattctttcctacgcatgtgaatggattgagtacggctcggaggatgtgatcagacttcaggctgaggtcatcccgatgctgatcgacgcaagaagtgctacgggaccgagacgaatcgcctgctttcgtcagatcaaacggcacatcgaggagttccagatgagcccgatcccagggacactgacaccctggcatgagccattggccaccatagatcggattgatgacgctggtgacgagcgcgagattagcggaactcagggcctgagacgcctaatactaatgactcaaagcgcatgcagtgtcttgctgcagggatgcaccgggattcgagctcatgagctgattggcctctccctggaccacgatccgacgctacagcacggtgtggtcaagtcagtgacgtcgctagacggactaatggaggtgttctccatctgtggcatttccgccaaaagggaagcgactcgccatgagtggactgccggactgcgcccgttgggcacgaatcacctgccgatcgtgctgaaatccgtcgaggtgctggtgcggctaatggagccttggcgagcactatcgggcactaagtcactgatgctcagcttctcccacgccaagtcccttccatcgggtcccgatggaatcggccgaatgacagcatccagaaattctctgctgcaacgtgagtttgccgtcgaagccctcacgaagaagcgtggcatcgaaacgacgcaagctgtttacgaggtgaggtacctacgcccgcagcgatggaggatcacctttgcgcactatgtgttccgatccaagccggaactaatgccagcgctacggacgcacttccgtcacatgagcgagcagatcacggatcaagggtacattggaaacgatgcggctctgctcgagaacttggaaggagagagagtcatggagacctctcggttcctagttcaaatcaccctcggcaggccgatcggaggtggaccggcgcagcgtcttctcatgcagcatgccgaatcaatgaccgaggcactgtccaagatggacggagagacgccgatcgataaggccgtggcatacgtgaaactcaccgacctgcggatatggacagggacctacgcaagttgcctgattgatatgttgcctgaccgttccagctgcaacccacaagcaagcctcctcactgtccgcgcctcgccgaacttcggcctacggtcgcccggcctgtgcgcggggtgcaagtgctgcatcatcctgccagagcataaggacttttgggaggatcgcctcctgaaaaatcaggccattgtccagatggagcggaccaactctagggatcagtattccaagattgctatgagccgtgttgttcagagtcgagcagtgctgaggatgatatccaacgctaccggggacgcttccgatcgttccggcgaaagttga

SEQ ID NO: 500881 - DNA, 1254 bp, Stenotrophomonas maltophilia
ttgaaacgcgcgggggtgcccagctctgcctatcggctgtcgacgattgatggattcgctatgcgtctcatcgccaagttcccggcgcgcagtggccatcatccccaactcttggagctcaacaacgcgggtagcgactaccccgcgatccgtgaatcattccggcaactcttggactcggggcatatcgctgcacccatcgcagccacttacgcccggcttttggttgacgagtatcaggattgcagcaccgttcagcactccatcgtgtccaccctcgctgcgcttttgcccacgtgcgtcctcggtgaccctctgcaggccatcttcggatttggcggaaatcggctggttcactgggaacaagacgttcaatcgtccttcccagcagcgggtagccttcgaaccccttggcgctggcaaattgcaggtaatgaagagctgggccagtggctgctatcccaaaggcatgctcttacggccggcttacccattgatctaactacggctccgtcatccgttcgttggatccagctggttgccggtagtgaagtgcagcaaagattgactgcggcacggaccaatgcgcctggtagccaaggaacggttctggtaattggcgagtccatgaatgttcaaggccgccaccaactcaccagccaaacgcctggggcaatggcggtagaagccgtggacatgcgagacctcgtcaacttcgccaggcaattcaatcttcaggctcctagtgcgctgcaagacttggccaccttctccgctctcatgatgacgggcgtcggcacggcgaatctagtgacgcgtgtcggtaccattcgtagagggagagccaggacacctccaactcctgtagaagctgaggcagtcgcctttgagtccgagcggaccatgacgcgcgccttgcggctggtggacgctttggccgaacagacaggcactcgggtctatcggcccgagattctgcactgctgtcgatcagccatgcgaagcgttatcaacggagagcaagatctattaggagccgcacttcatgcccgcgagcgaaatcgtcacctcagccgccccattgcgcgcagagcagtcggcagcactctccttctgaaaggtctcgaggcagacattgccgtggtcctctatccggagagcatgagcgtgcagaacctctatgtagccctcacgcgtggtgcgaaagggctggtgatctgctccagtaccccaacgctgaccccgaccccatag

SEQ ID NO: 500882 - DNA, 1728 bp, Stenotrophomonas maltophilia
atgcctcgaattcgccatttggccattcggaactttcgatccatcaaggcgctcgactggtcgcccgccccgggcatcaactgtttgatcggtcctggcgatagtggcaagtccaccatcctcgatgccatcgacctgtgcttgggtgctcgacgaagcatttccttcggcgacatggacttttttgacctcgatgtctcagagcccattcgtattgccgtgacattcggggaactgccggcatcgctgatggacattgatgtctatggcgacttcttgcgaggattcgattcggtatttgacaccctagaagacgaacccgccgcggggttggagacagtgcttacgctgctgcttcaagtcggggcggaccttgagcccagctggacgctgatctccgataggtcgcttcaacaaggcttggaacgaagcctgccttggaaagaacgcatcgtgttagctccggcacgcatcggcagctttacaagctccaacttatcttggagccgcgggtcggtgctcaaccggctaacagacgagcgcgcagaattgggagcccagctcgctctagcagcgcgtcaggcgcgcgccaactttggcgctcaagcatcgccccacctgagtcagacactcggaatcgtccggacaactgcccagagccttggagttgacgtcggatcgatgccgcaggccttactcgactcgcactccgtctccatcggcgaaggcgccatcgcgcttcacagcgaggcaggcatcccccttcggtcccttggtacgggttcttctcgactcttggtgacgggacttcaacgggccgcggcggagtcagcgccgattgccttggtggatgaggtggaatatgggttagagccccatcggctcatgcggctgctggattccttgggagccaaggagacgccgccgcctctccaagcgtttctcacaacacactcccctgtggcacttcgtgagctttcaggtgagcagctgcttgtagttcggccacgaccggctggccatgtcgtcatttccgctggctcgaccgacgagattcaaagcacgctgcgcactgacccggaggcctttctggcgaagtctgtgattgtgtgcgagggagcaagcgaggtagggtttgtgcgtggcctcgatctatggggggtagccagcaaagaatcctctttcttggctttaggtggtgcatacgtcaatgcaggcggaggcactccggacaacgcttttgcccgagcgactgcgcttatggatctgggttaccgagtcctcgtcttcatagacgctgacaaacctgccgctccaggtgttgcagaagcatatcttcaatcaggcggcagcctcgtgacttggcgggcaggaatgacgttggaggacgagctgttcctctgccttcctgacacatcgattgatgccctgctcctgaaggctaaagagcgtgttggcgaagatcttatgaaccaacagctggttgccaaatcgaacggtctaacaactttggcgtccatcgaagcgctgaggccgaattcaccctatccgcctgatattcgcgtactgcttggcgaagtctcccgtatcaaaaagaatagctggttcaagtcgcttacgacttaccagtcaatcgtcctggatatcgtctctcggggctacgcaaacgcggacgctagcttcaaggcagtagtagaccaactctgggcctttacccgtgctgcctga

SEQ ID NO: 500883 - DNA, 1335 bp, Stenotrophomonas maltophilia
atgctcgaagtactgagtcacccggcgtttcggcgcctgtttggtgcccagatagtcgccctggtcggaaccggcttggcgactgtcgcccttgccctcctggcctacgacctcgctggcagccaggccggagcggtgttgggcaccgcgctggcgatcaagatggtcgtgtacgtgaccttggcgcccgtttcaggagcgttggtccctgcacggctgcgcaagcgggtgctgatcgcactcgatctggttcgtgcggttgtggcggtctgcctgcccttcgtcaccgagatctggcaggtgtatgtcctcatcgctgtgctgcagtcggcatcggcatgtttcacgccgctgtttcaatccaccatccccgaaattcttcaagaagagcgtgattacacccgtgcgctctcactttcccgattggcatatgaccttgaaagcctgctgagcccggcgcttgctgccgcactgctgacgatcattagcttccacgggctgttcgctggtacctcggtaggtttcatcctctcggcgctgctcgtcgcgtccaccaccttcccggccctcgctgcggtctcttccaaggacggtccctatgcccgagccatccgtggaatgcgaatctacctccgcacaccgcgattgcagggcctgctcgcgttgaacctctgcgccgcagccggcggcgcgatggtgttcgtcaatacggtggttatggtccgcaccgttctgggcggggcggaggagcaggttgcatgggcgctggcggccttcggaggcgggtccatgctggtcgcacttcttcttccgaaggttctcgaccgcatttcggaccggacagtaatgttggctgcaggactgttcatgtcagttgtcctggttaccttccttggcgtctggtttgccctgaagggacatcccgggtggacggcggtcattccggcctggacgctgctgggcatggcgtatgccggcttggttacccccggcgggcggctgctgcggcgttcggctgagtccgccgatctaccattcctcttcgctgcccaattttccctatcgcatgtttgctggttgatcgcctatccactcgccgggtgggttggtgcgcgctacggcttgcatgttgccttggccgccttggggattctggccacactcggtttggtcgccgcgtggcgcagatggccggcgcacgatccagaggagatagcgcataagcacgaacatcttgctgaggacgacccgcacctcttggcacaccgagacgtggatggcacgcaccgtcaccggtttgtcatcgatcaacttcacacacgctggccaggctga

SEQ ID NO: 500884 - DNA, 240 bp, Stenotrophomonas maltophilia
atgaaaactcatagcgcagtaattgccggcctgcttttcagcatgtcccttttcaccacggcatccgctcatgatcctgccctccatgccgatccggctcccccggctgctcccaaggccaagccgacgacttgcgaacagcttgccgaccgttcgaagtacaaggtggacctcaaggatgcccagaccaaggcgctgaaggaacgttgcgacgcacaggcagctccgaagaagaagtaa

SEQ ID NO: 500885 - DNA, 639 bp, Stenotrophomonas maltophilia
atgtcaatcactatcaatcaaccacttcccacgactggccgcctgctgaagtcgacccttgtcgctgccgccattgccggcgcgcttctcgttacggccgttctgccggcggagtacggcattgatcccaccgggatcggccgagcgctgggcctgactgccctggcagacggcggaagcaccgccgcagacccggctacgccgacgtcctcgacagcatcggacgcagcgaccaccttggcggaaaaggctgcggctgcgttcggggcgaacaaggggcaatcgcttgatccagccgcggtatcgctcaccaacggtgagcttcgccaggacgcgatgacgatcacgctggagccggggaaaggcaaagaggtcaaatcccacatggctgctggcgcgggaattctgttcagctggaaggcgaccggtgatgtagcagtcgatatgcatggtgagcggcccgacgtgaagggtgcatggaccagctacgccgtcgaagctgcgcagcgggaggcgcacggcaccttcgtcgcgccatttgaaggaactcatgggtggtactggcagaaccgaagcgacacgccggtgaccgtgagcatcgaacttgtgggctaccaagccgacatctatcagccgtaa

SEQ ID NO: 500886 - DNA, 732 bp, Stenotrophomonas maltophilia
atgaaccacccgtcccctttctgcacaaggaacttgtctttgacttcttccaacaagctctttgcttggctttcgatgcttgccgcagtcctcctgccgtttgcggcgttcgcgcacggtgtaagcgagggagaccaggccttccttgaagaaagcaccggtaggcaactgatcgcgtttacctaccttggcgccaagcacatggtgactggatacgaccaccttctatttctgttcggggtgatcttcttcctataccgcatgcgggacgtgagcatctacgtcaccttgttcgccattggccacagcacgacgctgctgctcggcgtgctcggcggctttcatgtcgacgcctatctggtcgacgcgatcatcggtctctcggtggtctacaaggccttggacaacatgggcgcgttcaagcggtggttcggcgtgcaacccaacaccaagattgcagtccttgtcttcggcttcttccacggcttcggcctggccacgaagcttcaggacttctcgctatcgccggacgggctggtccccaacatgcttgcgttcaacgtgggcgttgagctcggccaacttctggcgcttgccggcatcttgatcgtgatgggcttctggcgtcggctgccttccttcaaccgccaggcctacggcgtgaacaccatcttgatgacggccggcttcgtgctcatcggcatgcagctcaccggctacttcgcttcctga

SEQ ID NO: 500887 - DNA, 3138 bp, Stenotrophomonas maltophilia
atgctagagcgaatcattcgcgcgtctatcgcgcacagatggcttgtgctccttctggtcctggccctctcaggccttgggatctggaactacagcaagcttcccatcgacgccgttcctgacattaccaatgtccaggtgcagatcaacaccgaagctccgggctactcaccgctggaggccgagcaacgggtcaccttcccggtcgaaacagcgttggccgggttggcaaagctggaatacacccgttccatctcacgctacggcctgtctcaggtcacggtcgtgtttgaagatggcacagatatctacttcgcccgtcagcaggtcgcagagagacttcagcaagcgggatcccaattgcccgtgggactaaagccaagccttggaccggtagcgacgggcctgggtgagatcttcatgtacaccgtggaagcggagtccggtgctgaagagacgtggacaccaatggcgcttcgtacgctgcaggactgggtgatccgaccgcagatgcgccacttgaaaggcgtaaccgaggtcaacaccgtcggaggctatgttcgccagtttcacatcacgccggacccgaagaagctccaagcatacggactgacgctgcaggatgtgctcgaagccgtggcccgcagcaacactaacgtgggtgccggctacatcgagaaaagcggtgagcagtacttggtacgcgtgccgggccaagtggccgacatggcgggtttgcgcaagatcgtagtggctaaccgtgatggcatgccattgcgtgttggcgatctggcagaagttgtagaaggcaccgaacttcgtacaggcgcggcaaccaaggatggcaacgaagtggtccttggtacggcgttcatgctcatcggcgaaaacagccgggacgtggctcagcgaaccgcggccaagctcaaggacatcgacgctacgctgcctgacggcgttcgggcgcatcctgtgtatgacagaaccgaactggtggatcggaccatcgagacggtgaagaagaacctcctcgaaggcgccttgctcgtcatcgcggtgctcttcctgcttttgggcaatcttcgtgcggcactgatcactgcggcggtcattccattgacgatgctgctgacgatcacaggcatggtccagaatcgcgtctctgcgaatctgatgagcctgggcgcactggattttggcttgatcgtcgatggggcagtcatcatcgtagagaactgcctgcgtcgctttggcgagcggcaacaccttcagggccgtttgttgactcgggaagaacgattttccttggcggcaagtgccagtgcagaggtgatcaagccaagcctgttcggccttttcatcatcgcggcggtctacatcccgatctttgccctctccggcgtggaagggaagatgttccacccgatggcgcttaccgtggtcatcgcgcttaccggtgccatggcactgtccttgacattcgtacctgccgctgtggctcagttcgtaacgggaaaggtttcggagaaggaaaccaaagccatgcgccgagtcaccaacgtgtatggcccgatgcttgagcgtgccgtcaatgcacgcaaggtagtggtggcctctgctgcggtgctcaccgtcctggcgggcctgcttgcaagtcgcctcggcaccgagttcattccgaacctggatgagggcgatatcgccttgcatgcgcttcgaattccagggaccagcttgacccaggcgatcggcatgcaacgtcagctggaagcggcgatcaaacagttccccgaggtagatgaagtcgtcgcaaagatcggcactgccgaggtggccaccgatcccatgcccccctccgtagccgacaccttcatcatgctcaaagatcgggaccaatggcctgatccgcgcaagccgaaggcacagcttgttgccgagctcgagaaagtggttcgcgccattcctggcaacaactatgagttcacccagccggtgcagatgcggatgaacgagctcattgcgggcgttcgggctgaggttgctgtcaagctgtacggcgacgacctggagcaactggcaaccatcggcagccaggtagagaacgttgccagtgagatccagggagcggccgacgtgaaacttgagcagatcaccggtctgccattgatgacgatcacgccggacctggatgcacttgcacgatacggcgtagccattgacgacgtgcagaagaccatctcggtggcgctgggaggtgaatcggtcggccaggtgttcgaaggcgatcggcgcttcgatatcgtggttcgtctgtcggagaaccttcgccaggacgtccggacactggcgtcactacctgtggccgtcgcgcccggggtgagcacaggccaagagcgcagcttcgtgccgctgggccagttggccaaggtcgagatcgcgcctggtccgaaccagatcagccgtgagaatggtaaacgcagggtggtgatcacaagcaatgtgcgcgggcgcgacttagggtcctttgtcgaggagttgcgcaccaaggtcggacaggaggtccagctgccggaagggtactggatcgagtacggcggcacgtttgagcagttgatctcggcaagcaagcggctgtccgtcgtcgtgccagtggttctggtgatgatcttcggattgttgttcatggcattcggctcagggaaggacgctgcgatcgtattcagtggcgtgccgcttgcactgaccgggggcgtggtggcgctgtggctgcgcgacattcccatgtccatctccgcaggtgtgggcttcatcgctctttcgggcgttgccgtgctcaatggcctggtaatgatcagcttcatcaagaacctgcgggaagaaggcgtccccctgcacaaggctgtcaccgaaggtgctcttacccgcctccggccagtcctgatgacggccttggtggcgagtctgggcttccttcctatggccctgaacgtcggtgctggcgcggaagttcagcgtccgctcgccactgttgttatcggcggaatcatctcttcaacgctgctgacacttctcgtgctgccggcgctgtatcgattggttcaccgcgaagattctgttctggaaagtcgctcctcatga

SEQ ID NO: 500888 - DNA, 1236 bp, Stenotrophomonas maltophilia
atgaaccgatacgtattcctgatcctgcttccaattgccctggctgcgtgcggtggcaacgaatcgtcgcaacgagcaaagccagaggacactgctgcgaccgcaggcgactatgagcgagggccgcatcgcggtcgcatgcttcgcgacggcgacttcgcccttgaagtaactgtttacgaaaccaataccccgcctcatttccggctgtatgcctatcgcaacgacaaaccgctggcacctggagaagtcaaagcgacgatacaactcaagcgtctggacggcgaagtcaacaacttcagctttattccagagaaggactacctggtcggcagcggggaggtggtcgagccgcattcctttgatgtcaaagccgatgcggtggtgggtggaaagaactacgcctggtcttacgcctcctatgaagggcgcaccacgatagatccgaaagccgctgccgacgcaggtgtcgtggtcgagtccgccgaaccggggaccatccgggacaccgtttccctcatgggcaacgtcgcggtcgacaccggccgatttgctgcggtcaaggcacgcttccctggcgtggtccgcagtgtggcggtcgagatgggacaacgcgtctcggctggtcagacgttggccacagtcgagggcaatgacagcatgcggacctactccgtcacggcacctttcagtggagtcgtactcgcgcgcagcacgtcggtaggcgatgtcgctgccgacaacacgctgtttgaaattgccgacctttcggaggtctgggtggacctgcgtgcgctgggaagcgatgccgagcgactgtcgccaggccagatggtgaccattcgctcggcaacaggcggtttggaagcaacgggaaagctgcagggcatccttccgttggccagcgctggccagaccgtggtggcacgtgtggcccttaccaacagcgagggcaggtggcgaccaggaatggccgtatccgccgaagtcgtcatcgcggaaacggaggttccattaacagtaaaggaatcgggcctgcagcgttttcgggacttcaccgtggtattcgcccaagtgggcaacagctatgaggtgcggatgcttgaactgggtaggcgcgatggcgatcgcgtggaggtactgaaagggcttaagccgggaacccggtacgtttccgagcagagctacctgattcgtgccgacatcgaaaagtccggcgcaagccacgaccactaa

SEQ ID NO: 500889 - DNA, 1251 bp, Stenotrophomonas maltophilia
gtgaaattacgtagtttgtgggcgctcgccatagccggcgcctacggtgtggccgtgcctggccatgccgctgaagtgctgcgcttggaggatgtggtcgcccgcgccctcggcacccatcccagcgtccaggcagacaccgctcgactggaagctgtcagaagccgggcgggccgggaggcattgcctacgccgctcgtgctgggcggcgagcttgaaaacgtggctggctcaggcggcctgagcggcctagacgccgccgaatccaccttccgcatctccaaggttctagaactgggtgggaagcgggctgcgcgccaagcgctcggcggcgccgaggtggacgctgcccgaagcgaagcggacgtcacccgtatcgctatcgcaactttggccgcagggcgtttcgtcgacgtgctggccgcccaggagcatgtcgagcacgccgaagagcgcatcaaaatggccagcgccatgcgccgtgaagtggcccgttgggtcgcggccgcccgcaatcccgactcggacctgagatccgccgagatcgccctgctcgatgccgagctgaagcgggagcaggcattgcaggctctggaaagcgcgcgaatgtcgctggctgccacgtggggggcgccaagtccggatttcggctcggttgcaggggataccgcggtccttccccctctggatgattttgatgatctgagccggcgcctcgccacgacaccacaacagcgcgccttggacgctcaagccggagttatagatgcaaggagggagatcgcccgcgctagcgccaagccggatgtcagcgttggcctcggcatccgccgactggaagccaccaaggacagcggcctggtgatgtccgtctccgtcccgttggggagccgtcggcgatcggacttctccgtggctgaagcggactacgaactcacctctctcaaataccggcgccaggcgcagatgctggaaatgcgtcaggagctgtttggcatctaccaacagctcaagcaagcgcaatcggaagtggagtcagtgcgccagcgtcagttgccaaaggcccagcaggcctttgatcagagccgcaggggctttgaggaaggacgcttctccttcctggtactcagccaggctcagcaaaggctcttcgatcttcgcgaacgggaagtcgaagccgccgcgcgctatctccgtctcctggtcgaggccgaccgcctcaccgcttctgccttggacattcgcccatga

SEQ ID NO: 500890 - DNA, 183 bp, Stenotrophomonas maltophilia
atggaaagcttcttcgggacgctgaagtcggagttcttctacctgaacagctttgacagcatcgaaagcctggaggccgggctggtggagtacatcaagtactacaaccaagagcgaatcagattgaaattgaaggggctaagcccggtaaagtaccgggaacaggcccaagcagccgcctga

SEQ ID NO: 500891 - DNA, 240 bp, Stenotrophomonas maltophilia
atgcagcgcgaaccgggcaggggccgcgtcggcggcgaaggaagcatcggtcgctggagcgcgacggacgtgcacgttactgaacgcgacgtcatggttctgttaacgaatatcgattgggggcaactccggaggcgggcggtctatgctctaatgcacgccaagaagcgggggtaccgcggccaagtggccacggttgagacagtcccttggaacctgatccggctcataccggcgtag

SEQ ID NO: 500892 - DNA, 492 bp, Stenotrophomonas maltophilia
atgaactggaaccgcttgggctgttgtgccttgctgctgctggcgccgctgcccgcgttcgcgcgcgggttgcatgtcaacctgattgactatccctccgacgaggccggatgggaccgtgcctttgcgctggaggacgcggtcgccggcgaattcgccgcatggtgtgccgacaccttgtgtgaaggtgattacagcaactaccgggtgatggagttccgctgcgccgtgctcgcccaccgcggcaccgtgcagcgctgtgtctgggtggtggccgccagcgagctggaggttgagcccgacacgggacacgtgcggatcgacaacgggagctgggtctgtccggtcgaaatgcagcccggggtgcccgtcgacgcgttctacgcctccctggaagcgccgggcggcctgaccgcgcctttgcctgggcttgaccacggcatcttcgatggcttgcctgaatgcctgcgcacgcaggggagggtgggctga

SEQ ID NO: 500893 - DNA, 492 bp, Stenotrophomonas maltophilia
atggggagcttccgtagatgctggctgttgtgtggcgtgctgtctgtcagcctgccgtgcgccggtgtcgcgcaggctgcgcctgcgttcgtcgatgcgcgggattacgccggcccggggggcggccacgagcgtttccttgctgccgagcggcaactggtgcgtggcttcgatgaggtatgtggcgataccttctgcgagggcgagtacatcaatctgtgggccatgcgcctgcgctgttccgtggaccaggccgcgggggtggttgtccagtgtgtatggaccttcgccggtagcaacaccagggtaaagtccagcggcctgatcacggtcaaccgcggacgctatgcctgcgtgctgccgctggcaaccggaacacgcctggaaaccctgttgcaggtgtgggaaacgggggaggggttcgatgcgttgcacgcgccgctgcccggcacgactgccaatacgtacgacgcactggttgattgcctgtag

SEQ ID NO: 500894 - DNA, 768 bp, Stenotrophomonas maltophilia
atgcgcgccctgatcctgcttgcccatcccgaaccccgctcgttcaacgcctacctggccgcgcaggccgccgaacagctgcgccatgacgccctgcaggtggacgtggtcgacctgtatgcggaaggcttcgatccactggaagcggcccatcatcattcaaggcgcctgcagcccgagcgcttcgatgcccagcgcgaacaacgccacagcgccgaactggagcagttacccgccgatgtgcgacgtcacctgcacctgctgcgggtcgcagacctggtgatcctgcagttcccgctgtggtggttcgcggcgccagccatcctcaagggctggctggaccgcgtgctggtatatgggccgatgtacaacagccgtcagcgccacgaacatggcgtgatgcagggcaagcgtgcattgctgagcgtcaccaccggttcatcggcacgggcatgcgcggtggacggccgcgaaggcgacacccgattgctgctgtggccgttgatgtacagcctgcgctacgtcggcttcgaggtgatggagccatgcgtggtgcatggcgtgcgttccgggcttgcagcggaacgcgtgcaggcccacgacgaagcactggttgcagccaccctctcctaccgcgagcgactgacgtactggcggcagtggccaatcgtgcccttcaacgacagcgatgacttcgaggatggggtggtgctgcgcgcggacgcgatcgcgcacagccccttcatccgccaccgcgacgcgggatga

SEQ ID NO: 500895 - DNA, 195 bp, Stenotrophomonas maltophilia
atgattgatttcagtcacggattcagccgcagagatgcccccggcagcaatgccaccgtgacgatcgcgagccttgtgcggcaagcgatccgcccgggcaatgcctccccggcgcgtcaaaaatccgtctccaagggtggcacagcgctcccggcacgttccataatcgagaaacctgccacccaggaaggatag

SEQ ID NO: 500896 - DNA, 747 bp, Stenotrophomonas maltophilia
gtgtacgagatccaggtcgataccgtctacgagaacgcgaccaaaccgaatcgattggtcagaaagtactgggtgaactgctcacggaacaccgtggccatcaggacgagtctgatccagtggcgcgatcggccaatggagaacgaccctccggataagttcgaaccgcgaaccgaggcgattgctccttggcaggtgcaactggtgcgttttgcctgtctcgtggggcctgatcccaaggccaaggtgccggcggaaatgatgaagcgtggcttcctttccatcggtgacgtcgggcaatcgcctgtggatttcatctggggcagcctgtggaaggacggcaagcgcccagcattcacctatcggccgaccgacgctgaaatggatcgtactgtgcgtagcctggaagcgactgtggcgcgcggccagaatgaaaccagcagagctctggatgagtcgcgtcgcgcagcgaaccgggtgggtcgcaacaatctcatggagctgtggatcggcaagacagagcaggaattcgtgcggacgtggggcccaccggatcgtgtggagattggggccgatggttcgcgcaccttgtacctgcatcgtggcgagcgtatgcagggattgaatgcttatgggcatgtcgtcagtgacgtcaaccatcgatgcgatatcacggtgctgacgatggacggctacgtccgtgactacgccacacagggggctacatgcgcgcagcagttgcgctga

SEQ ID NO: 500897 - DNA, 267 bp, Stenotrophomonas maltophilia
atgaagaagtcgcgtttcaccgaggagcagattgcctacgcgctgaagcaggcggagctgggaacggcagctggcgagatctgcaggaaaatgggtattgccgaggcaaccttcaacgtatggcgaaataagtacggtggacttggccattcggaattgaaacgtttaaggctgctggaagaggaaaaccgaaagctcaagcaattggttgctgatctcagcctggacaaagccatgttgcaggaggtggtcacaaaaaagttctga

SEQ ID NO: 500898 - DNA, 288 bp, Stenotrophomonas maltophilia
atggacttcgtcagcgacgcactgtttgacggtcgccgtttccggatgctgaccgtggttgattacttcacgcgtgagtgtcttgccatcgtcgtggaccagtcgctacgcggggagcatgtggcggaggcaatgacaaggttggcagcccagcgaggatcgccgggcgcagtcaatgtggacaacggcagcgagcaggacaagttcacagttgagtcagaacttctcaaacaagggctcactgcagtcggtgtacttaaccacgcaagccctccccccgttatctaa

SEQ ID NO: 500899 - DNA, 714 bp, Stenotrophomonas maltophilia
atgcaagtggcgctgtcgagcattgatggcatcaagatcctgaatgatccagggttgcaggcggacaagacccgggcgctgtggttcatcggcctgggcactggcggcccggcggtcaccgctggtgcgatgttgctgctctacgaggtcgcgctggcgctgttcatcggcttgggtcccttgttcattctgtgtctgctgttcgaccagaccaagcagctgttccagcgatggctgttctacggcatcggcacgatgttcttgatggcggtactggcagcgatggtatcgatcgcgctggacatggtgatccgtgtctcgaccgcgttctggtccaccgccctggtcaacaagttcctgctcgaaggcgcctccagcgacggcatgaccagccaggcgatgcagcagggcggcatgggcctgattctcacaaccctgatcctgaccgctcccccaatggcagcgatgttcttccaaggaaccttgggcagcttcatggcatattcgcagataggtggcagcccggtggcgcaggcgccggggcccagcgggcagccgccgggtagttactacacgccagcgacgccagagaagggacgaactgtcgactccggtgactacagtagtcagtcaacaaaccgcatgacattgccgcagtcggatgcgacaaagattgcggaaactggccagcgagctgctcattctggtagatag

SEQ ID NO: 500900 - DNA, 1155 bp, Stenotrophomonas maltophilia
atgacgatcaggtggctggccaactttgatttctcaggcggattgcaggatctgctgggctacgctgtgcgtgtccagtcgatcggcgatttcgtcttcttcaagctgatcatggattacctgcgcgacaggatcagtgactacggcatcgacctgatggggcgcatgatgtcctgggtcggtggcattgccctggtgctgatgacgctgtgggtactgatccagggcttccggatcgtcaccggccgcagccgcgactccatgatggtgctggtgaccaatatggcgcgcgcggcgttgattgtgagcgttgccaccagcatggcgatgttcggcagcaacctgcagaaattcctcaacgaggacgtcaaaggcctgatcacccacgtggtgaccggcaaggaccagcagccggaagaccagatcgacaagagcttggcctggatgcaggtggcgctgtcgagcattgatggcatcaagatcctgaatgatccagggttgcaggcggacaagacccgggcgctgtggttcatcggcctgggcacgggcggcccggcggtcaccgctggtgcgatgttgctgctctacgaggtcgcgctggcgctgttcatcggcctgggtcccttgttcattctgtgtctgctgttcgaccagaccaagcagctgttccagcgatggctgttctacggcatcggcacgatgttctcgatggcggtactggcagcgatggtatcgatcgcgctggacatggtgatccgtgtctcgaccgcgttctggtccaccgccttggtcaacaagttcctactcgaaggcgcctccagcgacggcatgaccagccaggcgatgcagcagggcggcatgggcctgatcctcacgaccctgattctgactgcgcccccaatggcggccatgttcttccaggggaccttgggtggtttcgcgccatactcccagatcggtggatcggcagcgggccagccgggtccacagggccagccgccgggttcgtatacgccggcagcgccttcgaataatgacgtgcggcagaccgaggttcattcaggaagtatggtgaggaactcgatgcctccgagctcgaccggcgaagcaagaactgccccgagtacgataggtgctgccagatctaatgattag

SEQ ID NO: 500901 - DNA, 246 bp, Stenotrophomonas maltophilia
atgactctgcagtcttcattccgcgccaccctcactgccatcgccctggcgtcgctcagcgcctgcgccacctatgacgacagcgccatgcatccggcctgccaggagtcaccccatctgaaggatctgccgcgcgaggtcgctgcccgcgagagccgttgcaacaagggtgtggaagtgtggtcgagcgagcgcggcggcagtgacaagccgctggacctgagcggaaagaaaaaggatctctga

SEQ ID NO: 500902 - DNA, 210 bp, Stenotrophomonas maltophilia
atggaaattgactggtaccagatcggaaccttgaagcacatcggtggcggctacgatatccggacggatccattgaacatcctggtgaccactgcgaagcaagggcacgagggcgaagtctctgacatgcttatcgtgatggacgatggcaccgtcattccaccggacgggatcatgcgtctggcacgggcgcctggccggatccgttag

SEQ ID NO: 500903 - DNA, 2751 bp, Stenotrophomonas maltophilia
atggaatggcgcccctcgggctggggccaacgtgtgacacgctcgccacactggcggttgcggctggatggcgaatgcatcgagctgaacaccgcaggccaacagtaccggcagcgcgtggatgacgatcacagcgtgcaggtcattccagggtttttctgggccagcgtttcattgcagaccgacagcggttccgtgtccgtgggcggcctgcccaacgggcaagcgtcccagcttgcaggggctgtgcggggcctgctcttcgcgcgcagcacgcgcgggcgcaaggatctgttcgagaagatcctcgaacagatccaagcctggttgagcgcggcggacgcactgactgatcgaggtcacgccagccgacgctggatcacccatgagcagcagcaggcgttgctggctgatcggcctgccctgccgctctccccggatgagctggagagtctgttcctcgatgcgagcgtgcacggcgacctgcgctccagccgccatctggccgcgcttgaggcactgaatgactggcacctggattggcccgccatctgggccgacgccaacgcgaccatggcaacgcgtgagcaggtgctggccaaggacttcctcgaccgggtcgagagcaagcccctgaccgaggaacaggcccgcgccgtcttctgcttcgacaaccgcgtgcaggtcgtggccgcggccggctccggcaagacctccacgatggtcgccaaggcggcctatgccatcgaccgcggcttcgtcgaacccgagcggatcgtgatgctcgccttcaacaaggacgctgccaacgagctggaggaacgcgcgcgacgatgcttcgaccggctcggcatgggcgacatcgtggtcgaggcgcggaccttccacgccctgggcctggccatcatcgccaaggccacgggacgcaagcctgatatcccggaatgggcgatcgacgccacgctgggcttcaacaagctggccgaactggtggacgacctgaaggaccgttcgacccacttccgcacccagtgggacatgttccgccttgtgttcggacgcgatctgccgccgttgggtgccgacatgatggccgatggttacgaccgcgatggcacgccctacatccgcaccctgcagggtgagcgggtgaagagccaggaagagtgcgtgatcgctgactggctgttctacaacggcgtgacctacgactacgaacggcgctacgaattcgatacggcgaccgacacctatcgccagtatcgccctgatttctattatccggacgccgggctgtatcacgagcactttgcgttggatgccggtggccagccgccgaagcatttcgccaactacgcagaaggcatgcactggaagcgcgagcagcatgcggcgcgtggcacggctcttgtcgagaccacctcgtatggcctgcgcagcggagacgccctgcgccatctggccgagaggctggacgactacaacgtcgagctcgacccgaacccggaccgcgaactgcccgaccagggcgccaaaccaatgccggatgcagacctgatcggcctgatgcgcaccttcattgcgcatgccaagagcaactgcctgacgctggatgacatggccgcacgcctgcggcagatgcccgaagaccagttcaaggaacgctaccggcgcttcctggaaatcgccgggccggttttccaggcctgggacaacgcactggcggacgaacgtggcatcgacttcgaggacatgctcaacatggccgccgggctgctggaacagggccactatgaatcaccctacgatctggtgatggccgacgaattccaggatgcctcgcgcgcccgtgcgcgcctctgccgtgcgctggtcagccaaccgggccgctatctgtttgcggtgggcgatgactggcagtcgatcaaccgcttcgctggcgccgacgtttcggtgatgaccggattccgcgaatggatggggcatggccaggtgctgaaactggagcagacgttccgctgcccgcaagcactgtgtgatgtttccagccgcttcatcagccgcaatccggtgcagatcaccaaggaagttcgctctgctgcgccggcaatgggacctgtgctgcaggcgttccagatgaaccggcgtgaggaggtgcaggatggtgttcgccaataccttgcgacgctgcaccagcaactgctgtcaggtgcagtgccgcagggccgcaacgggcgcgtgactgtattcattctggggcggtatcgcgcggaccgcagcgcgatgcctttggattggaagacggcctttggcagcacgatggaggtcgagttcctgaccacccatcgatcgaaggggcgcgaggcggactacgtgatcctgccgggcatgatcaaccgcagcttcccgagcctgcgcgcggatgacccggtgctttcgctggcgatgccggatggggatgcctatccgctgagcgaagaacggcgcctgttctatgtcgcgcagacgcgtgcgcgacgttcggttgcgatgttcaccctgcagggcaagcactcgccattcctggatgagctggtgaaggacggcgccgtggaagtgaccgcgatttcaggcgcggccatccacgaagagcgctgcccggtgtgcaaggtgggcgtgttcgtggaccgcaatgggccacatgggcctttccggtcgtgctcgagttatccgttgtgccataacaagccgaagggcgggcgtcgtgggtga

SEQ ID NO: 500904 - DNA, 486 bp, Stenotrophomonas maltophilia
gtgcgcactgccctcaccgtcaccgtgagcttcgcccaggcggagatcgactactcactccggctgctagactttgccgacattcaaatggacgaccccatggaacggtggtatctggcaacactgctggcgttggtcctgcaccagattgatgcagcgttctggcacgagtgggccctgttcggcgttcctggcggcatccaggggtttctggctttcaacctgatcgctgtgggcgccctgctgcatggctatcgccaggttgtgctggccaagccctccgcgcgggcgtatgccagcctgtgcgggacagttggcgccggcaccgccatgattcatgtgggcttcgccgcggccggtcgtgacgagttcctgcttccgctctccatcgcaacgctggcggcctgcctcgtggccggcgtcgggctcctcatgcaaggccgccgtgctaccccggctcgcgtgcagatcgatggcgtggactga

SEQ ID NO: 500905 - DNA, 762 bp, Stenotrophomonas maltophilia
gtgcagcagttcttcatcgtcgcggtgctgtacggcttcgccatgctcctgcctgcttccaatcacgcgaagatcctgcgcaccgcaatgggcgcgggcgggcacgccgccatggccgcgtcgttcggtatcgccatcggtacgggcgtcatctgcgccatggctttcgttgcagcggccatgctgggaaaccgcggcctgtggacgctggcgatgcagtgcacgggctgcctcctgctgttgcgcctggcgggcatgtgcctgcgcgatgccgggctgaccaccctctctccgctttccctgcagataccctggggcctgagggcccgctcccgttggccgcacgccgaggctggatgcctgttggcgctcgccagcaccagcaactggatgctgcagttcgcggtggctgccctgctttccggcctcgttgccgacactggcaccaaggccgcttacgtggccggcctgagcggcgtcgcgctgtcgctcggcctgctgatggcatggctcggcagccatctgcgctgggcacggaggtattgccgactccttccgtggctggagcatgccgcaggcctggtgaccggggcggtgtcggtggcgtacctggcaggagcattgggtaccaccctggtctgggcaagcatcacggggcaggcgcggctgccggaatcgatgatggccgcaccccgcagcatcccatgcgccttgccacattgccgcgcacgtcgcggcggtcgcccagatcgagatctgtag

SEQ ID NO: 500906 - DNA, 528 bp, Stenotrophomonas maltophilia
ttgtccgaaccgccgccgcgctccgggtctccgggcgcggcggtttcgcaattgcaggacgtgcaggcctgccagaacgcgttctcgctgccgaagggctggcaggtgcagcccgcaggcgaacagcgctggctgctgaaaggtaccggcgagcgcccgctgcaggtcatcctgcaatgcattaccgagctgctgcacgggccggatgatccggtgctgacgccggtacttggcgcgctggagcccgcgcggatgagcgtgcgctgggcgtcctggggcgctacggattcgggcgtctcgatggctgcgctgcaacggcgcatcgtgcccggcaccgaagtgcaggaaatcgccgagctgccgcgcgccgaccgcgccaaccccgacgcaccgcacggcctgctgatgctgcgctgggacgaggaagacccctcacatattcaacaacgcgaggcgttcatcgccacgctgacgcagagccttgaagcgccgggcgctgcgaaaaacaccactggaacggcaccatga

SEQ ID NO: 500907 - DNA, 3405 bp, Stenotrophomonas maltophilia
ttggaaacgactgaagaacttactgcattcttgcgcgacatcacgcaggacggatatcgaggccgcctccaggcccggggtcaagctagggccctgattcgccatgaaggaaacttgccacccgacgctcccgctttcagcgaagagatcgattccgatcttgcggactatggcctctcagtactacgcgcttccttagcgctgcgcgaacttggaggcgatgcagaaacttggcgaaagggcttcctgcaggcggccggagcctttgaggccttagttcagaacggatcgccggccgacgcatctcgagggttctaccggacggcaggggctgcttcttatcacttggccaactactctgcgctggcattttcgcttctgacacaagctcaggccgatcagaaccgttcgcccgtggaggatgcgctcacgcttctcatcgtgcgcgatcttcaaggtctgggccagcgtgcgagggcgtggcttagcagcccagctaaccgcgatgagggaatcgccagggaagcggccgagggagcgcttgaccccgacgggatcgtctcgcgtgtggcgacgtcgacaatgttcagagcgttggtgttctttgagtttgctctgcaaaccggccaagagtccctagtcgtagaagctcgaaacctgctgaggcggtcgatttcgttgaccaaagcggcaagcgcggtgtcactctggtggattcttcggatcactgcgaacctgatcgatgatctttggtcaagcagtctgcacaaggttcttccctccgaaggcccaccaggctcgcgagactacgcgcagctccggaagctttttgtggccgagttgtacagcaggaagtcctctgaggtcgaactgtggccttctcaactgcaggcggcacaacgagccgtcgacgtgtccgacgacctagtggtggctctccccacaagcgccggcaagacgcggattgcagagatcgccgcattgatggctctggcgtgtggtcgacgcgttttgatcgtcacaccactcagagcattgtcggctcagaccgaacgttccttccgcaagacgttcacacctcttggattttccgtctcgtcactgtatggaagcagcggcatagcgggaactgacgaggatgcgctgcgggaacagagcatcgtcatagcgaccccagagaagttggactttgctttgcggaacgacacagacatcatcaatgacgtcggcttgatcgtgctagatgaaggtcatctgatcggcccaagcgaacgcgagatccgctacgagaatctggtgcagcggttactgcggcgcacggaccacggcgagcgccggattgtttgtctttcggcaattctgccggcgggcgatcaactcaacgatctaactgcgtggattcgcagtgacacacctggcgatccgatccagtctagttggcgccccacacgccagcgcttcggcaccctatcttggatcggaaattccgctcggctgggctttgaccttgagcctgatggcccgttcattcgacactttgtgccagaagctccgcctattcggcctcgtcggaaagcgtttcccaaggacaacaaggaactgacgctcgcagccgcgtggaggttctctgagcaaggcaaacgagctcttgtcttttgtacccagcgagatcatgttgaaggatttgcgaagactgccctagatctgcagcgacggggctttctgccgtccctgcttgccattgccaaggaggttgaacgtgcgatggccgtaggcagggagtggttaggcgctgaacatccggcagtacgctgtctggccatcggtgttgcgattcatcatgggcgtcttcctggccccttcttgcgggaagtggagggactgcttgccgccggcgtcttacgcgttaccgtggcatcgcccaccttggcgcaaggtttgaacctcaatgcggcggtgctcctgatcccgagtttgtacagggcgggcaccctgatcacgggtgaggaatttgccaacgtcgcaggtcgcgctggtcgcgcgttcgtggatctcgaagggctcgtgatccacgtcatgcatcaaccggacaattggcgccaccagcaatggaggcagttggtcacgtcggcgaaggcccggtcactctctagcggcatcattgtcgtggtcaacgaggtcgtgcggcgcctcgccacgtcgggtgtgttttcgcgtgaggatgccatggagtacctgtctagcacgcgagatgcttggtttccggaagcagctgatggcgagctggagtcagactcaatggagagccttattgagcggttggatgcaaccgtcctcgggctcattgaagcgcttgacgcgcaaagcgcggatctaccaaggctgatcgacgaagccctttcgggctcactttgggcgaggcaaatcgcccgtcttggcgccgtcgagaagcagaatcaattgtggattctcctcagcagagcacgactcatttggaacaagacaacggtcgagcaacggaaagggcagttcgcgatgggcgtgggactggaatcgggcctcgcaatcgatgcattggctgccgagctgactcagcttcttgaccgtggcgatgaggccgctctcgccagcgacgcagatgccctcatcgctgcacttgtcggaatgggagaacggcttcttgccatccgcccctttgtgccagatgacccgctgccggcgaactggagagacttgctggccacttgggtgcatggtcaggatgtagcggccatcggccaagaggcgatgcgaattgtggacgatgcatttgtctatcgcctggtctgggcgattgaagcgctccggatgaatcggcgcatcaatggaggcgagtcagaactgcccgtagaaggagccgctgccgcgtgcctggaagctggactaccatccaacgccatggccatgcttgttcgagccggactgccctcacgggttgccgccaagacagtcgtagagcagctcgcgcccgggttcacgaatcgcgcagaaatgaaagcctggctacgatcggcagaagtggcagccttcgaccatgctcctgaatggcccacgattgagacgcacgcaatctggcagcaatttcgacgcgacgcactttcaagcgtggacggcaagtggacgtcacaggagtggaccatgcaatggtcgacagactcggcagtgcctctgcgcgtcgaagttgaccctcaaagtgggcaagtctcgatcacgacgcctgacttttctcagctcaccacgatcaaccagaggcttcggactgaagctccaagcctatttgaagtcgcagcgctgcgggacggcacaaatgtcagcatacgccgcattggtcgaggcgaggcccactgggtggaagaaggggagtga

SEQ ID NO: 500908 - DNA, 774 bp, Stenotrophomonas maltophilia
atgctatatccagcttggtgcgacgtaaatatccaggaccagaacaacaagcagctgtggagactatccgagcgagatggaggaagagctgccatcgaagctacactcactactcggatccgatctcactacgacaatctggacgcgatagctgaggacgtccgtgagctgggatatccaggcgcggcggcaattttggctgagcgcatgccgcgctccccgcgcgcacgttcaggagagcttggcgagatcctcgcgaccgagttggtcgaagaacatcttgagttcgaggtcccggtccgtcgccttcgatacaaggatggtagagagatggcgctgcgtggcgatgacttcgtcggtctaaagctcgatgctcaacaaactctgcacttcttgaaaggcgaatcgaagagtcgcgcaaacctcgccaatgccaccatttcggaggcacgagaagcgctatccagagacgatgggagacctacagctacatctctcctcttcgtcgcggatcgactcatggagggcgaaggcgaacgccggcagatgggcagactgattcgcaacgaagtctccagtcgagccgcgcctccggggcggactagtcatatgctgtttaccttgtccggcaatgccacgcctcaggcgctactcgacgatcttgcggcggcggatctggttcgtccccatctttctgcgcacctgcgcatagaagaccatcaggcattcatccaagcctgctacgagagggccctggcgcttggaaacgactga

SEQ ID NO: 500909 - DNA, 1734 bp, Stenotrophomonas maltophilia
atgacaggtcaagtcgaaaatcccgcacttgaggcagcgaaacaagcgcagctgaaaatcgacgaagcccttgacgcgggccgtagctttaggcttgaggccggtgcgggcgcagggaagacatattctttggttgcagccctacagcggctgatccaagagcgcggacccgctctcgttcaatccggacaaaaagttgcctgcatcaccttcactgaagtggcgcgaaacgagatcgcacagaaaattgaggatcatcccgccattctcgtcgacaccatccatgggttctcctgggcatttttgcgccagtttcagaaggcattaagagatgccctggcggggatggaggagcgaagggagaagatcgagcaaggcggcggcgtcggtacaaaaccggtggactacgacttgggtttctttggggttgatgaagacaagataacgctgagccatgacgacatcccggagctgatggcaaaactcttataccaagagaaattcaggcgaatcttagggcagaaatttcctgtaatttttatcgatgaataccaagatacgcatcgccagttcatgaattcgataacggagaattaccttaagcccgccgccggcccgcttattggactcttcggagatcactggcaaaccatttatcgaagcgagtacgagctggcgcagtatccaatcgaagagatcgccaaaggctcgaacttccgatctgcgccagccatcgtgaacgtactcaacaggctgcgccctgaactacagcaggcggagcatgacccggaagcaaagggcgaagcccggttctttcacacgaattcctaccgaggtgagcgaacaagtgacagacattctaaagaggacctgccaccacaattggcgcgagaaacccgagaggctctgacgcggcgccttcggaacgaagggtgggatatgagtaaaacaaaggtacttatgctcactcacaatgtcttggcagcggagcaaggctatccaaatatcgcagagatctttagcgggcgcaccgaccttttcgcaaaaaaggaagacccaacgatcaagttcttcgctgaagttgttgagccgatgtgcgcttcttacgcctgttcgcgctatggagaaatgttcaagatacttggctcgggtccagcgattaccagacatgaagacaaggaaaattggcgtcgggatatggatgctcttcagatgctacggacggaaggcacgatcggccaagttatcgattgtttgcaatcaaccaagcggccgcccatccccgaccgcgtcctgcggcgtgaagaagaacttaggcacttggatggcgccccgattcccgaggagtcgtcggtgctccaacggcacagcaagctgcgcgacgttccatatcgtgaagtcatcgaggtagtcaaattcattgagaagcaaacctcattcgcaacccaacatagcgtcaagggcgctgagttcgagaacgttcttgtcgtactgggtggcggctggaatcactacaactggccgcagcttcttgaattgattcatactaaagcgttaaatgccaagaacagcaaaggcttttaccgcgcccgcaatctcttttacgtatccatatcccgacccatgacacgtctcgctgtacttgcgacccaatccattcccccccgcgcgctcgaagcagccagtcatctgttcggggctgttaacgttgaagagcttaaggtggggacgtga

SEQ ID NO: 500910 - DNA, 1305 bp, Stenotrophomonas maltophilia
atgctgaagaagcttcttccgacgatggaagctctgggctttccgagtctcaatgacaccgagctgaagccagaaacatcgctcaacgttgaggcactcctttccgaccacacaagggtggtatacgcaggcgcagacggcgttcacctaccagagggctacaacggactcggaacgcgaaacctcatttatatgctcttgcagttagagagctaccacaaaatttatcgcgcaaagccaacccgccctgtcacgcacctgatcttcatcgaagaaccagaagctcatctgcatcctcagatgcaggaagttttcatcaaccaactgaacgccgcaatcaaaagactttccgccaattaccccgatgagcccggatggaaagtgcagtttgtgatcacgacacactcaccacacgttgcaaatgcagcctcattcgaggccgtgcggtatttcttgaacgagctgcctacgacgccgaatgcgcggcagacgaagatcaaggatttcaagaaagggatggcaaacatatcccgtgatgatcaggatttcctccatcagtacatgacattgaccaagtgtgacctctactttgctgacaaggcaatcatggtagagggggctactgagcgacttctgatgccacggctgtgcgatctcgtggacaagtcattggacgacaaacacaagctggccagacagtacatcacctgcgttgaggtgggtggggcgtactctcatatcttttacccattgctcgacttccttgaactcaagacgctggttgtcaccgatttggattccaccaagccggttgagaaggagaacaagaagggaaaaatgatcacaacctgggagaaatgccccgtagctgaaggtcagcgcacttcaaatgccgcaatcaaggattggttccgcccgaccagtacagaggttggggacggctggcagatatcaccggcccagttgcttgcaaagtctgaagaagaaaagattagcgcctaccggcgcatcgcgtatcaaattccagaggaccccaaagctgccgcctgcgcgcggagctatgaggacgcgctcgtgctggccaacccggatcgattcgaatggcccaaagagcaagacgaggccaccgaagcatgggaaatcgccaagggactcgcgaaagcagataccgcattgcgattcgcgattcgcgaaaaggagtggaaggtgccgcgatacatcgaggagggtctcgcttggctttccgagccgccaccaccgccagcacaagtcccagaagtgcagaacgccgcggtgatcgtatga

SEQ ID NO: 500911 - DNA, 633 bp, Stenotrophomonas maltophilia
gtggatcttcaactggcgggcaagaccgcactcgtgaccggcgcgaccgccggtattggcctggctatcgcgcgcacgttggcacgcgaaggcgtaagcgtgaccctcaccgggcgtgacccgggaaagctgcaggcagccatggccgagatcagcgctggggcgccgggcgcgcaactggctacggtggtggctgatctggccagcgccgacggcgcggcggccgtgatcgcggcacagcccgataccgatatcctgatcactaacctgggctactacgaagcgaaggcctttgccgacatcagcgacgatgactggatgcggatgctggaggtcaacgtactgtccggcgtgcgcctgtcgcggcactacttcccgcgcatgctggagcgcaactggggcagggtgatcttcatgttcagcgaggtaggtgcgttcacgccgccggacatggtgcattacggggtgagcaagtcggcgcagctggcggtgtcgcgtggcctggctgagctgacccggggtacccggggtgacggtcaacagcgtgctgccatcggccacacgctcggacggcattgtggaatacctgcgccagaccgcgccgcgaccgggcatgaccgatgcagagattga

SEQ ID NO: 500912 - DNA, 219 bp, Stenotrophomonas maltophilia
gtggaatacctgcgccagaccgcgccgcgaccgggcatgaccgatgcagagattgaagcgcacttcttccagacctaccggcccagttcgctgatcgcgcggatgatcgaggccgacgagatcgcggcgatggtggcgctgctggcaagcccgttgggcgcggcctccaatggtgcagcagtgcgcgtagagggtgggacctaccgatccatcctgtga

SEQ ID NO: 500913 - DNA, 1803 bp, Stenotrophomonas maltophilia
atgaaatactcctgcatcgcagctgccatcctgaccctattggccgcagaacccgcaatcgcgttcccggactgtccgacccagtactggtcgccatcgtccgtcggtcacaaggaacagctgcccaatactcatcgccccaatgaaaacaactgcaagataacggaattcagggttgatgatcatcagtggatgaacagcgtccggcttccctcggaattctcattgctgagaatcatcaacagctccctcgattccggcaagacgctcaagatttacggcgcagttcaaggcgtggcgggagatccactgaagctcgccgcaggcaggtcaatcgatttcagggggagaagcaaaggccacgctgcgtggctgcaacatccggagttgcacaccgcccccaatcaaccacaatggcagatcccgcgtaacagcggactgatctccaatgtcacactgcgtgacggtaaacacgctggacaacttatcctcccggcaaccggctcagcgttcgacaccatcacaattcacaacgcctcctcgacagaaaccaacgtactgggaacacacactgcctttcctggtcaacgcatgaccgtgctaccgaacagcaccgcccgcgccgagttcgatcccgttgcaaggcagtgggactgggtccacacgccctattccgtgaggacgctcgcgcaaaggtaccagcgcatttcttcccgttccatcctggagctgtacgacggcgaatggatcggaagagtgcctctgccgctcacgcgttatgatcgtgataggcacatcatcctctccgacgcagactgggactcgttgatcgaccccaatcgcgatgcgacctacgcactgcgcaaaggagatgagtacgaattcatctatatctccgaatggggacgttggcatgttcttcgccaacccgtccagcaagagatcctcagagagctgaagaacgggcggctgacagacgaaggctacctgctgaccaaggtctcagcagacgagggcaccgcggccaacagccagctcaggctccctgctccccggcagggtgcacgcattgtcctgaccaacacgtcgtcccataccatcccggtaacctacggtacgttccgtgccaacgctcgcccgcgcgaacagattgtgtttcgttccgaaaatggctccacgtggcagcgcgaaacggtcaccatcgacctggcgttccttattgatcttagcgctgaagaggttgaaaacagctgggacgcgcacatgatcatgcgcgagaatctcaggctggccaacgaggcccttgagaactccggcgccacataccgctatagagaagccgctgtgcgcgtcagccaacccggcgagttcggctacttcccgcgcaaggaactctggcgcgtgccaacgctgctgttcgatgaccggcatgcccttcaattcatgaaggaccatgacgccgacggcatctactacggcggaagccacaggtggagcaagaatgactgcgactggtatcgctactcctctgcggcgaaatcgcttgtcattgcaacgtcgctgacctgcccgacaaccaccttccgccagggggccggttatgcgcacggactgcccgttgtgctcaacccccggcaaccgataccggttatcggcgcggggaatcagctccccttctaccccactccccataagctgcttcccgataaccgcatcgccgtcaacccgggacaggagcacatccttcagaagatgaacgcaatgggagaacagttctcaaagtactctgagcagcgcaggtaa

SEQ ID NO: 500914 - DNA, 501 bp, Stenotrophomonas maltophilia
atgtcgcactctctgtccacgctgggcgtgatccacacggccgtcagccttgtaccggtgttcgccggcctgtatgccttcattcgccatcgcgcgatcgaccccgcgacacgctccggcaagctgtacctgcttgggctggtgctgtcggtggcaacgtcgttcaccgtctccagtacgggcgggatcaacccgggccacgcattcggagtgattgtgctgctggtggcgttcggcggcgtgctggcggcccggctgcgctggctgggtggcgccgcaccttacgtgtcgacatttgcgctgtctttcagcttcctgctgtcgctggtgccgggcgtgaatgaaacgctgacacggttgccggcagcgcatccgattgctgcggcgccgatggcgccggtggtgctgcacacgctgctgggattggcggtggtgtttgtgatcggctttgccgcgcagtgctggcgcatgcgggttcaaccggttcgcaggcgcccttga

SEQ ID NO: 500915 - DNA, 468 bp, Stenotrophomonas maltophilia
atgcctgtacctgctcaaccttcaacggaaacacgtgcctcgcccgccgagttgttcgaggttgtcgtcctgcgcgcaggcaccgccctgttcgcgatcgacgtacagctggccgtggaaatacgcggcccagagaccttcggccctgcggaccagcatggcaggcggagcctggaggtacgggggcagccgttgccggtggccgacctgcgcaggctcagcgggcaaccggcattcgatggcggcagcccagccatgctgttgatcagcgccggcaccgcaaccctggcgctggcggtagatgaagtgctggaaatcgaaacaccggacgcatctccagacgcagcctcgccggcgcagggtcgaccgttcaacttctgcagccggcacgttcgggtggatgccacacgttcggctgcgctgatcgaaccgcagtcgctgctggccgcgctcgcggtgcgggactga

SEQ ID NO: 500916 - DNA, 315 bp, Stenotrophomonas maltophilia
atgaaccaagccctcattcccttcgataccgacccgctggaaacacgggagtggcgtgaatcgctgcaggcggtgatgcaggccggtggccggccacgcgcgcactacctgatcgatcagctgagcgggctggacacccagcagcacgacgacctgcatacccgcgcatggacggccgggcgacctggccgtcgagcgccgcctgaacgcgatgatccgctggaacgtgatggtcatggtgctgcgtgctggatgcaggacgccatgggcaggtatggcatcgacaccggcaagcgcgaccgggccccggtgtaa

SEQ ID NO: 500917 - DNA, 1023 bp, Stenotrophomonas maltophilia
atgaatcggtatccatcacgcaggcctgacgacacgatcgaacgtgaggcggcgcactggttcctgtgcaatcgcgagggggtgctggacaaggccgggcgtgtcgcgttcctggactggatgaagcgctcgcccgagcatgttcgcgcctacatgcgcgcgctcgcgttgcaccggcaggtgggcgaggcgctgcaatcgccgttggctgatgcggcgctggtgccaccgcagcaggtcgccgccaaggtggtgccgctgttcggtcgtgcgcacgcgccgccccgcgccgtgctgcgtcgcggtcgcgtgcgctggtggacggtctctgccgcggcctgtgttgccctgctcggcgtgggcctggtttcgcagatgatgcccacccagcagctctacagtgccgggcatggtgaactccgcgacctggtgctgcccgaccagacccaggtgcggctcaacgcggacagccgactgcgggtacgcatgagctggttcagtcgaagggtggagctgctgcagggggaggccacgttcgacatcgcccgcgaccgccgtccgttcgaggtggaagtgaacggcctggagatccgggatatcggcactgtattcgatgtatcgcgacggctgcagagcacccgcatcggcgtggtctccggcgaggtcgaggtctggagccagggcgcgggtgcccgccgcctggcccagctggagcagggccgggtggtgcaggtcgacgcgcgaagccatgccgtcgagtcagtggacatgccgctgtcgatgctgctggactggcagcagcgcaaagtctccttcctcgatgagcggctcgatgaggtggcagctgccttcaaccggcacaaccaggtgcaggtgcgcgtgctggacgaaggcgcagcatcggcacggttgtcgggcagcctcgatgcgcatcgcatcggtgcgctgcaggccttcctcgaacgcgacccacgcttcgtggtgaggcgcgaagccgacacagtgcgggtcggcagtcgctga

SEQ ID NO: 500918 - DNA, 2379 bp, Stenotrophomonas maltophilia
atgcgaacgtctgcgcgctttccccgtgtctcgctgcttgccctgctgatcgcccccgcactggacgccctggccgaagcaccgcagggcgagactgccgaagcgcgcagcagcgatgcgcgaacccttgaccaggtacaggtgatcggccaggccaccagctacgccaagacggcggtgcgcgcggaaacgctgaaccggcagaccgtgatgagcagcgtcaacgacgcgctcaatgaagtgcccggcgtggtggtcagcgaagccgatgccaccggctcatcggtgtggggcacgcagatcagcatgcgtggcttcgtcaccaaccgcgacacacagcagatcggcactaccatcgacggcctgcccaacggcggttcgggttacggcggcggctcgctggccaaccgctacatcgacaccctcgatctggagacagtggaagtcagccagggcaccgctgatatctcctcgcgctcgaacgaagcgctgggcggcacgctcaacttcctcaccagcgacccgctgcaggacagccgcctgcgtttcgtggtcggcgccggtgacaacgaggcgcgcaagtactacgtgcgctacgacaccggcctgctcggcggccacacccgcgcctgggtcagcgcctcctcgtcgaaggtgcatgactggatcgacggcaccgggcacgccagcaacgaccacatcgccggcaagttcatcaccgaactggaccgctggacgctgaccggctacctgtcctacaacgatgcggacgagccggaatacaccagcgtctcaccgaagggcttcgccaccaatcctgatcgtgacaacctggtcggcaccctcaccggcattccctacctggaccagaactaccgttccggctcgcgtgcgctgcgcgagaacaccttcggctacctgcgcgcggccttcgacggtggcaacggcttcaaggcctcggtggcggcttacggacaccgcatggaaggtcgtggcgactggctgccaccttacctggcacaggtcagcgacgatggtgccggccgccccgaatcggagtacatcggtggaaagaccgtgtacggcggcagcaaccgtggccagatcttcttcgtcaatcccgacggcagcgccgcgcagcgcctggccaactgcacaccgcggctgggtttcactgccgaatatgatccgaactgctacgccggcaacgtgctgggcgcgcagtcgtatcgccacacgcactacgacaacgaccgcatgggcgtgaccgccgacgtcgagtggcggcagaccttcggcacggtcgacaacacgatccgtggcggcctgtgggtggagaagctggaccgatcggcacgccgcgactggcatcgcctgctcaacgtcggccaggatatcgccttcgaccatcaaccgtactgggtacagttcgaggacaagtacaaggttgacgagcagatgtactacgtcgaggacgtggcgaggttcgggccgttcagcgcacgcctgggcgtgaagcagttcttcgtcgaccagtcgcgccgccgcgtgatcggtgccagcgagcacgtcagatccgattccaggtccgacccgctgctgtccaccggcttgacctgggcgccgggcgtggaaggcatggagctgttcgccggcttctcgcagaacttcgccgcgattccttccggcgtgctcggcgagaccgacccgcagcgcttccgcaacgtcgagccggagaccgctgacaacattgaagtgggcatgcgcatcagccgctggccgctgaccgcctcggtcacgctgtacaacatcaagttcgacaaccgcatcgtctacctgccggccggcttcgtcagcggcattgactacctgggcgagaccgacggtgtctacgagaacttcggcggcgtggaaagcaacggcctggaagcggcgttcggctatggctgggacaacggctggcgcctcaacgccgcctatacctacaaccgctccaagtacctgggcagtggcgatgccgcgcgtgatacccagctgggcatcgtcgacggcgccaaggtgatcggccagcccgaacagaccctcgtcctgtcggcagactggcagggtgagaactggaacttcggcctgtccggccgttacctgggcacgcgctatctcgacgccgccaacgtcaacaagctgccgtcggccaccgtgttcaacgccaacatcggcttcgacctgcagggcctgtcgccgcgcctgaagggcatgggcgccaacctggtggtgagcaacctcaccgataagcggtatcttgcaggggtggacggccgcgacaacgccttcatcggcgctccgcgcaccgtcgggatctctttccgcgtggacctgtga

SEQ ID NO: 500919 - DNA, 702 bp, Stenotrophomonas maltophilia
atgctgcagatccgcaagagcgctacccgtggcctggccgagcatggctggctgtcctcgcgccataccttctccttcgccaactactacgacccccgttacgtcagcttcggcccgttgcgggtgatcaacgaagacaaggtgatcggcggccagggcttcggcacccacggccacagcaacatggaaatcatctcctacgtgctgggcggtgcactggaacacaaggactcgatgggcaccggttcggtgctgcgctacggcgacgtgcagcgcatgagcgccgggagcggcgtcacccacagcgagttcaaccactcggccgacgagaccgtgcacttcctgcagatctggatcttcccggacaccgagaacatcgtgccgtcgtacgaagagacccacttctcgccggacagcaagcgcggccagctgcgcctgatcgcttcgccggacggcgccgacggttcgctgcgcatccaccaggatgcccgcatcttcgccaccattcttgatggcggccagaagctgcatcacgccctcggcaacggtcgtggcgcctatgtgcaggtggcgcgtggccagctgcaggtcaacggcatcaccctggaagccggtgatgcgctgcaggtcagtgacgaagcccagctgaccctggaaaacggcaacgacgccgaagtgctggtgttcgacctgccgctgtaa

SEQ ID NO: 500920 - DNA, 507 bp, Stenotrophomonas maltophilia
atggcaaccaagaaagctgcgaagaagaagcccgccgccaagaaagcggtgaagaaggtcgcgaagaaggccgctgccaagaaggcagtgaagaaggtcgcgaagaaggcgactgccaagaaggcagtgaagaaggcggcgaagaaggtcgccaagaagaccacggcgaagaaggcagtgaagaaggcggcgaagaaggtcgccaagaagtccactgccaagaaggccgtcaagaagaccgcgaagaaggcggccaagaaggccaccaagaagactgccaagaaggctacggcccgcaagccggccaagaaggtcgcaaagaaggcgactgccaagaaggccgtcaagaagaccgccaagaaggcagtaaagaagaccgcgaagaaggctaccaagaaggccgccccgaagaaggcagcgaagaaggttgccaagcgcaagccggccgcccgcaagaagaaggccgctccggtcgctctgccggcaaccccggcgccgctgatctaa

SEQ ID NO: 500921 - DNA, 234 bp, Stenotrophomonas maltophilia
gtgtcggcggctgacaagattatgcgtcctggcgcacacggcgatgtggccgagctaacaggcgcacacaccaagcgcaggcagattcagaacctggcccgcaatggcatcccgcataccatcaacgcggccggatggccggtggtcatgtggtcggcagtcgatggctcggcgaagaaggcccccgaggcagatggcgcttggtcaagcaacgctatgaggcccgcagcgtaa

SEQ ID NO: 500922 - DNA, 279 bp, Stenotrophomonas maltophilia
ttgatacgaacgtacgcagacaaggacacggaacgaatagccagcggcaagaaagttaaagccctggctaatctggaaaaacagattctacgaaagctggtctatctcaacgctgcgacttcactacttgacctgaaggcccctccaggcaacaggttggaagccctcaaaggcgacaggtcagggcagtacagcattcgcatcaatgaccagtttcggatctgtttcaagtggaaagatggcgacgtttacgatgtagagatcaccgactaccactga

SEQ ID NO: 500923 - DNA, 315 bp, Stenotrophomonas maltophilia
atgacacgcgccaacgcaaaaactgctatcgcgctccccgctatccatccgggagaaatcctttccgaagagttcctggtcccgctgggcatgtccgcacgcgcactggccgccgagatcaatgtcaccccggcccgcgtttctgagatcatcgccggccgtcgcggcatcaccgccgataccgcgcttcgtctgggacgctacttcggcaccacgccacagctgtggttgaacctgcaaacgcagtacgacctgttgaccgttagcgtggaactggcggatgtgatcgaccacatcagccccagggccgcgtaa

SEQ ID NO: 500924 - DNA, 270 bp, Stenotrophomonas maltophilia
atgtctgatggtctctcgttgggaatttggaccggcattggtgccgccggtggcatcgccgttgcgctcatcggggccgggctgcgccggttcgccggctatatgaatgccgaggaggtcaagccgcgcccgctcatggcctggtgcatcatgttggctatcgtcggtgctgtagcaggcacggtgtggcagagcatcgggttcgcagagtgccgcgacgcgggctacaaggtggcagagtgcctgttgcccttactgcggcgggactga

SEQ ID NO: 500925 - DNA, 927 bp, Stenotrophomonas maltophilia
atgcagacaggtacctccatattgaatcccagcgttgttgccaacgcggagaagctgcagtcagagttccgatgcggagtcccgttcccccacctggtcatcgatgacttcctcgacctggacttcgcggaacttctctccgagcaattcccgccctttgattgcggcaactccatgggagacgacggaacacctggcgggaagtccaccgtcgaggccgtgcgctctctgggcgccgcctatcgtcaactcgacgattgcatcaggagccccgagtttctgttgctgctatcgaggctgaccgggattgacggtctgatctacgatccgtggtacctcggcggtggaacccatgaaagcagagacgggaccagcctcgacccgcacatcgatgccaatttccaccccgtcgaaccctggcaccgtcgtctcaacgtcgtcctctatctgaatccgtcctgggaagcggaatggggtggctcgtttgagctgttccgtgatccctggaccacgtcaaacgccgagaggcaagtgccgccaacgttcaatcgttgcgcgatcttcgcgacctccgaacactcctggcatggcttcagccaggttcgtctaccggcagcacacgctcagcgcacccggcgatcgattgcgctcttcttctacaccgaggttcgacctgccgcagaaacggtggagcggcacacggttcactacgtcaagcgccagctaccagattacttcaccacgggctacgtgctgagcgcgcacgacgtcgcatgggccaaggacgtgatcgcgcaacgcgatgcccatatccggcagctctattccgagaatgccgccctacgcaacgcccaggactctggcctggggggcacgcttctctactgggcaaagcgagccttccttcgtctgcgccacgcgcggtag

SEQ ID NO: 500926 - DNA, 561 bp, Stenotrophomonas maltophilia
atggtctatttttctgctgatcaagatgacacaacctcgatgaagatctatcgcggcatgacctcgcatcagtgggagactcggcaaggtgttgcgcgaaagggcgaggaacgcgaggcacagtttcatgcaggagacactcgggtctttgcaggagacactgacatctacgtcggcaggtgcgttcagaacgctctgaccttcactgcgatggactcttccggctacaggcacagttggctgagcttcaccaaagacaagtccgtcgctgcgttcttcgcgctgaatgagctggacgagttaggttcagaccatggagttgttgtcgagacgaccctggaagcgcttcgggaacttggaatagcctgcgcgcagaacgacattcgagttccatgggagcaagagatcagcgtggatctctacgactccccctacttcccggagtcagcaatcatccaagtgcatcacgtgccttactcggagctctggaaggtcgcatcggacctccagagtcgctggggagggacgggagcctacacccggcatgctttcagcttatga

SEQ ID NO: 500927 - DNA, 1221 bp, Stenotrophomonas maltophilia
atgaaatggaaatctctcgcgtccgttgcagcgctcgtcattgcctcgggaaatctctccgcgcagatgcctcccgccaattcggatgccgaaaaggaaatggagacactcgttcatgcctacactgcaaagcatcctgaagtttcggtggacgcggcgattacacgcttggcagtccaaggagaactcaatgagactttcgaaagtctcagcgccgagttcgcggaccgcctgtcagcaatatcactgaggcatacccccgatcagcacatcctggtggagctgaccggaaacagcccagtgcccgatcggttgatcgggacagacagcgggaccacgcgcgtcaccttcgaaaccggcaacgttcacaccgagcgggagttctaccagatactcgaacgccatacgccactgatctacagcctgatccctggggttaccggcatctccggcttcccgggcgacaaccgcgtcgtgatactgattgagggaaacgctgcacttgccaatagtctgaggacgaacgtacgcaagcttgagcgcgtcacaggcttccagatcattcttgaggcggacaatcccagatcgcggaatgccgcgtacgtggtaggcggcgcggtgcttcaaagcaacaattcctactgcacgagcggctttcctgtgaagcacaccgctaccgggcaaaggggcatcaccacagccggtcattgtccaaacgacttcatctacggaaactacgccactggaacggacaagtacacgctaccactcacctacgtcgacggcatcgaggatgccagtcacgatgtgcaatggcatacggtgggctcccacacgacattgagagaggtctatggcacctccacgtccgactacagcaggcggtcgatcatgtacatgtggaccaacgcaaaggtcggccaggagatgtgcttccgtggagtaagaagcggctacggttgtggagatgtggtggatatcaagcacaaccccggcatcgccttcggccccggcgagaacctcccctgtgccaatgcctggatacgaatcacaggcaatcagctggcgtgcggagaaggtgacagtggcgcggccatcttccagggaaacaatgggtacggaatcgtgtccaaggccaactccactaccccgttgaagggcgattgcaagggagttactgcaatgccatggggggcgatctcggtgctcggccccgaatag

SEQ ID NO: 500928 - DNA, 357 bp, Stenotrophomonas maltophilia
atgaccgaccgtccgccccatgcttcatacaccgccagcacccacgatgacgacgacaacccttcccccgaactgagcacgtttctgggctgcctcaagcgcatccgcgcgggcgaaggcgccgatggcctgccctggcctgaaaccagcgtttcaacagggcgcggggttgccctgtcgcgggtggaacgggccgccatcggcatgctgaccgtggcggaaatgctgcacgccgccgaccgctgccgggccatggccacgccggaccggcatctggatgcctgcgtggttgaagggctgttctttgcctgccgcagtctggccgagctggtgtgccgggacgtgcggccggagtag

SEQ ID NO: 500929 - DNA, 426 bp, Stenotrophomonas maltophilia
atgttgctgtccaagcgctttgtggaaccgcgcgtcctgctgatcgaggacgccgaggaaacccaggaactcagccgcctcgccctggaaagccaggcctgccaggtcaccgctgtcagcagtgcagaggccgcgctgggcctgctcaacgccggcgagccgttcgacctgctgttcaccgacgtctgcctgggcgggatcagcggcatcgaaaccgccaaccgcgtgcgcgagcatctgccgcagctgccgatcctggtcacctccggcatggaccagcatcatgtgctgccgcagctgcgcgccggcatccacttcctgcccaagccgtacagcatgagcgagctgctcgatgccatccgcctgtgcttccgccatgcagcggatgccacgttgatgccgccgccgcaggccagcgcggcctga

SEQ ID NO: 500930 - DNA, 255 bp, Stenotrophomonas maltophilia
gtgatctcgcgcctgctcattgccctgctgcgcttctacaagcgcttcatcagccccctgctggggccgcgctgccgtttcgtgccgagctgttctgaatacgcgatggacgccatctcgcggcacggcccgctgcgcggcagctggttggctgcgcgccggctgggccgctgccacccgttccatcccggcggcttcgatcccgtgcccgagtcccccaacgccccctcttgccgttgcacaggaaaacactga

SEQ ID NO: 500931 - DNA, 1413 bp, Stenotrophomonas maltophilia
atgcctcccctcaagtacccgcgctgggcgctggccctgctggccaccgcccagctgatcatcgccctggacgccaccatcatcttcgtcgccctgcatgacatggggcgcgcgctggagatcaacgcacagcagctgcaatgggtggtcagtgcctacaccgtggcctttggcggcagcctgctgctgggcgggcgtgccgccgacctgatcggccgccgtcgtttctaccggctgggcatgctgctgttcgcactggcatcgctgctcggcgcgctggcgccgaacgccaccctgctgatcatcgcgcgtgcggcgcagggcatcggcgcggcattgctgttcccggccacgctggcgctgatcaacacgttgtatgcggaaggtccggtgcgcaaccgtgcacttgcgatctggagcatggccagcgcggtgggcctggcgctgggcacgctgctcggtggcgtgctgacccaggcgttcggctggccggcggtgctggcggtgatcgtgccgctggccaccacctgcgcggtggctgcgggtgcgtggttgccggccgatggcccgcgtgcgcagggccgctcgttcgatctggccggctgcatcaccgtcactgccggcggcagcctgctggtcactaccctcgtgcaagggccggagtggggctggactgcgccggccacgctgggctgcctgctgctgtcggtgctgctgctggtggcgttcgtgcagatcgaacagcgcagccgcgatccgctgatgcagttcgcgttgctgcggctgcccggactgcgcgcggcactgggcctgaccttcgccttcatgagcagctatggggtgcagtactacttcatggcgctgtacttccaggacggctacggctggagcccgctgcaggccggcatggccttcctgcccgccaccgcggtgtgcacggtcggcatccagctggccgagtggacgctgcagcgctggagcgcgcgcaaggtgctggtggtcgggcagctggccggcgccatcggtatcgcctgggtggccgcgacgctgccgcacggcgcgaacttctggccgctgctgccgggcgtggtagtgctgagcatcggccagggcatgacctggacctcgatgtggatcgtggccgggcagggcgtgccgtccgcacagcagggtgttgcatctggcatggcggcgaccgcgcagcagatcggtggcgcgctgggcctggcggtgctggtgatggtggccaatgccgatgccggtacagccggttcgccgagtgcactggccgggctggtgcgcgccgaatacggtgccgccttgttttcattgttcggcgtggtgatcgcgctgggcctgcgcccggcaccggccgaatcggccgccaccgtctgcccggccaacgaggcatga

SEQ ID NO: 500932 - DNA, 2322 bp, Stenotrophomonas maltophilia
atgatgagcgtgcccacaccgatgggatcgccgggccgtgacccggcccagctccagcgtgcccgggacatggtcctgcccgcgctgtgccaggccttcggggcggcactggcgcgtttcgacgatgccctgttcgaccgcgccggcaatgccggctcgtcgcagttgctgttcctggacgcgatgcgcgaactgcgccggcgccgtgaggacatcgcggctgctttcgcaggccacctgcagcaggcctgggccgcattggaggctggtgagccgctgtcagccgaggcgaccctgtccgggccggccgaggatgggctcagcctgctggccgagcatgtgctggaatcccggttggcggtgcgcaatttcgccactgtgttgctgcgtgacttcaagccggtgctggcgcggctggatcgccgcctgggccggttgatcggtggcgcggaactggacgccgaccacaatccgatcagccccgaacacctgggcgtggccatccacgaagcctttgccggctgtgaactggccccggaagtgcatctggtgctgatcaagctgtgcgagcgcgacctgcgtgcaccggtcggtcgcatctacgagaagctggacgagcagctggccgcagccggcgtgatgtcgcagatgggggctccgcagcgcccacaaccgccggcaccggatccgcgcatggccggcatgctggatgacctggtcgagcatcgccacggcgcgggcgtcgatccggggttcagcgatgacgagcaggctgcaccggcctgggcgcagcgcttcgccgcccgctggtccgagcgccgcgggcatatgcagcagcacctgggcggcgatgacggcgccaccggcgaggcctacgctggccagcagggcatgctgctggaagcgctgcacgaactgctgcagcagacccgccacgtgcgtgaggacgccacgtctgcggcacaggtggcggttggccagcagcgcccgctcagccagcgcgaaatgatgtcggtgctgtcgctgctgcaggccacgcccagcgccaccctgcgcgcggccatcggcgaggacggcgaatcgctggcgcagcgcctgaagagcgaagtgctgtccagcgccacccagcttggcgtcgatccgggccagacccggctggacccgcaggatgaggacgccatcgacctggtcggcatgctgttcgacgtgatgctggacgagcgtgaactggaaggccgctcgcgcgaactgatcggccgcctggtggtgcctttcgtcaaggtcgccatgctcgaccgccgcatgttcgtgcagaagacccacccggcgcgcaagctgctcaactcgctggccgaggcctgcgagggcaacaccggcgagagccaggccgagcgcatgctgatggccaaggtcgaagagatcatcgagcgcctggtggccgagttcaacgagaacctggcgatcttcctgaccctggaagaggaattccgcgagttcctggtgcagcatcgtcgccgcgtggaaatcgccgagcgccgtgccgcagaaacgcagcgcggccaggaaaagctggaaatggcccgcagccgggccggtgcggaactggaccgccgcatcggtgacgccacgctgccgccggccattgccgagttcctgcgccagccgtggcagcatcatctgaccctggcgctgctgcgcgagggagaagaaggcgcgtcggtggccgaggcattgagccttggcgatggcctgcttgaggaagtggccgaggcccgccgccagatcgtcggcaagccgtggctgcaggcctggcagccggtgctggccaaggtgtttgccagcgtcggcgtgcacggcgatgcggccaccgccgcgattgatgccctgcatgacaccctgcagggcatcgccgaatcgcggccggaactgcagcgtgcgctgccggagctgccgcaggttgccttgccggcgccgccagtggctgaatcgccggcggttgagcttggcggacagattgatgccgacgatttcgacaacgccgatgccgaccgcttccgccgcatggaaatcggcaactggctggacttcgtcgacaaggatggcaaggtgcaggcgggcaagctgtcctgggtcagcccgatttcctcgcgcctgctgttcgtcaaccgtcgcggcgtgcgcttctgcgtggcctcgccggaagagctggcggtgatgatgcggctgggccgcctgcgtgcccacgttgatgatggcgccttcgacagcgccatgcagggcgtgatcgatcgcctcgaccccggcagcgccacgctgcactga

SEQ ID NO: 500933 - DNA, 327 bp, Stenotrophomonas maltophilia
gtgaaccgctccctgccttccgatgacaccctgcgcgacctgcacgcgcagtcgctgcaggcgctgtcgccggccacgctggcacggctgcgcctggcgcgccacggcgccagcgcggcccgtcacgggcgctggcgctggtggctggccagcgcctgctctctggtggtggcgctggggatcggcctgcagttcagcggccacagccccctgtcgcccgccgtgccggcaccggtgctggcctcggtggaagacaacagcgccctgtacgacgaaaatcccgatctgtacctgtggctgggcgataccgacctggcgatggagtga

SEQ ID NO: 500934 - DNA, 375 bp, Stenotrophomonas maltophilia
atgcaactaggctcggcgacccaacaggccctggaaaattttggaacgatccgccctttgttcgccccttgggaaatcaaggagctaaggaagctactctgcggctggatcggcgcacgttcaatgaatgacctgctgaagaacagccggctcgtacttgtcgatcagatcttcaaggatgacgagctgcgcgtccttccattcgacaatcaccgtatcaacccatgggagacgctactggaggacaaagccatcactcttcctctgcatccccagagcgaagcacttggcgcggccatcctcgctgccttcgacttatcgacctaccatccggaacggaagcatgcccttccagcgcccaggtcgcatcactga

SEQ ID NO: 500935 - DNA, 237 bp, Stenotrophomonas maltophilia
atgagaatcacggatttcctggtgatggacggtgagggtgaccagatccctgctgatccgcatggcaaccatgtggctttcaactgtttcgagtgcggatacccggtcgtggctggctcattggaaaacgagcggggcagcgatgaggattgtcctgcagcctgtcgtggctgtggtgccgagtacttcgtggatctgcggctgggctcaaagaaaatgtacatccatctgctctga

SEQ ID NO: 500936 - DNA, 1557 bp, Stenotrophomonas maltophilia
gtgacccaggaaagcaacccagaccgcagcctgttgccgggcaagatcctgttgtggttctcggcggtcgcgctgctggtcctgctgggctgcagctggtcgatgcccccggtcgatgcctccggtttccggcagacacagactgctctgtcgatcgactggttgctgcgcggcggtccctggctggactacgtgaccccggtgctgggcgcgccttggtcgatcccgttcgagttcccgttctaccagtggttggcggcgttgctgtccagcgtcaccggcatgagtgccgacaacagcgggcggctggtctccaccgtcttccatgccggctgcatctggctggtctaccgcacgctgctggcatggcgccctgatcgcacgctggcgctatccgtggccggcgccttcgccgtttcaccgtacgcgcagttctgggggcgctcggtgatgatggaatccagcgcggtgttctttggcctgctctttgtctgggcgatggcacgcctgcgcagccagccgcgcgcgtgggtgggcctggttgccgtcgtcgcggcggtgctgtcggcggccatcaaggtgacttcgttcttcggctttgccgcgttcgttgcactggccttcctgtggctggccctgcgcgagcacggctggcgtccgcggtggctgcagcagcattggcagctgctgttctggggtggcctgtccgcgcttgccgtgctggccacgctcagcctgtggttgcagcatgccgatgcgctgaaggcgcagtcggcgctgggccggcagatcacctccgatgctctgtccacctggaattacggcaccctgcagcagcgcctggatccggctacctggtggggcacggtgttcaagaagcgcttctccggtgcgatcggctccaactggatcttcctgatcttcgtcatcgccgggctgtggcagaagcgcacgcgcacggcggtggctgtcctgctgctggcctacctggcgccgttcctggtcttcaccaacctgcacatcgcccatccctactaccaggcggccaatatcgtgttcgccacgtcgatcatcggcctggtgctgtggtcgacggtgctggcggccgaagcggcgggcaagccgcgccgtggcgttgcgctggcgatcttcctgtgcgtgctgtcggtgggctttggcctggtgaagtcgctgaaggacatcaaggaggcacgcgagccgacaccggtttcgcagatcgccgaggccatccggaccggcaccccggcgcagggtgtggtggtcgcgttcggtcaggactggtcctccgagctgccgtatttctccggccgccgcgcggtgatgattccggactgggcatcggacgacgtgctcgcatcgctggctgcagatgacgcagcactgggtggattgccgctggccgcactggtcaactgccccagccaggtgggcagcagccccgagcgcgagcagtggcaggcggagatcatccgccgctatgccgccggtggccagaagcaggacgtcggcggttgcgaggtctggctgcaccgatga

SEQ ID NO: 500937 - DNA, 330 bp, Stenotrophomonas maltophilia
atgaatgcgaccctggcaacccgtgatcggccctggggcctgatcgcgctggcgctggctgttcttgcctgggccggcctgatggcagctgtattcgccttcgccgccagtttcggttcgcccggggatggcagccatggcatgcaggccatgcagtactggatcctggctgcactgaccatgctcgtgctgtcctttgttggcagcctggtggcgatggtgatggcctggcgttgccgccgcggcggcgtattggccgccattgccggtggcctgctggtggtactggtgtcgttgatcctgatggtgatcggggccactctggcctga

SEQ ID NO: 500938 - DNA, 1122 bp, Stenotrophomonas maltophilia
atgaccctgctgttcccgttgggcctggccgcgctcgctgcagggttgctgccgctgctgattcatttggcccggcgccatccgtacacgccgctggatttcgccgcgctgcgctggctgcgcgcacagatccgcccgcgccagcgcatccgtttcgatgactggccgttgctgatggtgcgcctgttgctgctggccgcattggccttgctgctggcacgacctgcgttggtcggccctgccccggtccccactgcctggacggtagtggctcccggactggacgcgaccgcactgcgcggcaccgccgaagcgggcaactggcactggctggcacccggcttccccgctatcgaccacccaccacctgcgtccagcgcatcgctgcccagcctgctgcgcgagctggacgcacagctgcccgcgggcaccgcgttgaccgtgcacgttcccgatcccctgcccggtctggatggcgtccgcctgcagctgtcgcgcgaagtaacgtggcggccgcaaccgataccggccactccgcaaccgagtgccgcgacggtgccgcgtctgcgcgtgcacagcgatgcgtccgccgccgcccagcactgggtgaacgcactgcagcgcgcgtggggcatgcaggcgccgctcgctcctctgtcggccgatgccctgcccgaacgcggcgagatcggcgtatggagccgcagcgatgcactgccggcgagctggcaggcgtggctgcgcgacggcggtcgtgcagtgagcgccggcaagcctgctggcgacgccggcatcctgctgcgcaacgccgacggctcaccagtgctgtggcaacagcgcatcggccacggcgtcctgctgtcactacccggcgactgggatgcctcaggcaacgctgcgctgcgcgacccgcggttgccgcgtgccctgctgctggcgctgcaaccgccagcgtcaccgcgcctcggcgatgcacaggaccaggcaccacgccgagccgcactgcccgccatagcgccccccgcgcgtgagccaaccacgtggttgctgctggccatcgtgctgctgttcgcgctggagtgctggatggccagcagtcgccggcgcagggtggccacatga

SEQ ID NO: 500939 - DNA, 1809 bp, Stenotrophomonas maltophilia
atgaacccctccggcctgaacctgtggatcgccctggcactcgctgtgatcgtggcgatcgccagcgttcgccagtcgcacggcaacaccacgcaccgtggccgccgctggggggtgatcgggctgcaggtcatcgtcgccacgctgctgtatttctgcctggtgccgcccacccgccagcaacccgcaggcgggctggttgtgctcggaatcgatgccagcagggccggcgcgttcccggccagcgaaggtccgctgtggctgttgccggaagctgccgatgtgcccggcgcaaagcgcgtacccgacctggccaccgcgctgcggcagcatccggcctccacgctcaccctggtcggtgccggcctggtcgcacgcgatcgcgatgcggtactgccacgcgacgtacgttggcagccggcagcaccgccgcgcggctgggtcgccttgcagccaccggccgacgccgcgcccggcgcacgcttcgaggtacaggcacaggcgcgtggcgttgccagggcaaaggcggaactgctcgacccggccggcagcgtggtcgatcgcgcggatgttgccgacgatggccacgttcagttgagtggcatcacccgcgccgaaggccgcagcgtgttccagctgcgcctgctcgatgccgacggccatgtggtggacaacgtgccggtgccgcagcagaccctgccggcggcgccgttgcgcctgcaggtacgcgccagcgcgccgggccccgaactgaagtacctgcgccgctgggcagccgatgccggcatccgcgtgcaggtgcaggccgataccggtgccggcctgagcgtcggcgacggcgccttgccgctggacgcggcgtcgctggcgcgcagcgatctgctgctgctggacgagcgcagcctggcggcattgaatgccgcccagctggccgctgtgcggcaggcgctgcgcgaaggactgggcgtgctggtacgcagtgcgggcgcgccttcggccagcgcgcgccagcgcctgcacgatctgggtctgccgctgcggggtgatggcagcagccaggtcctcgaacttcccggcgacggcgagagcgcggtcctcgccgcacgacgtggcccgctcgccgcgggtacgctgccgaccggctacggcgaagaggcagaccgcagttcgcacgacgccgcgctgcccacactggaaacactggcgctgcaggtacctggcagcaacgcgctgctgcacgatcgcaccggcaaggctgtcggcggctggcgcgctaccggcaaaggccgcatcggcctgctgcccatcaccgacagttggcgctgggtgctggccggccgcgatgaccgccacggcgaactgtggagcggcgtggttgccacgctggcgcgggcgcagggcagcgctgaggcgctgtggtcgccacagccgatcagctgggcgggcgaacggcaggcgctgtgcggcgtgcaggcgccgctgcaggccttcaacgcacgcggcgaaggcacgccgctgatcgtcgatggcgcgacgtcagacctgcgttgcgcgggctggtggccgcgcgaggcgggttggcagcgcctgcagcacggcgacgctaccgtctggcgctatgcattcgacccgaaggacgcgcccgcgctgcatcagcaggcaatgatcgatgcaaccacgcaggcgctggcgggcagctccccggcaaccgcgtcggtgatgcaacccgtgccgggatcgcgctggccgtggtggctggcgttcgtgctgtgcgcatcgctgctgtggtggttggagcggcggcgctga

SEQ ID NO: 500940 - DNA, 552 bp, Stenotrophomonas maltophilia
atggttgagcgcgttcaacgcctgatcaatgcggtttcgtccattccaggcgtgcgcaccgcttctgtgaccaagcaggatttgtcggagctggccgtagacgaattgtcgctgttgccctacgcggatctaccgctggccgtattgcggcgtagcgaaggtgctctgtcgcatgaggtgctgattgggatcgagtttgaactggacggcggcccggcaggcttgctggcgctggagtttctgtcgtggtgggtgcgtgacgctgcgcgcagtggagcgctgatgcagttgcgcagcctggcgttgccccccctggagcagcagtttggccagaccctgaagttcaccgtcgactggttccatgctgacccacagcaggacctggaacggctgctgatcgccgtagacgaacgggccgcaaacctggaagcgaccttggatcacttcgccattgccgagcgcatcaaggccgccgctgtcgattcgtccagcagcgacgtgcccgcgcccagtgcgtttgctggacgactgcggaagttcttgactgcgtga

SEQ ID NO: 500941 - DNA, 324 bp, Stenotrophomonas maltophilia
atgcgccctaccaccctgttgctgctggccagcatcctgccgctcgcggcctgcagccatgccgatgccaacggcaccgccgataccggcagcctgccggccaaagtctccgatggcccgcacgaatgccgccccgaggcgctggaagcgttcaccggcaaaaccgccgacgaagccacgatcaagaaactggtggctgacagcggcgcgcgcggtgcacgggtagtcaaacccggcatggcggtgaccatggacttccgccaggaccgcgtgaccgtgcaggtggatgcgcagaaccgcatcgagcgcgccagctgcggttga

SEQ ID NO: 500942 - DNA, 903 bp, Stenotrophomonas maltophilia
atgccgcaccgtcgtcgccttgccctgaccgccctcgccctcgcctgcctgctgcccgccctggccagcgccgccacgccctaccgcagcccgcagcagatcctcgatgcctcggcggccaacgactggcgcacgccggacccggccaacctgctgtacatggacctgccggctgggcgggtgatcatcgagctggcgccgcagttcgccccgcgccatgtcgccaacatccagaccttcgcccacgagcacttctgggacagcaccagcatctaccgctcgcaggacaacttcgtggtgcagttcggcgatgccgacgccgatgacgcggccaaggccaagccgttcggcagcgccgcgcgcaagctgccggccgagttcgaacgcgccagcgccggcctgaaggtcagcgtgctgccggatcgcgatggctgggccgcgcagaccggtttcgtcgacggcttcccggtcggccaggacccgcaggctggcaaggcctggctggcgcattgctacggcatgctgggcgcgggccgcagcaacgaggaagacagcagcatcggcgccgaactgtacgtggtgaccggccagtcaccgcgtcagctggaccgcaacatcacgctggttggtcgcgtgctgaagggcatggagctgctgagcgcaacgccgcgcggaccggcgccgatgggcttctacaccgacccgaagctgcgtacgccgatcgtgtcgatccgccgtgccagcgatgtgccgctggccgagcgcacaccgatccaggtactgcgtaccgactcgaagaccttcgccgatacggtggaggcgcgacgcaatcgcgtggatgatttctacaagcgcccggcggggcatatcgatctttgcaatattccggtgccggtgaagtaa

SEQ ID NO: 500943 - DNA, 183 bp, Stenotrophomonas maltophilia
atggaaagcttcttcgggacgctgaagtcggagttcttttacctgaacagctttgacagcatcgagagtctggaagctgggctggtggaatacatccagtactacaacgaagagcgcatcaaactgaaactgaaaggcctgagcccggtaaagtaccgggagcaggctcaatcggccgcctga

SEQ ID NO: 500944 - DNA, 1101 bp, Stenotrophomonas maltophilia
atgtcgttgatgcgtaccatcctgctcatcctcatcgcgctggtggtggcctcgccggtcgccgcgcagaccgcgagttcgcgcggcaccggctcggccagctacggcctgcgcctgagtgccgatacccgggcccaggccctgaacaaggccaaggtcaatgccctggaggcgtacatcgccgaaaccggtgcggccaagctgcgcctgttcgaagcgcgtcgcgccgagttcatcggcgagatcgaccgctacgtgctcagtgccgtgccgctgtcggacaccgaagacaagaaggccaagacctacaccgtcaccgtccgtgccgagatcaacaccaccctgctgcagaccaagctggatgcgggttcggccgtggccggtgccaccgccgcgcagcgctcgctgctgaccttcctgttcatggcgcgctcgcaggacaccgtgcagtcgttccaggacaaggaataccgccgcgtcgacgccagcagcagctacagcgagaacacccgtgagggtgacagcttccgcggcaactcggtcagcaccaacggcagcatcaaccagaatggttcggtgtcggtcaccagcggcggcagcaccaccgcgcgcgccgacaacatcacctggaaggtggccaacgccgccgaggtcaacaccgcgatgaccggcgccttcagcgccgccggctacgaagtggttgaagccgaatacgtggaaggcgagtcgcgtggcctgctcagcatcgagcgcatccgcaaggacttcagcaccggcaacgacctggccccggccaccctgcgcgacaccgccaacggcatccgtgcggccaacattccgtacatcgccgtcggcaccctcgacatcggcatgcgcgaccgtgatccggccagtggcaacacccgcgtgttcgtcaccgtcaccggcaaggtgctggatgtgaccggtcgtttcccgcgcaccgtgtcgtcggtcggcccggtgcagttctccggtaccggcccgaatgaaaccgtggcccgtaccaacgcactgcagctggctgccgaaaaggccgcccagcagatgatcaacgaactgaacgtcaaggcggtccgctga

SEQ ID NO: 500945 - DNA, 2883 bp, Stenotrophomonas maltophilia
atgaaactcaagtccagccagctgcgtgacgcagttgtgatcgcgcttgtcgccggtgccaccaccgcgacggcccacgcccaggaagccaccaacctcgaccgcatcgaggtcaccggttcgcgcatccgtcaggtcgataccgaaaccgcccagccggtgttgagcctgagccgcgccaccatcgaaaagagcggcttcaagacggttgctgacgtgctgcagaacatttctgccgccggcagcccggccatcagccgttccgaaccgctgtcctccggtgaaatggtcggcggctactacatcgacctgcgcaacctgggtgcacagcgcaccctgatcctggtcgacggcaagcgcctcggcgccagcgtcagcggttatcaggacgtgtcgcagatcccgtcggcgatcgtcgagcgcatcgacgtgctgaaggacggtgcttcctcggtgtacggttccgatgccatggccggcgtgatcaacatcatcacccgcaagaatttcgaaggcctggaagtcaacgcctacaccgggcagtacagtgaaggcgacggccagaagcagagcgccgatttcgttgccggcttcaccggcgatcgcggctcgatcaccatcggtgccgagtactccaacgaaaaggcggtgtgggcaaaggaccgctggttctccgaatcgtcgcgcaccaatcgccatccgaccgccggctggacctcggtcagccagtggggctcggtgttcgacccgaccgatccggacgcaccgtcgctcaccctcaaccgcggcggcaatccttacaacgcggcggacttccacgaaaccgacctgaccccgatcaccggtgacgtaagcaactccaaccagcagatgcagctgctgaccccgacaaagcgtcgcagcgtattcgccaacctgcagtacgaccttaccgacaatgtccgtttcagcggtgacctgctgtacacccgccgcgaatcggaagcgcaggtggccggttacccgctgcagtccgaagcctacgccaacctcggttccatctggtcggccgacagctactacaacccgttcggccaggatatggcgtatgtccgccgtggctgggaagtgccgcgcgtttccaacaacaagctgacgacgttccgcttcagcggcgcgctgcagggctcgttccagttcaatgacaagtacttcgactgggaagccggctacctctaccagaactccgaaaacaaccagagccagaccggcaactacaacgtcctggctgccaacgccgccaccggggcctcgttctacaacccggcaaccggccgcgtggagtgcggaaccgcagcgggcctggctgcgggcaccaacccggcctacggccccggcgccggcggctgcatcccgtggaacccggccattccgttcggccgcaccggtgatggcggcttgaccggcaatccggacctgcagcagttcctgttcccgacgacgcacaacgtcggcgaaaccacgatgacgtcctactacgccaacattgcgggcagcatcctgaccctgccggcaggcgacctgggcttcgcactgggttacgagtaccgcgaggagaagggcaacttcaatccggacgcgctgtcgcagtcgggttactccaccgacctggcggctggcccgaccggcggcaagtacgacgtcaatgaagtgtacctggagctgaacgtaccgatcctggccgacctgcccggtgccaaggaactgagcctgagcgcagccacccgcttctccgacttcagcaccttcggcaacacgaccaacagcaagttcggcctgaagtggcgcccgatcgatcagctgctggttcgtgcgacctactccgagggcttccgcgcgccgaccatcgccgacctgtacggcggcagctcgcagtccttcgagtacttcaccgatccgtgcgatacctcgttcggtctggccgcaaccgacgccgccacggcccagcgatgcgctgccgccctgggtgccctggccccgaacttccgccagctgaagcagggttacgtcccggctgaaggcccggatgagcagagcccggtgccgttcacctccggctccaatccgaacctgactccggaaacgtccaagtccaagaccgttggcctggtctggagcccgaccttcgccccgggcctgaacctgagcctggactggttcaacatcaagatcgagaacacgatcgtttccgataccccgacggatcagctgaacgactgctacgttctgggcattgctgagcgctgcagcaccttcacccgtgacgccacgctcggctacgtcaacaacctgacctacggcagccgcaatgccggcttcatcgaaaccgaaggcttcgacttcgatgcaagctaccgctatgcgaccgacacctggggcagcttcaacttcaacctgcagaacacctacgtcaccaagaacgttctgaagacggccaatgatgactccccggtgcagatctacaatggcttcggcagcaacttccgcctgcgttcgaacctgaccgttggctgggaattcggcgacttcggcatcacctggggcacccgctacttctccagcgtgaaggagcgttgctactacgccaccgagtgctcgctgcctgactacggctcgccggatccggctcgcaaccaggcgcagaacaagcgcggcgccaccaccttccacgacgtccagttctcctggaacgcgccgtggaatgcgaccatcgcggtcggtgcacgcaatgtgttcgaccactacggcccgcagatgtactcggcgccgaactcgcagtactcctactacggcggctacgacatcggtcgcctgatctacatgcagtacaagcagaagttctga

SEQ ID NO: 500946 - DNA, 183 bp, Stenotrophomonas maltophilia
atggaaagcttcttcgggacgctgaagtcggagttcttctacctgaacagctttgacagcatcgagagtctggaggccgggctagtggagtacatcaagtactacaaccaagagcgaatcagattgaaattgaaggggctaagcccggtaaagtaccgggaacaggcccaaccagccgcctga

SEQ ID NO: 500947 - DNA, 204 bp, Stenotrophomonas maltophilia
gtgaacaccacgcccaagacgctgtcgcgttcgttgaacgaccgcatgattgccggcgtgatgggcggcattgcccatcgcttcggctggaaccccaccctggtgcggatcgtgttcgtgctggtatcgatcggctcggccgccttccccggcattctgatctacctgatcctgtggctgctgattccgaacgaggcggattga

SEQ ID NO: 500948 - DNA, 546 bp, Stenotrophomonas maltophilia
atggcggcactggcgctcaagcggctgcgcgccgacaacgctgccggaccattgctggtgttcgacaacgccaccggtcgcacccgcgatttcgatacgcgcggcagtgacgaggaactgctggcgcgggtaaccgaagcgtttcccccctctggcgaggcggatgccgagatcactgccgaagacgctgcggcggccccgcgtggccgtggccgcccgaagctgggcgtggtagcgcgcgaagtgacgttgctgccgcgccactgggcatggctggcagagcagccgggcggggcctcggtggcactgcgaaaactggtggaggcggccagccgcgccggtgcggacaaggaccgccggcgtcgcgatgccgagcgcgcctatcacttcttgcagaccatcgccggtgacctgccgggcttcgaggaggccatccgcgtgctgttcgcgcacgaccgtacgggccttgaagcggtgctgcattcctggcccagggatgtgcgcgaccacgccctgcgcctggcgttcgacagcgccgacggctga

SEQ ID NO: 500949 - DNA, 183 bp, Stenotrophomonas maltophilia; identical to SEQ ID NO: 500943

SEQ ID NO: 500950 - DNA, 369 bp, Stenotrophomonas maltophilia
atggtcggcgatgcagagaagcatcgtgacgatgacctgaagttccaggaactggttgctgcccgaaaccaagccgatgccttggtctatacggtgcgcaatgcggtccgcgaacatggaagcaaggtcggcggcggagtcatcggcgaagtcgaagcggcactgtccagcgtcgagttggcgatgaagggcgaagatagatcccagattgagtcgaagacgcaggcgctggagcgtgcggctgctccgcttctgtcagcggccacatcacaagagcagccgcagacagggggcagtggtcctgaccacggtgccggcggcggtgatgacgtcgtggatgcggacttcaccgaagtcaaggacaagtaa

SEQ ID NO: 500951 - DNA, 204 bp, Stenotrophomonas maltophilia
atgcctcccgagtgctttgatctatacacgaacccagcccgcccaacattggcgctctacgtgcgtaaaggcgccggccttccggaccttgccgattcgtcgggctggtcgatggagggtgaaatctggtctaacgaaattcctcccgatgtactgaagaccctggaagccaatgggcacgtcttccaggagctgggtgcctga

SEQ ID NO: 500952 - DNA, 864 bp, Stenotrophomonas maltophilia
atgtttgagcccagcccagtcctcgcgggagacacagacggcatcgtgcgccggcggaccatccagtggcgtggtgatgtacgccgctcgatcatggacagcgtcgctgaagaagtgccggtggccatgctctacaacgatgttgcgttctcggtgatgatgtcgagccctgcgaatctggaggatttcgctctcggcttctcgctgacggaaggactgattgctgacccgacccagttcctaagcgtagaagtgcgcccgcgcctggaaggcatggagctggccatgacggttaccagtgacgcgccggtccttgctgcagccacaacaaacagagggcgcaacctgcctggccgtagtggttgcggcatctgcggggccagccagctagaggaggtcattcgcaggccaacgccacttgaccatcccgcaacctgctctgcggcttcagtgcgattggctttggcctcgctgaagcaaggccagccgatgaatgctgctgcaggctcaacccatgcggccgcttgggcagaccaggatggccacattctgcaggttcgcgaagacgttggccggcacaatgcgctcgacaagctgatcgggtccctcgcgcgacgctcgatatcgacaagggccggcatcctcgtgctatccagccgcgccagctatgaaatggtcagcaaggccgccattgccggaatggcaatcgtcgctgcagtttcggctccgaccgcgttggcgatcgacctggcaaaagcagcagggatctgcctcgttggctttgcgcgcagtgaaggcttcaatgtgtactcccaccccaaccgtctgttggaactggactccattgcacttgctcatgcatga

SEQ ID NO: 500953 - DNA, 732 bp, Stenotrophomonas maltophilia
atggacgcccgtaccaccctccccctgcccgacgcctgcgacacggccccgcgtgccgaattcctgcgcggcctgcgtgccgccgtgccggtgatgatcggcttcattccgttcgccctggtgctcggcgcgcaggcggcccagaagggcatgagcgcactggaagtgccgctgatgaccggcctcaacttcgctggcggctcggagttcgccgccgtcgaactgtggacctcgccaccgcacatcgcactgattgtggccatcaccgcactggtcaacagccgccacctgctgatgggcgccagcctggccccactgctgcagcacctgccgcgccgtcgtgtgctgccggcgctgttcttcatgtgcgacgagagctgggcgctgggtgtggccgacgcgcgtcgccgcgcactcggcttcagcctggcctactacctgggcgtttcggcagggctgtacacggtctgggtggcctgcacggcactgggcgcgatcgtcgggccgatgctgggcgacatccacgcctatggcttcgacatggccttccccgccgtattcctggtgctgctgcgcggcatgtggcaaggcatgaaagcggcgcggccgtggctggtgagcctggtggtggccgctgccacctacctgctgattccgggcgcgtggtacgtggccagcggcgccctggccggcctggcggctgcctggctgctggcggaggacgcagcatga

SEQ ID NO: 500954 - DNA, 855 bp, Stenotrophomonas maltophilia
atgcagcgccgtcagcccaagcgtacccaaccgggctccgccctcgcgctctatgctgggctgacggcaatccttctggccacaagtgcgtgccaatccatccaactgcctccccgggacctggtcagtcccgatggagggtatgccaccctgctgcgaggcccatcctcacatctgaagatcagcacagtgtcggtgctacccggcccggaaagctcggagtatcccaatcggtccatcgagtgcgggtggtcatccgtcgcaactcgacttctctgggcagatggagcgctttcggccatgcaagcatcacagctctgcgaggccgctgcacgatccgctggactgccgctccaggccaatgggcaggaacggacgcctgtgcattatcagctcacgatcgtaagtgacggaggcggcatctggcgacaactgccaggaccagagcggccgggccaggtggtcagcttctggtttccctccagcccggacgctgattcgctgcgcaggcgcgtgatcgccaccaccgcgcatgagttccagcatatcgccaccgcattgtcaggccagcctcggcgcggccggcaacgggaaccagacgcctatctggctggcgcatgtgcgcagctattgatcgaaggcacccttgcgcgcgcgaacctcccgggcggacacgatccgcgagctgatccgttcctgccatctgctgccagaagctccgcgcacgcgggcagtacgaccggggcagcactgctgcggttcttcggtgacgcagacaccttgcacctcaatgagggaggtcgccacctcgtgcagcattgccacgagacgatcggctttcccctgcagcagtga

SEQ ID NO: 500955 - DNA, 1251 bp, Stenotrophomonas maltophilia
gtgcatgcgcacggtcaggtcaccctgcgacagtgccgcaagcaggccggagatctgttcgatgctgccggcgttggcgtccagcaggccgttgatctgctgcgccagctgcaggaagaagccttccttgtcggtggcgtcaatgcggccggacaggtcgccggcggcggcctgggcgatcacgcgggccacttccgcttcaacctgcgcttcctgggtacggtcgcgccattccaccacgtagccgacggtgtcgccgccttcattgcggatggtcgacaccacctgggcgaactgggcatcgccgtactgcatcgggcgacgcgcgacaccgtgcgccttcaggttgcccagcagggtctggtccatctcgccacggtgctcgagcacggtgaccggcttgccgatcagcgaggcctgggcgtcgaagtccggcaggtcgcggcgcacttcgtcctggtactggctcagggtctgctgcagggcgcggttgctgtagacgatggtgttgctggtgtcggtcaggtacacgccggtcgagctgtagtccagcgcggtgcggatgcgcaggttctcgcgggcgacggcctggtcggtttcgatgcgctcgcgcaggtcgcgctgcatgcgctgcatggcctgcatcagttcgcccacttcgtcttggcggctgacgtcgatatggccatcgagcttgccaccggcgacgtcgttggcgaccgagacggcgccacgcacgctgccgaccagtgcgcgtgcgaacagccacaccagcaccaggccgagcgcggcgccgcccagcagggcgatcacggtcagcacggccgaggcggaataggtggaagcggcctcttcgcgcgaggcgcgggcgaggcggttgtcttcggcgatcagcgcttccagcgccgatgcagccttgcggtgcttggtacgggtttcgccgacgaaggtatcgatggcgtcgtccggcaggtccagttccagcatttcggtgacgctgtcataggaagccagggcatccttccattccttggcgaaggtgtcgaacagcttcttctgttgtgcgttatcgaccagcttcggatagtccttgatcgacttgtccatgctggtgcgcaggtcgacggcccgcttgcgcgcatcggccttgacgtcgtcgctggcgcggatcaactgctggtaggcggcattgcggtactcgcccagcatgccgcgcatctcgccggcgaggcggatgctttccatgcgtga

SEQ ID NO: 500956 - DNA, 813 bp, Stenotrophomonas maltophilia
atggtgtcctccaccgtgggttcgccgacgaacaccttctggaagcggcgctccagcgcagcgtccttctcgatgtacttgcggtattcgtccagcgtggtcgcaccgatgcagtgcagctcgccgcgtgccagcgccggcttcagcatgttgccggcatccatcgcgccatcagccttgccggcgccgaccatggtgtgcagctcgtcgatgaacaggatgatctggccttcgttcttggccaggtcgttgagcacgcccttcaggcgctcctcgaattcaccgcggaacttggcgccggcgatcagcgcgcccatgtccagcgacagcacacgcttgccgcgcaggccttcgggcacttcgtcattgatgatgcgctgggcgagcccttccacgatcgcggtcttgcccacgccgggctcgccgatgagcaccgggttgttcttggtccggcgctgcagcacctggatggtgcggcggatttcctcgtcacggccgatcaccgggtcgagcttgccgctctcggcgcgcgcggtcaggtcgatggtgtacttctccagcgcctgccgctgctcctcggcgttctccgactgcacgttctcgccgccgcgcagcttgtcgatggccgcctgcaggcgggtcttgtcggcaccggcggcgcgcagcgccatgcccagcgtgccgccgtcctccagcgccgccagcacgaaccactcgctggcgatgaaagcatcaccgtgctgctgggccagcttgtcggtctggttcagcaggcgccccaggtcattgcccatcgagacgttgccggcctga

SEQ ID NO: 500957 - DNA, 1371 bp, Stenotrophomonas maltophilia
atgcccaccctcattgccgacttcgatggtgtcaccgttgacgaacgcgccggacaggatctgctgcgccagcggattctccagctgcgactggatcgcgcgcttcagcggccgcgcgccatacaccggatcgaagccgacgttgccgagcagatcgaacgccgcatcggagaccgccaacttcagcccgcgctcggccaggcgcttctccagcccgcgcatctggatgcgtgcgatctgcttgatctgctgcttgtccagcgggtggaacacgacgatgtcatccaggcgattgatgaactccggacggaagtgcgcctgcaccacgcccatcactgccgccttcatctgcgtgtaggcctccgggctgtcgtcggtgctcatgtcctggatctgatgcgagcccaggttcgaggtcatcacgatgacggtgttgcggaagtccaccgtgcggccctggccgtcggtcaggcggccatcgtccagcacctgcagcaggatgttgaacacatccggatgcgccttctccacctcatcgagcaggatcagcgaatacgggcgacgacgcacggcctcggtcaggtaaccgccttcctcgtagccgacgtagcccgggggcgcaccgatcaggcgggcgacgctgtgcttttccatgaactcgctcatgtcgatgcggatcatcgcgtcggcactgtcgaacaggaactcggccagcgacttgcacagttcggtcttgccgacgccggtcgggccgaggaacaggaacgagccggccggacgattcggatcggacaggccggcacgcgagcggcgtaccgcatcggagacgaccttgatcgcctcttcctggccgaccacacggttgtgcagcacttcttccatgcgcagcagcttgtcgcgctcgccttcgagcatcttgttgaccgggatgccggtccagcgcgaaacgacctcggcgatctcctcatcggtcacgcggtcctgtaccagcttgaagtccttgtgctcggcttcctgcgcggcggccagctgcttttccagctgcggcaacaggccgtactggatttcgctcatcttggcgaaatcctggcggcgctgcgcagcttccagttccagcttggcctgctcgacctgttccttgatcttggtggcgccctgcagcgccgccttctccgacttccagatttcattgaggtcggagaactcgcgctccagcccgtcgatgtcgttctccaggtcggccaggcgctgccgcgaggcttcgtccttttcctttttcagcatctcgcgctggatcttcagctggatcacccggcgctccaggcggtccagctcctccggcttggagtcgatctccatgcgcaggcgtga

SEQ ID NO: 500958 - DNA, 498 bp, Stenotrophomonas maltophilia
atgaatgaagtctggggtatgggcgtgaatagactggttatgaagctaaacgacaggcaggacccacgtgggcctcagtgggtcgagaagccggaattaactaaagttgaaagctcagtacgtcgagtgtttgaaaatggaaaaatgttggagctgtcccttctggacgccgatgattttgtgatcagagcattccacattgatagtgctgggcggcagtgtaggtttactctctgcgccgctgacggggataggaagaatagattgcttgaatggtgggagtccagggatagcgaatttcgtggcgcaagtcggtatgttgatgattactttgatgacagaacggtttgccgggacgtggaaattgcggttgcgctggcgctcgagttctccaaagacgggggattgagtgaaaattccatgtcctacttcatttctatgtgggatcctctaagtgtcgagggcagacgtcttgtcgcagagtctctttcgtcgtga

SEQ ID NO: 500959 - DNA, 312 bp, Stenotrophomonas maltophilia
atgatgctcaggtcaccggcggtggccacgatgctgacgtcgccctggctgcggatggtgctgcccaccgccgactggtcgtggctggtctggctggcactggagctggaggcgccgatgccgatgccgatgccgatgcgcaggcttacgccgtcagtagcgccggaagcaccctgctgcatggcgctgccgacgccagcggcggcattggccgccagggcgccatcgacgaggtgctacgtcacgatctcaaagctacacgccgatgttgaagccaacttcgcgctgtcgctcttgttcttcgatgactga

SEQ ID NO: 500960 - DNA, 1299 bp, Stenotrophomonas maltophilia
gtgcatgcgcgcggtcaagtcaccttcggcgatggccgacagcagctgcgagagcttgccgaggttgtcatcgctgaccgccatcatcgcgttgaggttttccagcatcagacggaaatcgtggtcgaagcgctgcgcatcgcctcggcggctgaagtcgccggcagcagcggcgctggccaactgcttgatctcggcgttgatgcggccgaggttggccttgacggtgtcgacggtggtggtcatcgccgccttctcgcccgggtagcgggcgatgtcgcggctcaggtcaccgaccgcgtactgctgcaccacgtccagcacatcgtgcagggtctgcacgtggctacccaccagggagttggtttcctgcaccatcagcccgtattcgccggggaaggcgctggcgtcgatgcggtagctgagttcgccaccgtcgtggcggcgggccatttcgcgctggccggtgatgaccgcatgcaactgctgctgcatgccggccatggcgtccagcaggcgaccggtttcatcgtgcggctgcgggccgatgtggctgtcgagcttgccggcggcgatgccttcggcgacggctgtggcctgcttcagcggtaccgcgatgcggttgccgatgacccagctcagggccagtacgatcagcaccaggacgccgccggagactgccatgatggcggtgaacaccagcgcctgcttctgcacgtcgtccatgtagacgccactgctgaccacccagttccacggcgcgaacagtccggcgtaggcaaccttctcgacgtcgcccttgctgcccggcttcgcccagcgataattgacgaagccaccaccggccttggccgcttcgacctggtcgtagtagatgcgcacaccatcgtcggtgcggaagtccttcatgtccttgccgaccaggtccttgcggaacgggtgcatcagcagccggtagccggtgtcgtagacgttgaaatagtaggtatcgttctctgcacgcatcacttccagtgcctgcagcgcggcgcgcttggcagcctcttcgctgagttcgccggtaccggccaggcggtggtagtgctggaggatgccgtagctcagttcgacctgggtcttcagtgcggtctttcgggtctcggtgagatccaggtactgcatgcgggcggcgatcaccgagagcgcgatcacgccgagcgcgatgagcagcgtcagcaggttgagcttgcgccggacggaaagattgctgaagtagtgttgccagcgatgcaggagattcatcgagcaggacccggttga

SEQ ID NO: 500961 - DNA, 1638 bp, Stenotrophomonas maltophilia
atgaccgagcccgccacgccccccgagcacctgcgcgtcatcatcggcggtaccgcactggccctgctggccgctgcggtgccgatcgcggtcatggcctacgccacctgggaccgcgcgatcagcgtcgaacagcagcgcctgcgcgacatcgccgatcgcaccctgcgccgctccgacctgtcctaccaggaggcgctggcggcgctgaaatccgccgaagccggtgcctacgtgtcctgcagccccgagcacatccggcgcatgcagaccctggtgatgaccaccccatcgattgaccagatgggctacttcgaaggaggcaagctgcgctgcacctcctgggggccgttcctgtcggatgtggatcagcccaggccggaccacgtcaccagcgacggcgccggcatcgcagtggacgtgcgcccggaaatcagcgggcgacgccaggtgctggcgatcctgtatgggtcctacgacgctctggtggacccacgccgcttcgtcgatgtcatcgccgacccgaatgtgcggctggcactggccagccccgatggacgcctgctggccaaacagcccggcctggatccggacctgctgcaggcactgctgcgcgacccgggcgaaggcctggaccacaccacgctgttcgctaccgcgcgcaatgaggaatggctggccgtcgccactacaccgcgcaccgcgcttgccgcggccttccgccaacaggcctggctgtacgtgccggtgggcctgctgctggccgccgccggagccgggctggtgatctggctgtcgcggcgccgcctttccctgcgcgacgaactggctaccgccatccgccgccgcgagctgtacctgcattaccagccgatcatcgaactggacaccggcatctgcgtcggcgccgaggcgctggtgcgctggcaacgcccggatggcacccaggtgcgccctgacctgttcattccgctggccgaagaggccggcatgatcgccgacgtcaccgacctggtgatcgagaacgtggtgcgcgacatgcgtgagctgctggtcgccgaccgcagcgcgcacatcgcgatcaacctcgccgccgaagacatcagcagcggtcgcgccctgaagatgatctcccggcacatggccggcagcggcatcctgccgcagcagatctggatggaggccaccgaacgtggcttcctcgatctggaccgcgcgcgcaccatgctcgccgccgcccgccgcaccggccacagcgtggccatcgatgatttcggcgtcggcttctccagcctgcaatacctgcagcagctgccactggatgcgctgaagatcgacaaatcattcatcgatgcgatcggcaccgaaagcgccaccagcccggtcacgccgcacatcatcgacatggccaaggagctgggcctgtgggtggtggccgagggcgtggaaaccgaagcgcagctggcctacctgcacagccggcatgtggaattcggacagggctggctgttctcgcggccactgccgcgcgatgagttcgtcgccttccatcagaagcggcagcagcagtacggcgctgcacgcgaacacatgcagaacccgcgcagcgtgccgatcgagcgtgagggagtggagtag

SEQ ID NO: 500962 - DNA, 279 bp, Stenotrophomonas maltophilia
gtgcagggcaaggccatcaccacccagaacgtgcgccagtcgctggattacgtggcacggggcgaagtggatgcgggcttcgtctatgccaccgatgcgcaggcgatgcccggccgggtgcgccgtgcgttcgcggtgccggtgtccgggcgcatcgcgtatccgctggcggtgaccagggccagtacgcagccggcggaagccaggcgcttcgctgccttcgtgcgttcgccgcagggccaggcgatcctggccaggcacgggttcggcaagccctga

SEQ ID NO: 500963 - DNA, 363 bp, Stenotrophomonas maltophilia
atgaaagtccagatgcaacggcaagcaattcgcctgcgccttgatgaggaggagctggcgcggttgctggttggtgagtcggtggaaaacatgacgcggctcggcggcgactacggttggggcgtcgtgctgtcgctgcacgccggggaacaggctgtggtcctcagtgcaggtgagtactgccgtctggcgctgccccgcgaagcgattcgaaccttggctgcaagattgccttgtcgagatggcctgggtttcagcatcgccctcgatgacatttcgttgcaaattcagttcgacgtggatgtacgagacagcctgcgccaacgaggtccgcatcgtcgcgcaccctctgtccaagaatga

SEQ ID NO: 500964 - DNA, 567 bp, Stenotrophomonas maltophilia
atgaccatgcgcacgatcacgaacactcccattgatggcatcgtgctggccgggggcctgtccacccgcatgggacgcgacaaggcgctgctgccgtggcacggacgcaccctgcttgagcacatgcgcggcctgctgcggcaggccggttgccgacggctatgggtgagtggcaactacccagccttcggggggattgcagatcgcttggcacgctgcggcccactgggtggcctctacagcgtcgccatgtgcatgcccgaaggcgctacgttggtgctgccggtggacatgcccaatgtgaccccggggctactacagcgattgtttgctgagccgaaaacagcctgcacgttgtttgcggacgagccgttgccgatgcggttgcatattgatgacaagtgccggcgcgtgttgcaggaactgatcgagaagccaccagtccatcgttcgctgcgcgccgttcaggaacgcctgggggcgatcgagctgccactggcagacaacgaacgcaagctgcttctcaactgcaatagcccggccgatctggagtccatcgcatcatga

SEQ ID NO: 500965 - DNA, 381 bp, Stenotrophomonas maltophilia
gtgcgcgacgtcaatgtgggccggcgggtgaccgggatcacctacgacctgtttgaaccgctggtgctgaacgaattcaagcgcctggccgccgaggtcgaagccacgttcgggccgaagctgaagctgtatgtggcccatgccaagggccggcttggcatcggcgatgtagcggtggtggtggccgctggcagcccgcaccgtgacgaggcgttccgggcctgccggcagttgatcgaagtggtgaagcaccagtgcccgatctggaagcaggagcattacgaggacggcgacagtgcgtggagcgagggctgcagcctgtgccatgccgacagcgaacccggccatgaccatgcgcacgatcacgaacactcccattga

SEQ ID NO: 500966 - DNA, 261 bp, Stenotrophomonas maltophilia
atgaaacaggtgaatctgcagttgttcggtgcgttttccgatctggatgccagccgcgagatcgcggtggaggtggctggcagcaccgtggccgatctgcgccaggcgctgcgtgagctgctgccgctgcgttggccgggtttccgtgccgggctgctggattactcggcgttcgccgacaagcaacaggtgctgcgcgatcacgacgcgctgccggacgatggccggctggcgatcctgccgccggtgagcgggggctga

SEQ ID NO: 500967 - DNA, 1104 bp, Stenotrophomonas maltophilia
atggacggcttcgcgctgcgcgccaacggcgcgacgttcgaggccggcaccgagttcgcggtgcagggctggcaggcggccggcgatgccggtgccgaaggcggcgagggtgcctgggaaatcatgaccggtgcgcgcatgccggttgggctggatacggtggtgccggtcgaaaatgtggacatcctcgccagcgaagaaggacgcccgacccgcattgccctgaagggcacggtgaagccaggccagaacgtgcgcctgcgcggcgaggatgtaagcgacggcgagcgcgtgctgcaggccgggcaggtgctggacatcaacgcgcgcaccctgctgcatgccatcggcgtgggcgaggtggcggtggtggcgcggccaaaggcggcggtgattgctaccggcaaggagctggtgaccgaggcggcgcagccgctggcatccgggcagatccgtgacagcaaccggccgtatctggtcggccgcctgcaggccgccggtgccgacgtggtctggcagggcacggtgggcgacgacgtggccgcattcaacgcggtgctggatgaagcgctggacgcgggtgcgcagctgttgatcagcaccggcgcggtgtcggccggccgctacgatttcgttcccggcgcactgctagcgcgcggagccatcatcatcttccacaaggtggcaatccgcccaggcaagccactgctgttcgcggtgctgcccaatggtgcgctgtacttcggcctgccgggcaacccggtgtcggctgcggtgggccagcgcttcttcgtcgagccggtattgcgccgcctgctggggctggcaccggagtcggtgttgacgttgcccctgcaggccgacgtccgcacgccccctggcctgcgcttccacgcgcgggcgcgggtggaagccgatgcgcagggccggctgagtgcgcgcgtgctcgccgggcaggagtcgttccgtttgatgtccatgctgcaggccaacgcctgggtggtgctggaaggcgagggcggtctggcccccgccggcacgccggtgcgtgtgcagggctggggtcatcatgacccggtgcagctggcgagccaggagccgtga

SEQ ID NO: 500968 - DNA, 264 bp, Stenotrophomonas maltophilia
atgctcgacgcagaggatatcgatgcttacgacaaagatgacagacggctattctccagagcacggaagaagcttgggcccttagagatcggtgaatgctatggattccagccactgctttcactgggtggggagaacaccatcgagaatctgaagaaggtcgaggccattgagcatttagggatcctgtgccagacacaggacttctccttatacgagtattcatcgtatggaacccgggcgcttgtcagatcattcagttga

SEQ ID NO: 500969 - DNA, 243 bp, Stenotrophomonas maltophilia
atgcataagttctatctctccgatgccgaagacttcgtgatagaagaaaatattgccgaacgcactatggcaaaacgcatggcaattcgtactgttgaattgctcgtcgcggtcgaacactgcatccagaatgcctttgaaactcctggggtggcatgtctggagctggccttgcagtgtgaagaaaaagcccagcttagcgaagagttcgcggagttgatcaggaagggatgttggaagtga

SEQ ID NO: 500970 - DNA, 435 bp, Stenotrophomonas maltophilia
atggcgatggcctggccggcgttggcgccgacctggaacagctggctggagaacgaaccgtccagcagcttggtgccgttgaagtccgactgcttggcgacgcggtcgatttccgagaccagctgggtcacttcggcctgcagcgccttgcggtcgctggccgagttggtggcgttggcggcctgcaccgacagctcgcggacgcgctgcaggttgttgccgatttcggtcagcgaaccttcggcgacctgggccagcgagatgccgtcgttggcattgcggatggcgacgtcggtaccgcggatctgcgtgccgaagcgctcggagatcgccaggccggcggcgtcgtccttggcgctgttgatgcgcgaaccggaggacaggcgctggatggtggtagccagcgagctgccgctggtgctcaggttacgctga

SEQ ID NO: 500971 - DNA, 351 bp, Stenotrophomonas maltophilia
atgcggctacgcgaagccgacaggttctccgacgaggtctgcaggttggccaccaccgaggtgaagcggttctgcacggcgcccaggtcggcacgagtgctgttgatcgcactcagggccttgtcgaccacttccatcgcctgctgtgcgcccttgaccgtgctgacgtccaggtcgctggcgaacttggacgccggtgcggcggtcgccagcgtggcggtgaaggtcggtgcggtagcgccggtccaggtgcccaccgaagcggtgatggccttgaacgagccatcggcgttgacgctgtccttgaccgaggtcagggtgacgccagcggtgccgttcacttcggcgtag

SEQ ID NO: 500972 - DNA, 603 bp, Stenotrophomonas maltophilia
atggccgaggagcgaatccagggcaagaccaaaggccgattccgacccaaatcctccggcggatcatctcagctcgcccccaacctgctggatcggcaatttgcccccggaaccggaccgacggcctgggtcggggatatcacgtatgtccccacccgccagggatggctgcatctggccgtggtcatcagcgtccagacccggcaggtgctgggctacagtgtttccaagcgtctgactgaagagctggtggtgaaagcatttgccaatgcttgggctctgcatccacaacgacccggcctgatcttccattcagatcgtggtgggcagtactgggggaaccagtttcgccagctgctgcagtcccatgaggtggtccaaagcatgagccggcctggcaattgctgggacaacgcggtggccgagagcttctttgccacgctcaagacagaagaggctgccgagccttacgccagtagagaacaagccagccagtccatcgctgcttacatccacggcttctacaatccagcccggctacactcggcgctgggctaccactcgcctaacaactacgcccggcagctccgggctgccgcctga

SEQ ID NO: 500973 - DNA, 294 bp, Stenotrophomonas maltophilia
atgtcccgtatcacccgtcgtagctacaccgatgagttcaagcaccaagccgtggagttggccgagtcgctcggacctgccgcagcagcccgtcagctggagatgtcggtcaagacgctggcaaattggcttgacgcggtccgtgctggccggtcgttgacctctgaggctcgcaggccagccaccgacctggaaagcgagatcagccgccttcgggccgagaacgccaatctgaagatggagcgggaaatcctaaaaaaagcggcggcgttctttgccagagagtccaagtga

SEQ ID NO: 500974 - DNA, 522 bp, Stenotrophomonas maltophilia
atgaacagatacgacgcgcgtttcaaactgcaggtcgccaaagaggcctgcaagacctccacatcggtcaaagccgttgctcgtcgctacggcctggagttctccacggtcaggcgctgggtggcgacctatcggctgcatggttggcgcgggtttcgccgccaggcccagtcctatgacctcgcattcaagctggctgtcctgaagaagatgggccaggacggcatgtccgggcgggaggccaccacttactttcaaattggcgatgccggcgcggtggggcgatggcggcgcctgtatgctcaaggcggtgcccaagcgctggcaccacctccgccgccgccccgaaagccgatgaaaaagacccgttcgtccaagccacctgaggaaatgagccgcgatgagctgctcaaggaagttgcctatctgcgtgcggagaccgactacctaaaaaaactcgatgccttgatccgggaagagcaggcggcgcaggacgcaaagcgcaagccatccaaggattga

SEQ ID NO: 500975 - DNA, 564 bp, Stenotrophomonas maltophilia
gtggaagccgcgcgtgccggtgaacagggccgcggctttgccgtggttgccagcgaagtgcgcaccctcgcccagcgctcggccgccgccgccaaggagatcaagggcctgatcgacgactcggtcggcaaggtcaacgatggctcggcgctggtgcacaaggccggcgccaccatgggcgagattgtcgcctcggtgcagcgcgtgaccgacatcatggccgaaatctccgcggcctcgcaggaacagtccgccggcatcgagcaggtcaaccagaccgtggtgcagatggacgagaccacccagcagaacgccgcactggtggaggaagccactgctgccgcgcgtgcgatggaagaacaggccggtcacctcagcgaggccgtgtcgatcttcgtggtggacgaagccgataccgtggttgccccgccgcgcaccgctgccccggccccgcgtccggctgcaccggcagcaccggctccggctaccccgcccgcccgacgcacggcgggtggtcgcccgatggccaccgaactggccgatggggactggcaggaattctga

SEQ ID NO: 500976 - DNA, 276 bp, Stenotrophomonas maltophilia
atggacgagaccacccagcagaacgccgcactggtggaggaagccactgctgccgcgcgtgcgatggaagaacaggccggtcacctcagcgaggccgtgtcgatcttcgtggtggacgaagccgataccgtggttgccccgccgcgcaccgctgccccggccccgcgtccggctgcaccggcagcaccggctccggctaccccgcccgcccgacgcacggcgggtggtcgcccgatggccaccgaactggccgatggggactggcaggaattctga

SEQ ID NO: 500977 - DNA, 732 bp, Stenotrophomonas maltophilia
atgagccacccattcgacgacgtcagcccgggcggtagcccgatcctggtgcacagccgccagaaggacttcaccccgccgcagggtgaagcgcatatcgaggcgatcagcgcccacctcgaacgccatctgggcccggtgtccggcgtcttccacgagatcatctccgacctggtgcacatcgacgtgcacgtggtgccggccaatgaccagttcccgtacctgcgcctggtcacttccggcatgagcgacctgccgatgaccgtgcccgccgaagtcggtgcggacgtgccgcgctacatggaactgatggtgaccctgccggccgactggccgatcacgcaggaggctttcgaggacgaacgcaactactggccggtgcgcctgctgaagggcatggcgcggctgccgcacgagtacgacacctggctgggcttcggccacaccattcccaacggccatcccagcgagccctatgcgccgggcgtgggcttcgacggcgccatcgtgctgccgccggtgactaccccggatgacttcgccacgctggaactggacgacggcaggaccatcagcttcatgaccctggttccgctgtatccggaagagatggacctgaagctgaagaagggcgccgaggcgctgctcgaccgcttcgatgcgaagaagatccaggacgtgatcgaacccggccgcaccaacgtggccaggaagcgtttcgggctgttctga

SEQ ID NO: 500978 - DNA, 732 bp, Stenotrophomonas maltophilia
atgacagggaatcgaagcgtgctggtgaccggcgccagccggggcattggccgggccatcgcgctgcgcatcgcgcgtgacggcttcgacgtggtggtgcattgccgcagccgcgtggatgaagcgcaggcggtggtcgccgagatcgaggcactgggccagcaggcccgcgtgctggtgttcgacgtggccgaccgcgcgtctgcgcgggccgcgctggaggccgatgtcgaagcgcatggcgcttactacggcgtggtctgcaatgccggcatcgcccgtgacggcgccttcccggcgttgtcggccgacgactgggaccaggtcatccacaccaacctggatggcttctacaacgtgctgcatcccctgatcatgccgatggtgcggcggcgcaagccgggccgcatcgtcaccctgtcgtcggtatccgggctcgccgggaaccgcgggcaggtcaactacagcgccgccaaggccggcatcatcggggccaccaaggcgctggcgctggaactggccagccgccagatcaccgtcaatagcgtggccccgggcctgatcgagaccgaaatgctcaacgatgaagtggttgaacacgcgctcaagctgattcccgtcggccgcgtcggtcgtcccgacgaagtggcggcgacggtggcgttcctgctgtccgagccggccggctacatcacccgccaggtgatctcggtgaacggaggcatgatctga

SEQ ID NO: 500979 - DNA, 1239 bp, Stenotrophomonas maltophilia
atggccgccgatcgtcgcgtggtggtcaccggcgccgccgccatcagtccgctcggccacgactggtccaccatcgaagcgcacctgcgcagctgccgcaatgccgtgcgtgcaatgcccgagtgggatgtgtatgccggcctgaacaccaagctggccgcgccggcgcaggacttcgagctgccgccgaactacaaccgcaagaccacccgctcgatgggcaaggtcgcgatcatgtcggtgcgtgccaccgaggtggcgctgcgcgaggcaggcctgcacgagcacccggtgctgcgcagcggccgtaccggcgtggcctatggttcctcgtcgggcagccatgaggccaccggtgaattcgggcgcatgctcaacgagttcaccaccgatggcatcagtgccaccacctacctgaagatgatgagccacaccgcgccggtcaacatcggcgtgttcttcggcctgtccgggcgcgtgtacaccacgtccagtgcctgcacttccggcagccagggcgtgggtgcggcctatgaagcgatccgcagcggcaagcagacggtgatggtggccggcggtgccgagcagctcgatgccaccgctgcggcggtgttcgacacgctgttcgccaccagcgtgcgcaatgacgcgccgcagaccacgccgcgcccgttcgatgccggccgtgatggcctggtactgggcgagggcgcctgcacgctgatcctggaggacctggaacacgcgcaggcgcgtggcgccaccatcctggccgaggtggtcggctacggaaccaacagcgatggccagcacgtcacccagcccagcgccgacaccatggcccaggccatgcgcctggcgctggaagatgccggcctggacgcggcgcagatcgactacgtcaacgcgcacggcaccgccaccgaccacggtgacatcgccgaaacccaggccaccgcgcaggtgttcggcaaccgcgtgccgatcagctcgctgaagagctacgtcggccacatgctgggtgcctgtggcgcgttcgaggcctgggtgagcatcgagatgatgcgcgccggctggttcgcgcccaccctgaacctggccgaggtcgacccgcgctgtggccagctcgacttcatcaccgggcagggtcgcgaactgcaggccgagtacgtgatgagcaacaacttcgctttcggcggcatcaacacctcgctggtgttccgccgctggcgcgagtga

SEQ ID NO: 500980 - DNA, 150 bp, Stenotrophomonas maltophilia
atgattgtgtcggaaagccgacagcggggaaagccgtcagccgacgatggcggcgtgatcggcggcgtttccccggcggggttcaacaatgtggcggcgacgttcagccagcgccgccgccacacgggcgcttacttgaccttggcgtag

SEQ ID NO: 500981 - DNA, 141 bp, Stenotrophomonas maltophilia
atgctgcccttcgtcctgaagcggctcggcttcgatccggccagcgcctcggcgccgttcgtggccaccctggtggatgtcaccggcctggtgatctatttcagcatcgccgcgctgatcctgcacggcacgctgctgtaa

SEQ ID NO: 500982 - DNA, 261 bp, Stenotrophomonas maltophilia
ttgaagaaggtgttctatatcgctgttgcagtgctggtgttggcgcggctgattgatttcgtgttctacggtggccatgcctacgacctggtggcgacggtggggtttgtcgtgctgtttgccggtgcgctgctggaggagcgcgcgcgggccatgaatccgccgccggttcgcctgcggcgccgggccaatgtcatcgcggcgtgcggcatcgcactggtgctgggctctttcctgctggagtggaaggtcttcggttga

SEQ ID NO: 500983 - DNA, 474 bp, Stenotrophomonas maltophilia
atgcgtcccagcctcctgcttgcctcactcctgctgctgcctacgtgcaacagtgccagcgccgcgccgtccgacacagcccacccgatggcgcgcctgctgggtgcggacgttcagcagcgctacctgccgcagggcatgagcgatgaactgtcgatccggcgtgcctatgaacagggcattctgcgttcgccggactttccttcgctggaaatctccggcgaccaggctttcatcttcttcgcccagttcgcgcgcagcaggatggggccgaccttcaataccttgaccgtgtgccacaatccagacggcttccggctgttggtcggaggtggatcgcgccagtcctgcgcagcacgccccgacgcggggatgcggttcatccgccaacgaaatggcgacctggtgtgcgagccctgcgctgcgctcaacttgccggagcgctgggagcgccacgaccgccacacgcattga

SEQ ID NO: 500984 - DNA, 885 bp, Stenotrophomonas maltophilia
gtgagcctcagcccgcaggcgagcgcgctgccgggacgggtgctgatcctcggcctgggctggagcggacgcgtgctggccgcgcagctgcaggcgcgcggcgtgcaggttgccgggacagtacgtgatccggcagcgtcgcccgacgatggcctgcgtcggtacccgttgcaggccggtaccccgcctgcgcccggcctgctcgaggagatcgcgcgcgccggggccgtactgtgcagcgtaccgcccgatgccgagggtgacccggcgctgcgcatgctgctgccggcgctgcacgccagcccggccttgcgctgggtcggctatctgtcatcgacctcggtgtatgccgaccgggccggcggctggatcgacgaatccagcgtggcggacgccactgaagccgtcggcgtgcagcgtcggctcgcggaagcccagtggcgtgcgctggccgagcaacggggcattgcctctgcggtactgcgcctgcccggcctttacggaccgggtcgcaatgcgctgctgcagctggcgcaggggcgtgcacgccacgtggtgcgccccggcctggtgttcaaccgcctgcacgtgcaggatctggccgcggtgatcatcgcggcgatgcagcgaccggtagcgcaggggatgtacctgcccagcgatgacgagccagcaccgccgcaggacgtgctggccttcgccgcgcagctggggggatttgcgatgccacccgccgtggcctgggatgacccggcgctgagcccggccctgcggcgcttctaccagagcagcaagcgcatcaacagtcgcggcacgcgtgccgcgctggggtggcagccgcgattccccagctaccgtgagggcctgcgcgacctgctccggtag

SEQ ID NO: 500985 - DNA, 939 bp, Stenotrophomonas maltophilia
atgcgcatcctgatcctcggcgccggcggtaccggcggatacttcggtggtcgcctggcccaggccggcgtcgatgtcaccttcctggtgcgcccggcacgcgccgcacagctggaccgcgacggcctggtcatccgcagcccgctgggcgatgcccgcttcccggtgcagcacgtcaccgccgatgcgctgcccgcgctcgctgcggagacaccgttcgatctggtcatcctcagctgcaaggcctacgacctggacagctccattgacgccattgccccggccgttggcgcgggcaccacggtgctgccgatcctcaatggcctgcatcactaccacgcgctggacgcgcgcttcggccacgaggccgtgctcggcggcctgtgcttcatcagcgccaccaaggcacccgatggcgcggtgctgcacctgggcaaaccggccaagctgacgttcggcgagcgtgatggcggtgcggattccgcgcgcgtgcacgccttcgctgcggtctgcgcgaaggccaacctggaccacgtagccagcgaccgcatcggccaggaacagtggatcaagtacaccttcctgaccgcgctggcggcggcaacctgcctgctgcgtgccgacatcggcaccatcgtcgccaccgatgatggccaggccatcgtgcgcggcctgtacgacgaatgcctggccgttgccgaagccgccggcgaaccgattcccgaggccgcgcaggacaccgcgcgcggcaccctgacccaggccggctcggcactgaaggcatcgatgctgcgtgacctggaagcgggccagcaggtggaggccgagcagatcgtcggcgacatgctggcgcgtgcgcgcaaggccgaccaggaagcgctgctgctgcaggtggcctacagcagcctgcaggcctaccaggcattgcgcggcgcgtga

SEQ ID NO: 500986 - DNA, 1155 bp, Stenotrophomonas maltophilia
atgcatctgtcccatcggacgtttttcgcgctgtctgcgcttgccggcatcgtcgcctccggcagcgcgttcgcccacggcaccctgtccaaaccctccagccgcgtctacgcctgttaccaggggaatcctgaaaacccgacccatccggcctgcgccgccgccaaggcgatcggtggtgcgcaaccgttctacgactgggccgggatcaaccaggccgaggccgatggcaaccaccaggccgtcgtgccggatggcgagctgtgcagcggtggcaacagcaagtaccgcggcctggacctgaaccgcagcgattggcagacttcgccgatccgcgccgacgcacgtggccgctacacattcgagttcaaggcaccggcaccgcacgccacccgcgactggacgttctacgtcacccgcgagggctggcagccgggcagcccgctgcgctgggccgatctggaggcgttctgcacgctgggcaacgtgccgctttcgggcgatgtctacaagttggactgcccactgcccaagcgcagcggccagcacgtgatctacaacacgtggcagcgctccgattcgaaggaagcgttctatacctgtgccgacgtccgttttgaggggggtgacatcaccccgccaccggagtgggaagacgcgggggcgatcaccgcgcggggggaactggagaccggtaccaccctgaccgtgcgcgtgttcaacgccagcggcaatgacctggaaagcccgaagatcacccttgccgccggggagacctccgccacgcaatggccgctggcgctgggccgcaaggtcaatgcttctgcccagcatgcgcgggtgggcgtactgaacaacggcatcatcacccccatcgcctcggccaccgggaaccgcgtctacctgaagccgggccatcgcttccagctcgacacggcgttgccggatccggtcgatccgccgccgggtgactacgacttcgtgtatccggaaggtatcggcagctataagcccggcgaaaccgtggtcaagggctcggacggcaagctctacgcctgccgcccgttcccggagggcgcctggtgcaatgtcaacgccgaagcctaccgtccgggtaccggctctgcctggcgcgatgcctggatcgagtactga

SEQ ID NO: 500987 - DNA, 711 bp, Stenotrophomonas maltophilia
atgccccgacaagcgcgcctgatgctggccggccaggcctatcacgtgatccagcgcggtgtgaacaagggtgcgatcttcgtcgacgacatcgaccggcaactgttcctgcatctgctgcacagcgctttcctcaagcaccgcgtcgcactgcatgcctacgtgctgatggacaaccacgtccacctgctggccacgccatccacgcagcgtgggctggccgatgcaatgcgcatgcagggcaacaactatgtgcaggctttcaaccagcggcacggccgcaccggtcccctgtggcagggccgcttccattcctcaatgatcgacagcgacggctacctgctcagcgtataccgctacatcgaacgcaatcccgttcgtgccggcattgctgtcagcgctgaagatcatccgtggtccagcgtgcacggcaaccttcaacgacgcgctgatcccatgctgaccccgcatcccgcattcagagcgttggccgcgaccgctcgcaacaggacgacggtgtatgcgcgattcctgcgcgatgtgaatgcgtccgccgatctgcccgcaatccgcagtcatagcgccaaacagcgcccgttgggggatgctgccttcctgcggatggtagagcagacgctcgggcgcccggtggcgatgcgaagacaaggccgcccgcgcaaggaggggacgggaggggcagaaacgacttaa

SEQ ID NO: 500988 - DNA, 474 bp, Stenotrophomonas maltophilia
atgagggcggtgccatcgttgttgctggggatggcactggccctgagcggttgcgcgccgggcggccttccgcacgcgctgaccggtggcaaggatcagccgccgcgcgccggtgtggacgtgcgcctgagcgcggtcgatgcggccggcaacggcactccggcgcgctggcaaggtgaaaccctggccctgcgcgagccgccgattgccggcagcgccgacatcgccgatgtgcgctacgtgctggatcaggacaagcaacctggcctgcagatccgctatcgacccgaagcgcaccagcgcatccacgatggcacggcagcactggtcggccagcgagcggcgatcagcgtggatggccgcgtgctgatggtggcgacggtgaaaggcccgttcggggaatcgatgatgctgagcgggctgccgagcgttgccgaggcgcaggcgctggccaggcacatcaccggtcagtga

SEQ ID NO: 500989 - DNA, 516 bp, Stenotrophomonas maltophilia
ttggctgtctttccacccgcgactgaccgcgacagcttccgccaatgcggtgattactggctgaacaagcgaaatgtctacttcgaatccgggacttcgctgaaagcctcggccgaggccaactgcgccaccttccgcagtatgggcggctacggtgccgacgatcacggcggctggtactgcggccgacgcatggagcattgcctgcgcggcgacctgctgcagacaatcccgcaggacgcgctgtacgccgttgacgacagcagcgtctattgcgacgggaagcctcagcccggcgtggatcacgcgcgctggcggctgctggatggacacttctcgggcgattgcagccgcgtctactacttggaacggaagctgccgcgcgtggatgtggcgtcgtggcgtctgttgcaggggagctggccgcgggaccataaacacctgttccatatgttcatgatcgagaccgacccgatgctgcgtgcacagcatggtttcacggatgatgagggttga

SEQ ID NO: 500990 - DNA, 309 bp, Stenotrophomonas maltophilia
atgcccggtactactgacctggagctcttcgacgcggccacccagcgtggcatccgcatacacgttacccaggatcatcatcatcgcaagcccgcagagcgcgaggcgatcgcacgcctcggcctgaccgtattcgttctggccaagggctggagcaccttcaaccactacgagcgcgcagcgcggcttctggagtggtggcccaagatgatgcagcaagccgaactcgtgcaacctggtgcaatgttccgcgtaccgcatgccagggcgtccgggggacggctgacgcagatcaaggtgtcacggtaa

SEQ ID NO: 500991 - DNA, 705 bp, Stenotrophomonas maltophilia
atgggtatcgccttgccagcacaggacagcctcggcgtcggtctctattcctacgccgatgccgcgcgcttcattggcggcagctcgtcggaactgcgccggtggctgaagggctaccatggccggaagcacgggaagccggaagcccaccctcccctgtggaagtcgcaatgggctgattcagagatcgacggcattggctttcgcgatctgatcgagctgcgcttcgtccgcacattcgtcgcatgtggcgtgccactcaacctggtgcggcgaaccattgtcgagctgaacgagcggctcggtaaggagtaccccttcaccagcacgagcttcaagaccgatgggcgccgcattttcatggagctcgtgggcgacagcggcgatgccgcactggtggatgtggtgaagcgccaggacgtgatgcgcaaggtcatcgcaccttcgctgcgtgacggcatcgaactgggcatcgatgatcgagccgaacgatggttcccactgaagggctcccgtgcggtggtatttgatccacagcgcagttttggtcagcccatccttgccgaatcgggcgttcctaccatcgccattgtcgaggcgctgcgcgccgaaggtggcgatgagcgtcgcgtggccaggctgtatgacctacctctgactgcagtgaagaaagcactgcagttcgagaatcgagccgcgccttga

SEQ ID NO: 500992 - DNA, 1767 bp, Stenotrophomonas maltophilia
atgaagcgacacacgcaacgctccgcgccaccgcgctctgcgcgcctggcccttgccactgccctggtgctgggcagcctggccgccaccgcgcaggcccaacaggccgacccgctggcgggtatccagtggcacctgctcaacaccgggcagaccgtcccggccgacacccggccggtggccggcaacgacctgaacgtcgatggcctgttccgcaacggcatccgcggccagggcgtcaccatcgccatcgtcgacgatggcctgcagatcgcgcacccggacctggccgccaacgtggcggcggtggccggcaagaacttcaccaacggctcgaacaaccccaccccgaccaacccggatgtcgacaaccacggcaccatggtcggcggcattgcaggcgcggtgggcgccaacaacctgggcgtgcgcggtgtagccccggcggcgacgctgaagggcttcaacccgatttcgcgctcggccctgggcaaccagcagagcaacatcgagtacgcctggtgggacggcgcggaatcggccgacgtgcaggtcttcaacaacagctggggcgccggcccgggcaatccgaacctgccgctggcgtacagcgaaaacacgattcgttcgtatgagcaggccctatcgggcacgcgcggtggccgcggcggcatctacgtgaagtcggccggcaacaacttcaacaatgcctcgatcagccagacccaggatgtctgcaccaccgacaccaagaaccgcaacaccggctgcgtgccggctggccgtgatccgcgcaacaacctgttcaacgtgatcaccgtaggcgcggtgcgtgccgatggcgtgcgctcgtcctactcctccaccggctcggcgctgtgggtctcggcctttggcggtgagtacggcctgcaggcccagtacgcacccggcctggtggcacgcgcgtacgacccggccatcgtcaccaccgacgtgaccggatgcgcgcagggcagcaacaccaacaccaaccgccagaacactctggacagcaacctgtcggccatcgacagcacctgcaactacaccgccaagatgaacggcacctcggcgtcggcgccgatggtatcgggcgtggcggcgctggtgctggaagccaatccgaacctgtcctatcgcgatgtgaagtacatcctggccaccaccgccacccgcaaccacccgaaccagccggcggtgacgctggccgacggccgcacgctggtgccgggctggacggtgaatgctgccggccgtgcctacagcaactggtatggcttcggcgtggtcaacgctgcacgcgcggtgcaggtggccgagaacttccagtcgctcggtgcgctggtcgacagcggctggcgcaacaccacgcgtaccgtggccatcggcaacacctcggccgccgccgcacgcctgaccttccagttggccaacggcgcgcgcaacatcgaaagcgtgcagctgggcttccgggtcaaccaccgcaacacgcgccagctgcagttcgtgctggtgtcgcccagcggcacgcgcagcgtggtacagccggcgttcaccgcgatcggttcgggcacgggtggcgcgcagagcaacttcaccagctgggacctgctgtccagcaatgccttcctggatgagaacgccacgggcacctggacgctggaagtgaccgacatggggcaggccgcgaccgctgcatcgcgtggcaacctcgaattcttcaagatccgcgttctggggcactga

SEQ ID NO: 500993 - DNA, 927 bp, Stenotrophomonas maltophilia
atgagcctggcgctggtccacagccgtgcccgcgccggggtcgatgccccgctggtgcgggtggaagtgcacctctctggcggcctgcctgcgacccagattgtcggactggccgagaccagcgtgcgcgaatcccgcgagcgcgtgcgtgccgccctgctctgtgcacgcttcgactttccgcagcggcgcatcacgctcaacctcgcgcctgccgacctgcccaaggaaggtgggcgctacgacctggccatcgcgctgggcattcttgccgcgagtggccagatcgatccgcagtcgctgctgcagtacgagttcctgggtgagcttggactgaccggcgaactgcggccggtggccggagcgctgccggccgcgattgcggcggcagacgccgggcgcattctggtggtgccgccagggaatgccgccgaggcagctttggccgagcatgccgatgtgcgggtagcgcgtacgttgctggagtgctgtgccgggctgggcaatccacgcctgctgccacccgtggagcgcgtggacacgacgccgttgccgctacccgatctggccgacgtgcgcgggcaggcgcatgcgcggcgcgcgttggaagtggcggccgccggtgggcaccatctgttgttgatcggcagccctggctgcggcaagacgctgctggcctcgcgcctacccagcttgttgccggataccgaagagactgaggcgctgcaactggccgcgattgcgtcagtgagtggcgaagggttggacccaagacgatggcggcagcggcccttccgggcaccgcaccacagtgccagcgcggcggcgctggtgggcggcggcaatccaccctgccccggcgagatctcgctggcccatcacggtgtccttttcctcgatgagctcgtccttaggtcgtcaagttga

SEQ ID NO: 500994 - DNA, 1548 bp, Stenotrophomonas maltophilia
gtgcgatattcgatacgactcgttgctgcgtgcgtaatgtccgtggtggcctccggctacgcaggcatccccgatgcagcggcgcaggaaccctactggccgacccaggaatggcgccactcctccccggaagcgcaagggatagattcggaggtactgaccaacgccttcgactacgtgcgcgcgcaccagacgcccatccacagcctgaccatcatccgcaacggctatgtggtggtggatgcctatttctggccgttccagaaagggcagtaccacgatgttgcgtcggtgacgaagagtgtcaccaccacgctggcgggcatcgcgatcggcaagcacgcgctggaactgcaccagccgctgacgtcggtcttcgccgcccagggcatcgcgaatctggacgaacggaagaagcgagtgacactcgagcatctgatgacgatgtcctccgggttggactgcgatgccagccagggcgaaatcacgctgtcgcggatgaggcagagcagcgactggagccggttcatgctggacctgccgatgcgcgacgcgcccggcagccatttcgaatactgctccggcggcatgcatctgctctctgcggcgatcaccaaggcgacgggccagagtgcgtttgacttcgcccgtcgcgagttgtttggcccactcggcatcacccatgcggcctggccagccgatagccacggggtttcgtatgggtggggcgatctgcaccttgagcccctggacatggcgaagctgggctacctctggttgaacgatggccgttgggaaggccggcaactcgtcccggcagcatggatgcgtgctgcggtccgaccgcaggcgcagctggaaggtagcgacgagcagtacgggtacggtctttggctgcagccggacaggaagccgtcgctgttcgaggccaatggccgcggtggccaacgtatcagcgtaagtccagagaagaatatcgtcgtcgtgtttaccggcgggacgttcgaacccggcgatattggcgccttcattcttgcgtcgctcacgtctgaccagcccttgccggagaatccggcggcggtggcacggttggcggccgcggtgagcgacgcggcaagaccgcccccgccggtatcgttcatgccgccactggcacgcacggtgtcaggcaagcggtacgtactgtcggagaacccgcttggcgcgaagtcgctgatgctcacgttctcgggtgcagaggtggcgcagctccaacttgaattgaacagccgccacgagccatcccggccggttgggttggatggcactccgcgcgtgtcaggcaatggaaatttcggtctgcccgtagcagtaggtggcagatgggagagcagcaacacctttgtcttcgactacaacgagatcggaaacatcaacgcgctccggttccggctgacgttctcgggtgacgatgtcgttgtggacctgagcgagcgatcgcaggtgattcaacctacgcgattccggggtacgtcgggcaaccgggttgcgcctgcgcaggttcactga

SEQ ID NO: 500995 - DNA, 669 bp, Stenotrophomonas maltophilia
atggaaggctggcatggagtaggggagataagaggagtggcaatggttcctgtatctatcttaagtgttatccggtacggggccgattctcggatgcggagcggttccatacgcgccgctgtatgcgttgccctcgctgttgggcttggcctggttggcccggtcagtgcgattagcgacgacggtgatggtcatgagacagggcttggttctgcatcgaccttggccatccacgaagaaaagggctgtggtgcccatgttgacctcatggatgtgaatcggcgtgttgcgctgtcggttcgcgagctgaaagcacagccgaacgcggatcgaagggccttggccatgagagccttacttgaatgtctgtcgagtctcgagaaacgacagcttgatgaagccagtctctccagcgtgcgagagatcgcctctctgttggagatggatggggatgtgggccggttctacgcctccaggatgctggcgatgctggggtgtcgagctcgtccagtgctgcctcttctgcatgatgcgctggacaaaacggcgcccattgaatccaatctcggcccaatggtcctgtcgccagcagtaagtccccgcgaagaagtcgcaagagcgatcagagcgattgaaacttcgcatccgtgcagaacgcagtgggaatga

SEQ ID NO: 500996 - DNA, 615 bp, Stenotrophomonas maltophilia
atgagcgaacgcatcaccgcctcacagctgatggacaggctgatgtccgatccggagttcgtacggcgtgagcaggaaagagaggcacaacggatgaaagccgccgggatcctcgcggaagcggaggccggactggtccgggagcttcgcgggtccggaatgaatgtcgattccgtatgggaccttgtgggctggaagggtgacaacgatgcggccctgcgtgtgcttctcgcgcatgcactgatcccgtatccagagcgcgtgcgcgagggaattctgcgcgccctggccacacccggcgcgcgaacgtggtggccatgcctggttgaaatttatgaaagtgacacgctggcgctaccgccacagatcgattatctgaccgctggcatcctgtccgctgcagccgacgacaccgtcattgatgatgtcatcaggctggcgagtgattccaacgctggcttcaagcgggtgctactgctgctcgccctgaagaagtcccgcagccccagggcgaagatgctgctgaacgagctgcgatccgaccctgtgataggcaaggaagtaaagcggatgcggcggctggagcgactgcaacatcggtcggatggtcagtga

SEQ ID NO: 500997 - DNA, 210 bp, Stenotrophomonas maltophilia
atgggccagagcccgttggtcagcatggaaatgccaaagaccaaccagcagattgcacctactgcaatgcggcgaccggactcccgccataccccgatggagaacgccacgaagcccataccggagccgatagccgcgatcctgccgcagatgcttgcgagcgttggcgcctgcagcagctcgctggcgtgctgtgcaagcgggttgtag

SEQ ID NO: 500998 - DNA, 1308 bp, Stenotrophomonas maltophilia
atgaatgtaggcttgacactcacctgcgggacctgcgacggcgacacggattgccgcatcggattttcgaatcgcacgattcaaccattgcagcttgcctgcccccactgtcagacgttgatggaaatcacgctggatatcagtcaggcacccggctacagcctaaccttcaaaaacgcgagcaatagagaggaccggtcttaccgtggtccattcgacgggcgcaatcccttctttgacttgcacctcgacttccctgtgcgcagcggcaactacgtcgcaggcttcactcccttcctcgtggccatagatgcactgcgtggaggcgatcttggcgattcgctaccgctgatgatgaaattctctgggaagatgaatttactcaatcagctggcgatgcaagacgatgatatccgtcgcaccattcgcctttactttggcgcaaataagcaactattcaaacagcgtgcatcgacgttcctagatcacgactttggaccatctttagattctggaactatcgatgacgtcttgtacagctatttgtccaggatttccgcttcgctaatcgacattgacaaggatgcggaatggactgagcaggcaatgcagcgaattgaagcactggctgaggctggccctgatgcttttgatgcactgctggcgcaccttgatgaaacacagttcctaagcaaccttcgtcgcgactgcatcggcctgtactgtccgacctacagcgccgaaatatcacttcggcctgctatttttctggatctggtccagggtcctgatggtccactggtatccggtcgggtgtcgtccaaggaatttggcacatacaaggatttgtacaaggatatgtgtgaagtttactcccgtcagctcaacttggttgccgcgctgaataacctcgcacatcgcggagacttcaacgcgttcgcacccaacgagcagggcgcgaccttgagttcgcttgataggtttgcagacaaagtcttgtcagataagttcaagtatcttccggatagttgggtgccactcgatccgtctgcggtagatatcgggatccgcaacgcgatcgcgcacaacactgttagatacgatgaggtgaatcagatcattagctacttccctcacaaggagggagtccggcaagatcaggaagaaatcatctcctaccttggtttcatgcgcaaattgctgatcttgtttcgcgacgttcacgccgtacaccagctggtctggctcctaggccatcacatttacgcttggcgagcacgcacaggcgcaggtgcgcggctggggtga

SEQ ID NO: 500999 - DNA, 3093 bp, Stenotrophomonas maltophilia
atgacgaataatcctgccggctcgacctggaaaaagtgggacttgcacgtccatacgcctaactcgctggtgcacaactaccccggcgccaacccggacgaagcctgggaagcatttttgacagatcttgaggccctacccgcagagttcgcggctattggcatcaacgactacatcttcatcgatggctacgagcgcgcgcgcaaggcgaagctcgagcaaggacggctcaaaaacatcgacctcctgctgcccgtcattgaactgcgcttggataagttcgctggggttgtcaagaaagagaaagacggtacatattcgcagtccggctggaatcgcatcaacctacacgtcatcttcgatgccatagacccagcgatcatccagcagcagttcctcaacgcgttgaccccgagctaccatctgattcccgactccaccacttggcaaggcaagtggaagggcgtcatcacccgggagagcctgaccgagctaggagaaatgatcgtcgactcggctccggaaggcaaaaaaggcgactacgcgccgcatctccgggagggattcaacaatctttgcgtgagcttagagaaggtcatcgacgccctcgacaagccctacttcgccggcaagttcctgatcgccgtcggcaagaccgaatgggctaacctcaagtgggacgaccagtccattgccgagaagcgcaacatcatcaaccgggccgacttggtattcaccgcagccgccaaccctgcggagtaccacgcggcgcgcaagaaactctcggagtccaatgtgaaggctaccttgctcgactgctcggacgcgcacgcaccgagggcgtcggaggacaaggaccgcgtcggcaactgcttcacttggatcaaggccgatgcaaccttcgacggcctcatccaagccatcaccgaattcgaagaccgcgtgttcgtcggcgatacgccgcccaaacggctgctggtcgaggccaaccgtacaaaatatgcctcgaagatccgaataaagcgcaaggccggctccacgctgaccgatccttggttcaacgtagacatgccgctgagccacgatcttgttgccatcatcggcaacaaaggcagcggcaagagcgccatggccgacatcggcgcgcttgctggcgacaccaaaaacttcaagagcttctctttccttaaggacacgcgctttcgcaatccgaggaacaaacttgcgcagcacttcgtcggcgctctggactggcacgacggctcggagtctgagcgccagctcgaccaagacccctctgagaccagtgtcgagcgggtgaagtatctgccgcagagctatctcgagacgctttgcaacgagctcggcgacggcggctcggccacattcgacacggagttacgcaagatcatctacacccacgtcccggacgaggcgcgcttgggttacgcatcgatggacgacctgctcggcttcaaggtcgccgagatcgacagtgcgcgcgagcagctcgtcaaggaaatctctaaggccaacgccgagatcttgcagacggagcggcgcctgacgccagagttcaagcagtcgctgcaagagcagcgcgatgccaaggtcgccgagctgaacgctctcgatacctccaagcccgctccggttgaagacccgacagcgtcagacgcgacccaggaggagtcaaaggcagctactgacaagattcaatcactcgaagacgagctcaaagggcttcgcgacgaggagaggctgctccgagacaggaaggctgccgaggcgaaacggcaagcggtcctgagccggatcgcccaagccatcgcgaaccacaagaaggcccatgatcagttcgtcgccgagttggcccccatgctcatcgaggcaggcacggaagcgatggtgtccgacgtgatcgagttaaggatcgacacgtcgctgatcgacgcgctcggaaagaccatcaaggagaccatcgcggccatcgacgaaactctcacaagccaagggcctaccgggctcatcagacggcgcgaggcggccgaggcctcgatggcagaaattaagagcaagctcggcgagaaacagcggctattcattatctacaaggaccaagtcgccaactgggagctggccaaagcgaatctcatcggcagcaaggacaagacgcagtccatcgaatggatcaaggcagagatcgagtcgctagccggcctgcccaccaagctggcggaactgcgcgcccgccgcctggacttggccaagaccattcacgagcagttggccaagactgttgaggaataccgccgtctgtatgggccagtgcaggagttcgtcaagtccgccgcacagatggatatgcacctgccgctggacttcgctgtgcgcatcgaacagtcggacttccaagaccagttcttcccccgaataaaccgccagtcgcgtggcagttttgccggcgtggacgagagtaaccagctcatgcgcagcctgcttaaggaggtcaatttcgttgacgtggactccacgctgaaattcctcgagactatcgacgacatgctccacttcgaccggcgcgagtccggtggcggccgcgagactagaatcgccgaccagctccgcagaggcggagagccgcaggacatcctcgactatctttacggcatgagctatctcgagccgaggtactcgctcacgttcgacggtcaggagatcagccaactatcgcccggcgagcgcggcctgctcttgctagtcttctatctcctcgtggacaaagatgacatcccgatcatcatcgaccagccagaggagaatctcgataaccagaccatttttaaggtgcttgtcaagtgcattaaggcgaccaagcagcggcgccaggttattatggtcacgcacaacccaaacttggctgtcgtctgcgacgcagagcaaatcatttacgcgacgtgtgacaagtcgactaatacgttcaactacatctctggtggtatcgagtctccagcaatcaagagcatagtcgttgaagtgcttgagggtaccgagccagccttcaagaaccgaaagcggaagtacggcctttga

SEQ ID NO: 501000 - DNA, 636 bp, Stenotrophomonas maltophilia
atgcgcgtgatgctgctgggggcgaccggcctggtcggtgggcaggtcctgccgatgttgctggatgacccgcgctgccgcgccgtcgtggcgcccacccgacggccgctggcgctgcgtgatccgaagctgcacgcgccggtgctgcagttcgatgcgctgcccgatgcaccggcgtgggcccgcgtggacgcggtgatctgcgcgctgggcagtaccctggcccaggccggcagccgggaagccttccgtcgcatcgaccacggctacccgatggcgtttgcccgtcttgcccgggccgagggcgcccgcgccttcgcactgaattccgccgccggtgccaatccgcagtcactgatcttctacagccgggtcaagggcgagctggaacgtgatctgcgtgcgctgggttttgcctctttgaccctggtccggccgggcttgatcggcggcgaacgcaacgaagtccggcgcggagagcgatgggcgctgtcggtgctgggcgcgctgggaccagtgctgccgcggtcatggcggatcaatccggcgggtgagatcgcccgggcgctggtcgaggccgcactggccccgcatccgggcgaacacgtggtggcatcccgcgcgctggtcggctga

SEQ ID NO: 501001 - DNA, 564 bp, Stenotrophomonas maltophilia
atgcaaccgcgcaagaccgatctcgcccgaaccgcgctgcaggcccatcgcgcgccgctggacatgcgccagcgccggttgttgatcctgtgcgacggccagcgcaccctggccgacctgaccggcctgatcggccaggacgcggcggccatggtcatccagctggtgcaggccggttacctgagcaccgggaccgccgccacaaccgcaccgccaccacccgcagccacggcagccacggcagcaccggcgcccgccacgccggctgcggcaccggctgcggcaccggctgcacccgcaaccggcagcgaacgccgccgctcactggtggccgcgcgcatctacgtgctggggatcctggagatgcagcgccacccacaggcagcggccctgttccgcgaactgcaacaggcccgggccgagagcgatgtgctgcaggtactgcagtctgcgatgcggacgctgcccgggctggcctcggaaggctattgccagcgcgtgcggcaacgcctgctggaagcgctgccgctggagcattgcgacgcgttcgccgaggtcgcctga

SEQ ID NO: 501002 - DNA, 1485 bp, Stenotrophomonas maltophilia
ttgatcgatggctttgcaacccatctgccgccgggccgccctccaagcgcgttcgtaaaattgcaccaacgagtccttgcggagctgaagcagcacaacctggaggacaaattccccctgaacgatcctggcaaggggaagcgctcgctgcttgctttgctcaagcggcggcagtcggcagtagccgacgtggacctttatgaacctcaatcggcatcgaacgctcctgtcgctttggagcaagcagtacggatgggcctgttcgccagaacggagtttgacgcgcaccaaatcgatgttgaatgcaagatctccatcgatatgcccaatggcgcgcgtgttacgcgcaaagtgtcacggctatggcttctcatcgaaatagagactgaatccagggcggtaacgggatggcttctctgtgtcggccagagctatgacaatcttgatgtagcgctctgcttgtccaagtcaatggaaccctgggctcccagggacctgacgatcccggacctcttctacgcacctggcgctggaatgcccgtctatcaggcagcaacgccgatagtcacgcgctcggccgctgtcgcactggacaacttccttgcgcactcggcccatgcactcgaagcagcattctgcagggctcggggaggtgtgatgatcttcggaaagtcgcacacaccgcgctcacgacccattgtagagcaattcttctcgcgcttggaacgtggtgcgctgcgtaagatccccggcggttttgagcccgccaaacggctgggggaaaacaagatcaggatcagcaacttctctccggatgcccatcccatccagatgcaccttctcgaggagctcctggacgtcatcatagccaactacaacgcgacgcctcactccgcactcggacagatgacgccgctagcgtatctcacgaatcgcaaagagtcagcgtttgcgtttgcgccggaaacctgtggcctggatgctgcagatatggcttcgacaatcgtaagcctgcccgtaaaaggcaacaaggataatggggagttgccccatgtcacctacttgtatgcggactaccgatccccttcccttaacgataaatggggactgattggcaccaggattcttgcgcgcgtgaataggcgcgatcttcgttcaatcgtgctacttcaaagtgccaccgtgccattcggagtggctaccgcgcgagcgccttggtcgcgcgcgccgcatgacgagaggacgcgaaggatcatctgtcgttggtccaaacagcgcagtgatttctcaatcgctggcgtggagtgtgcaattgaagccttcatagcgcatcttcgatctactgcagacacgtcccaacccgcagtcgaccaacttgcgcgcttgcagcagttgcacttcggccgtctgcccgacattcggtcccagccagctcacatcccggtaagagtcccccggggaggcaaggtgaatcttgatgactag

SEQ ID NO: 501003 - DNA, 492 bp, Stenotrophomonas maltophilia
atgccgcacgttgccatcccgaatgatctgagcggggtcgttgcaggcaacctgtctggtgactcggtaaatgagtatgcctatgtctgggatgggtctgatcccggctggacgttgaacctccgccgacggcaatacgccgaactggcattggtattcgcagcgtctggcccttcagtcaaggagattgtcgccctgcggagtgcgctaccggcttacgcggctcgatccgctgccgagatcctgtctgcactcagagggtgtcaacgcgtcgccctcggaacccatctcgcgttcgaagcgaagggaatcgcgagccgctgccggggcgcgggcctcactgtcgagtgggtagcgcgggaggtctcccgttacatgctcagcaacaatgtcaccggatcttggctgatcattgaggacaacggacttgccaggtcggtctatgatcgggcgatgcgtgaaggcatccgagtcgttcacaccgacgcgtga

SEQ ID NO: 501004 - DNA, 669 bp, Stenotrophomonas maltophilia
atgttcttggctcaactacgagagacgtgtatgactattgccctcaaccgcgttgcaggaactagatttttggtgtgtgtcgcggcagttcttggatctgggtgtgtagattcgcctacttcataccgcgtggagggtgcgaagaccgatttttgtgtccctggcactctagatgcgacgccgtcccggcgcggccacgaggatcctgtggtcggcggctttacgctgcatggttgctactccgcccatagcgaggcttgtattggtcccgataatttgatctcggcagcggtggtagccaaatcgcactttcctggcagaaggtttggcgacctcccccaggggtcccatctgcgtacgagcgctattgagggctggcaaggagcgaagacgctggagaaggggctgcttgccgttcctgacggtggcgacaagggccactttttcgtatggcgcccgagtgctcgtaccgccacacagccgtcggatgacgatgagctaatggcatcgtgtgacacgttgggcaacgtttcctgcagtcgtgtaattcatggagacgactttgctgtgacctattcctttgtcacagagaaggaagttccgaacgacttcagttcattagacaggcaagtcctgaatgaagtcgagcggatgagatgtagaagatag

SEQ ID NO: 501005 - DNA, 243 bp, Stenotrophomonas maltophilia
atgcacatccggcatcgcccggacggagcgatccatgcctgggagttcgaagaaaagggcaaggaattcaccgtgcgcggcgacgagccgttggtcttcaacagcatgacccacgtcatcaatgccgcactggatggcttgggcttggcatacgcaccggaaccgctggtggccgagcacatcgcgcaaggcaggccgaaggagcactttcccgaccatcattcttttcgaacctcaagctga

SEQ ID NO: 501006 - DNA, 669 bp, Stenotrophomonas maltophilia
atgcacaccaaatcaaatcaagcccccacaactgaactggatccgcgccggaaagccatcattccgatcggcgccttcgcagcggccggcgacttggatggccttcatcaggcgttgaaccagggcctggacgcgggattgagtctggccgaaacgcgagaggtcctgatgcagctctacgcttatgcggggtttcctcggagcctgaacgcgttgagcgaactgatgaaggtggcggatgcgcgtagacagcagggcatccaggatgacgccggccgcgagccccgcaagccgattcccacaggcgatgccttgctcgctgcaggcacggcaaaccagaccaggctggccggcgctcctgtctcagggcctttgttcgattttgccccgcaagcaaatcaatacctccgtacgcacctcttcggcgacatcttcgagcgcgacaatcttgattggcaaagccgcgaattggctacggtcagcatgctggccgccatgtacggggtggagccccaattgcagtcccacattgggatcagcatgaacatcggcctgcggccggagcagctatacgatctggccgatgtgcttgaggagcgcgtcagcctcgatgctgccgaacgtgttcgcgtcgcgattcaacgtcagcttgaggttcgaaaagaatga

SEQ ID NO: 501007 - DNA, 348 bp, Stenotrophomonas maltophilia
atgaaaattcgactgatcatcaatgatcaagtgctgtcagccaccctggaggacagccttcctgcacgcgagttcattgctcagttgccgctgaccctgcaacttgaagactacgccgcgactgagaagattgcgcagctgccgcgcagtctgaacgtggagggcgagccggagggaatcacgcccgtggcaggtgatatggccttctatgcgccttggggaaacctggcgatttttcacaggccttttggctattcaaagggtctcgtaaggctgggtcgcatcgaaggagggctgcagctccttcgcaagaccggggccgtggaggtccgcattgagtcgttctag

SEQ ID NO: 501008 - DNA, 1212 bp, Stenotrophomonas maltophilia
atgagccgcaccgacgcccccgcacatcgcgccaactggggcggcgtgttcgcaatgacgctgtgcgtcttcgcgttgatcgcctcggaattcatgcccgtgagcctgctcactcccttggcggcagacctgggcgtgagcgagggccttgccggctacggcattgccatttcgggtgtatttgcggtgttgaccagcctgtcgatctcgcgattggcgggtagcgtgaaccgccgaacgttgctgttgtccctcacggcgttgatggcggtgtcgggactggtggtagcgctggcccagaactatccggtctacatgacaggccgtgcgctgatcggcgtagtgatcggcggtttctggtcattgtccgccgcaaccgcgatgcggctggtaccggaggcccaggtcccgcgagccttggcgatattcaacagtggcaacgcccttgcaacggtcattgcggcaccactgggcagctatctcggcagcatgatcggatggcgcggcgcattcctctgtcttctgccggtggcagctgtcgccctggcctggcagtgggtttgtctgccgtccatggaagcggaggagggtcgatcacacggcggagtcgtcgtgttgctgcgacgacgcgcggtggcactgggcatgatggcctgcgccgcgttcttcatggggcagtttgccctgttcacctacgtgcggccgttcctggagcgggtcacgcatgctggggtatctgccgttccgtgggttctgctggcgatcggagtgagtggtttcgtgggcacacttgccatcggggcattcatcaggcgcgggctctaccgcacgctggtgattcttcccgccctcatggcgctggttgccgtcactctggttccactcgggccccacctttggccgaccgccgcactgctctcggcgtggggtctgctggccacgtccgcaccggtcggctggtggagctggctggcgcgcaccttcaccgacaatgccgaggccggcggcgggctgatggttgcggtggttcagtgctccattgcgctgggtgccaccctcggcgggctgctgttcgacagccttggctttgccagcacgttcttggcgagtgcgggcatcctgttgtttgccgcgctgcttgcctacgccactgcggctgaagaggtgcacacgtcagctgcggcgattgccacaggggttccgaagcgatga

SEQ ID NO: 501009 - DNA, 1059 bp, Stenotrophomonas maltophilia
atgaaacgcaccacgctgttactggcgctgctcgccagcctctacgttccagcttcggccatggccgctgacgcaccggtgccggccccgccccatggatccgacaacttctaccgcagccccacggtcaagggggaacgcgtgagcttccacaaccagtacgagatgcaggtggtgggtacgctttaccgccctcaaggcctgcccgacggcagccgcgcccccgcagtggtcgttggccacccgatgggcgcagtgaaggagcagagttcccagctctatgcgcagaagctggccgagcagggcttcgtcacgctggcgatcgatctttccttctggggcgagagtggcggcgcaccgcgacacctggtggcgccggaaatctattcggacgacatcagtgcggccgtggatttcctgagcacgcagtcatttgtggacccggaccgcatcggcggcttgggcatctgtggcagcggcagctttgtaatcagtgccgccaagatcgacccacgcatcaaggccatcgccacggtcagcatgtacgacatgggtgcggcggcacggcaggggctgaacagtggccagtcgctggagcagcgcaaggcggtgatccagtccgcggcagatcagcgtctggccgaattcaagggcggggcgccggtgttcgtgcctggcaccgtgaaccacctcgatgctgacacgcccgccatccagcgtgagttcttcgacttctaccgcaccccgcgcggcgcctatacgccaaagggtgacaaggccgaactgacaacccagccgctcttcagcagcctggtcaaattcatgaacttctatcccttcaacgacatcgagacgatctcgccccgaccaatgctcttcgtctccggcgacgtcgcccattcccgcgagttcagcgaggactcctaccgaagggcagggcagccgaaggagatctactgggtaaagggtgccggccacgtggatctgtacgaccgcatccagctgattccctttgacaagctggccacgttcttccagcgcggcctggccgggaaatga

SEQ ID NO: 501010 - DNA, 891 bp, Stenotrophomonas maltophilia
atgagcaccgtgaaaacccatgacctgcaagcgttcctggtagtggcgcaggagcagagtttcaccaaggcggccgttcgtcttggggtaacgccctctgcgctgagccattcgatgcgcctgctggaagagcgcctgggaattcgcctgctcgcgcggaccacgcgcaatgtctctcccactgaagcgggcgagcgcctgatgcgctccatcgcaccccatttcgaggccatcggtgccagcgtggaggcgctgggtgacctgcgcgaccgcccagctggaacgctacgaatctcctgcacggatgattccatggagaccatcatccgtccgcggcttgccggattcctggacgcatacccggacattacgcttgagttctacgtagattacggctttaccaatgtggtggagcagcgcttcgatgcgggcatccggctcggagaggcactgagcaaggacatggttgctgtcagggttggccccgattggcgtctggtcgtggtgggctcacccgactacttcgagaagtttccgaagccgaagaagcctgccgacattacgcgccaccgctgcatccacatccgacatcgcccaaacggtgccatctatgcgtgggagttcgaagagaagggcaaggaattcaccgtgcgcggcgacgggccgttggtcttcaacagcatgacccacgttatcaatgccgcactggatggcttgggctttggcatatgcaccggaaccgctggtggccgagcacatcgcgcaaggcaggttggtggcagtgctggacaggtggtgcgtccccttccccggctatcacctttactacccgaaccgtcggcagccgtcgccggcatttgcagcgctggtttcgtggtggaagctggatag

SEQ ID NO: 501011 - DNA, 147 bp, Stenotrophomonas maltophilia
atgttcatcgggggtgccgcgggtgcccatttccagcgcatgcaggacaatttaggggagctgcactgcgcccaacatcacctatccagcttccaccacgaaaccagcgctgcaaatgccggcgacggctgccgacggttcgggtag

SEQ ID NO: 501012 - DNA, 759 bp, Stenotrophomonas maltophilia
atgctgtttgacagagtcgatttgtctgtcctgcgcgggaacgctgagtggctggagcacttcttcaccaacgctgggccaaacgccatcgacgacattaggcccttcacgaggctcgaatcgctggggcaaccgtggaccagagaatttcgcgtcgacgcaggccttgaccgtttgaagggcttggcactgggcgggttcagatcagcatcaggtgacgtctcggagttgtccgtcctgcccgcactggagaagctctcgctctattccaatcggctgcagagtctgaaagggctcgagacgatgcggggcctacgcgaactctccgtcagttacgcgccgaagctcgaatgcatcgatccgatcggtgaccttaaagaacttcgtgacctgcgtttcgaacactgcaatatcgtccgcggttttgcggatctggtgaggggtgagcacctgctcaacctgacgtacatgaaatgctcacctctcgatcacgtgcggttcgtcggtcgcttgtgttctttgcagagctttgttttcctggaaacggacgtgctcgatggcgacatgacttcccttgtggatcatccgacgctggcgcacgtagcattcacaaggaagaagcactttacgctcagcgaacgccaggtccttgaacgtcttggtgatcgggaaggtggggttagggtccggatagccaagctgaatctcaagaaggccgcagcggaagccgcagcgcaagctgcagtaggagcgcagtag

SEQ ID NO: 501013 - DNA, 477 bp, Stenotrophomonas maltophilia
atggcgggcggtgcgtgggggccttgtgcccgccgggaagattgcacaccggatttcgagccccgcaccgtccgccacctttatcggtggcggcttctgcatgcacgcaaggagccagtcatcaacccgccccactcccctgccccgcacccgatccacgacgcctccgcgaatggctctgcgttggacccgaacacgctcatcgccctgctgcacagcatcggctctggcgccgcctcggatggccagccctggcctgaacgccatcagatgcccggccgacgcatcgcgctggcggataccgattgctcgctggctgggctacgcgtggtgctggagatcctgctggccgcgcagcgtgcccgcgagaacggcgaactggaacagtacgtcggtccgcgggtgatggagggcctgatcatggccggactcggcctcgccgcacacgccagtacgcgcctccatccggaagggtga

SEQ ID NO: 501014 - DNA, 450 bp, Stenotrophomonas maltophilia
atgcctatcagggcagtcgcatacgtaagtgaagcgggcccagccgtggccggtgacccgttgggcctgcgcagcggcaaactggacgatctggttgacgatgccgcccgcttcaaccggaacgccggcgtcaccggggtcctgctgttcgatggcagccgcttcctgcagtacatggaggggcccgaggacggcttgcgcgtggcgtactcgcgggtactcggcgctaccagtcatacaggactgatcgagttgcagcgcggcagggtcggtaaccggcgtctgccattctggccgatgcgctggctgccgacacaaccggcggagttgaagcgcctggcctgtgcagactggctgggatttgtgcagcatggcgacgacgacggggtggctgagacggcgatggatgtcctggccaggttggtcgagccctatgccatcgcggcctga

SEQ ID NO: 501015 - DNA, 735 bp, Stenotrophomonas maltophilia
atgcctgagggcccgtccattgtcctgctgcgcgaggccgccagccacttcaagggtcacgtcgtgcgcggcgtttccggcaacagccgcatcgacctgtcaccgctgcagggacgcagggtcaaggcggttcgcagctggggcaagcacttcctgctggagttcagccaggtcacgctgcgcatccatctgatgatgttcggcagctggcgcatcgacgaacggaagccgacccctgcacgcgtgtcgctggcattcgacaacggcgaactgaatttctatgcgtgttcggtgcggctgatcgacgagccgttggacgacgtctacgactggcggacggatgtgatgaacgacgcctgggatccaagactggcccggcgcaagctgaaggcactgccggacaccctggtctgtgatgcgcttctggaccagacgatcttcgccggcgtcggcaacatcatcaagaatgaggtgctgttccgcatcggcgtgcatccggccacgcgactgggcgacctgccaccgcgcaagctcaccgccctgatcacccaggcccgtgcctacagcttcgacttcctggagtggaagcggcgcttcgagttgaagaagcactggcaggtgcacacgcgcaaggtgtgcccgctctgtggtggcccggtcagcaagctgtacatgggtacgacgcggcggcgcacgttcttctgcccaaacgaccaggtgctctacccaccctga

SEQ ID NO: 501016 - DNA, 429 bp, Stenotrophomonas maltophilia
atgccgaacagagcgatcgtctatgtcagcgaggccgtcggcggattcacgccggagcgcctgcacaccctgatggaggatgccgcccgcttcaatcggggcgcaggcgtgaccggcgtgctgctgttcgacgggcagcgcttcctgcagtacatggagggccctgccgacgggctggatgtggcctattcccgcgtcaccggtgccagcagccacacccacctgatcgaacttgcgcgtggccgcgtcggccagcggcggctgccgttctggccaatgcgctgcctctccgttacggcggaccagcttcgcgtgatcgcgggcgctgactggaccagcttcatccagcgcgcagcatcggaacagtccgacgcgacggcgatggacaagctgctgctgatcgtcgaaccctacgcgaaggccgcctga

SEQ ID NO: 501017 - DNA, 723 bp, Stenotrophomonas maltophilia
gtgatcggtgtcctggtgccggcacacaacgaggcggccagcatggcgcgctgcctgcaatcgatccgaagggcggcgctgcatcccgggctgcgcggcgaggcggtgcaggtggtggttgcgctggacgattgctccgatgcgaccgcgtccatctgccggcagcagcgggtcgatacagtgcggctgcaggcacgctgcgtcggtgttgccagggcagcggctgcggcccagttgctgcaacagggagcgcgctggctggccagtaccgatgccgacagcgaggtgcctccggaatggctggtcgcccagctggcgggccgctgcgacgccttctgcggactggtggacatcgcgagcacttcccgggacggcaggcgcctgcgtcgcgcgttccggaaagggcagccttggggcgacgatcacgggcgcatccacggcgcgaacctcggtgtctctgcccgcgcctatcgtgccgcggggggctttgcgcccctgcgctgcggtgaagatgtcgcgttggtcagccggctgcagtgcctgggcgccgacgtccgctgggccggtgcgcccgtggtcatgaccagcgcccgcctcgtggggcgcgccaccggaggattcgcgacctacctgtccgggatcgagggggcgcgtgccgacgtgccacgcggaaccctgcacgcgcatgaagggctggtcaacacggtgctgaattggggatag

SEQ ID NO: 501018 - DNA, 942 bp, Stenotrophomonas maltophilia
atgcaggatgtgtcatcgcctacaccgctggccaaccgcgcccgccaagtgctggtccagcagcccgaactgccgttgccgggaagcggccgcacactgcagcgctggcaggcgctggccgcctggggggcagaggacctctgcctggccaaagtgctggaagcgcaccatgacgcgcaggcgatcctcgccgaactgaaggcgccttccgcagcagaaggcaagctgctggcggtatgggcggccgagggacccgccaacacgctccgcattgacagcgagggcaggctgcgcggcgacaagccgtggtgctccggaagcgcctgggtggacgcggcgctggtaacggtccgcaatgcgcagggcgtatggctgtgccaggtgtcggccggtcagtggaacacgctggagggcgagccgtggccggccgtcggcatggccggcattccgtccaccacggtgcggttcgacggtgcgcagatggcgcttgtcggcacgcgcgacgactatctgcagcgccccggtttctggcacggcggcgcgggcatcgccgcggtctggcttggtgcggccgtcgccctggccgagcgcatgcggccggcctgcagcaggggccaccgcgcgcggttgctgggcgaagtggacctggtcctgggcccggccacggcgctgctgcgcgaactggcggcgcgcatcgatgcggagccgggatcagcgcatcgggaggacgtggtgcgcgtgcgctgcgtggtcgagcgcgcggcgacgcgcgtgctcgatctggcaggtcgggcgctggggccggcgccgatgtgcctggagcaggcgcatgcccgtcgctgggccgacctgacggtattcatgcggcagagccatgccgaccgcgactgggaatggctgggtgagcagcgcgccaccgaggaggcaacatgggcgctgtag

SEQ ID NO: 501019 - DNA, 507 bp, Stenotrophomonas maltophilia
atgagcgcgatcctcatggccggcgtctacgcactgtggctggcggccggtgcgctggacttccatttccaccggcgcaccgacctgccacatacctcggggctgcgcgagagcgtgctgcatgggatccagctcgtgctgatcggcggtggcgtactggcctggctgctgctggccaacacctggtcacttgccgccctgctggccgtgctggtcctggcccatgcaatcgccggctacctggatacggccagcgctgaccggcggcgacggatcagcccggccgagcagcatgtgcacagcgtgctggatgccgcgccgtggatcctgctggtctgggtcggctggctcgcgcagccgcagtgggcattccgtgcgcaacctgcggcgcccgaggtggcggcgctgctcgtagtgccggcgctcggcctggtggtcctgccgtggctatgggagttgctgcgctgcatccgcgcacggcgagaccgtcggcaggcgggtgcgtga

SEQ ID NO: 501020 - DNA, 552 bp, Stenotrophomonas maltophilia
atgcagaagcacccagcgaccgcgttgctgatcatcgacatgttcagtcgttttgattttcccggggcagcgcagctggtccccagcgcggaggcggcggccagccagatccggcgcctgcgcgatcgcgtcgacgcacggcagtggccggtgatctatgccaacgacaacttttcggagtggaagcaggatttccgccagcaggtggcgcagtgcgtgcaggatggcggcccggccgcccggattgccacgatgctgtctcccactgccgaccactatttcgtgctcaagcccaagcactctgccttcctggccagccccttgccgatcctgctggccaaactgggcgtgcgccgcctctggctcagcgggatgacggcggactcctgtgtcctggccaccgccttggatgccaacgccagggaattcgaggtgcgggtggcgccagaggccgttgccgggctgcctgccgcgaaacggcgtgccatggccctgctcgccaattccggtgcggcgcaggtggagcgcttcaggatgcctgcgcgcggctga

SEQ ID NO: 501021 - DNA, 426 bp, Stenotrophomonas maltophilia
atgaaccctgccaacagcgggcgctccaccgcgccgccgcgccgcctcttcccgatgtgggcactgggtcttgcctgcctgtgggcaggcagcgcatcgacggccgcggccccgcaggcacgtacgtggttcgtcactggaagcgagctggtgtcgctgttgcaggggaacgcggcggacggattctgcgccggcgagcagtgccgctcccagtccagcgcccgcgccagcgcgtatatccagggtgtcgccgatgccagtcgtgggcactggtgtggacagggccagatcctgccgcacgaactggtggatcgcgttgccacgcacctccggcagctgccgcagcgccgtctgcatgaggatgcgtcggtgctggtggtggaagcgctggagcaggccttcccgtgcggcccggcagggaagtga

SEQ ID NO: 501022 - DNA, 846 bp, Stenotrophomonas maltophilia
atggtgcgtgagcgcgtgccggcggtggacgatgcgctcgccgcgctgccggccggtgagctgcactggctgaggtgtggcgacctggaggtcgcgctggcgacaggggcaggcgggcgcgtggcgcacctgcgctaccgcggcatggagtggctggtggatgcgcagcaggcgggtccggccgccatcgcgtggggctgctacccgatggtgccgtgggccgggcgcatccgtcggggacagttccgcttcgatggcgcgccgcacgcgctgccgctcaatttcggcgggcatgccatccatggcgtgggcttcacgcggccctggcaggtcgagcgcatggaggcggccacggccacgctgtcgctggcgctgccgtgcgacaggtactggccgtttggcggcgttgcaacgcaggaggtcgctctgcagcctcaccgcctgcagctgcgtctttcggtccaggcaggcgagcgcgcgatgccggcggtgctgggctggcacccctggtttctcaagccagagcggctgctgttctcgccccgcgcgatgtacccgcgggacgtggagggcatcgccacgctgcccgcagtcgatcctgttcccggtccctgggacgattgtttcatcgccgacagtgacatcaccctgctgcgtggtggccaacgactgcgactgcggtcagaccacgaccattgggtggtctacgacggcgcgtcacacgcgacctgcgtcgaaccgcagagtggcccgccggacggcttcaccctggcgccgcatcggctggagccggggcagcggctggcgttgacgttcgaactggcgtggtcggtcgacagcgcttga

SEQ ID NO: 501023 - DNA, 1989 bp, Stenotrophomonas maltophilia
atgagccggatcggatgggccgcgcgtgcggcggcgttgatggtgctggcgtggcctgccgtgccggtcgcggccgctgaaacggcagggttgctgcacccgctgttccaggaccacgcggtcctgcagcgtgaccagccgatcgccgtctggggccaggcccgggccggggaggtggtgtcggtgaccttcgccggccaggcggtgaccacccacgccgacgccacgggccgctggcaggcgacgctgcctgccaccggcgcaggcgggccgtacaccctggaggccgccgccgggccccggcgtgagtcattgcgcgatgtgctggtcggcgacgtctggttgtgcgcgggccagtcgaacatggaacttccggtgtggcgctcgctcaacgcagccagcgagatcgccgcggccacgatcccacgcatgcggctgttcactgtgccgcacgccgcggccgtgcaggcacaggcgcatttcaatggtcgtgtcgcatgggcgccggcaacgcccgatgcggtccgcgacttctcggcggcctgcttctacttcgcccgcgagctgcagcgcacggtcgacgtgccgatggggctgatccaggcggcgtggggcggctcgcggatcgaggcctggacccgtgccgatgcacttcgagggcagggcggcatggacgagtcccttgatatcctcgcgcggtccgcgcgtgatccgctggcggcacgcgcagcctggggccgctactggcagcactggtgggccacgcgtgagggcgcgctgcccggcgacgcgccctggcgcgcggacaccgatgaccgcggatggtcgcgcgcaccggcggcgttgggggcgtgggagcggtggaacgtgcccgcgcttgccgactacaacggcatggtctggtatcgaacgcaggtggtgctgagcgctggacaggctgcacgcggcgcgaccctggagctgggatcggccgacgaggcggacgtgacctgggtgaacggcgttgccgtgggcagccagtacggcgccggcgagaggcgctacccgttgccccgcggcctgttgaagacagggttgaacagcgttgcggtcaacgtgctcgacacctacggcgaaggtggcctggcgggccccgcgacggcacacggcctgcggctcgacaacggtgagcgggtggtactccaggcgccgtggaagtaccgggtggcgccgggccaacaggcgccgccatttgccccctggcaggccgccaccgggctgtcgacgctgtacaacgggatgatcgcgccgctcggcggcgtcgggctgcgcggcgtgctctggtatcaaggggaatcgaacaccggcgagggcgcgacgtatgcgctgcgcctgcgtgcgctgcgcgacgactggcggcggcagttcggcgcacgcctgcccctgttgctggtgcagctggccggttatggccagccaccggttgcgccggccgacagcggctgggcacaggtgcgcgaggcgcagcggcgggttgcggccgaagatgcgcagagcgggctcgccatcgccatcgacatcggcgatgcctacgacatccatccaccgaacaagcaggagctcgggcgccgcctggcgcgcgtggcgcgccacgtcgtgtacggcgagcaggacgtggcgccttcaggtccgcgggcggtcaccgcggtgcggacgcccgcgggagtggccattgcgttcgaggacgtcgacggcgcactcaccgcgaccggcgcggcgggtccgatcggctttgaactctgcgggtcggagcgcgatacccgccactgcgagtacggcgacgctgcactggaggggcaccgggtgctgctgcgcggcccgctgtcgaggcgtgcaacgcatgtccgctactgctgggccgatggcccggtgtgcacgctgcgcgaccgcagcggggcgccggcaggcccctttgaacttcccattgccgaagccgagacgcgacgatga

SEQ ID NO: 501024 - DNA, 1023 bp, Stenotrophomonas maltophilia
gtgcgcgcgaacctgccgttgccggttctggaaggcgtcgatcctgccgagctgccgctggctgccctggcggaggcgggtgaaccggtcgtgctgcggggcatcgccagcggttggccactggtgcaggcgggcgtgcgctcggcgcaggacgcgatggcctacctgcgcagcgtcgacgcgggcgggcccatccagtattcgttcggcggcgccgagatcgatggccgcccgttctacagcgcggactacacccggctgaacttcgacgtgcggcgcggcgcgctggcgcaggtgctggaggagatcgccaccacgctgcagtccccgcggccgccgacctattacgtggcctcgctgccgatcgagcgggcactgcggccggcattcgcgcaggccaacgacgccggtctggcgaagcagggcatcgatgccacggccagcatctggatcggcaaccgggtgacggcctcgtgccacttcgacacacccgacaatctcgcctgctgtgcagtggggcagcgcgagttcaccgtgttcccgcccgagcagatcgacaatctgtatccgggcccgctcgaccccacgcccggtggccaggtggtgagcgtggtggacttcgagcgccccgacttcgagcggtacccgcgtttccgggaagcgctggcgaacgcgcgcagcgccgtgcttgggcccggcgatgcgatcttcattccgggcatgtggtggcaccatgtgcgcagccttgcgccgttcaacgtgctggtgaactactggtggcgccgttcgccggcctggctgggatctccactgtcggcgctgcaccacgcgatgtgggccgtgcgcgacctgccggcgcgcgaaaagcaggcctggcaagggctcttccagtactacgtattcggccccggcgcgcgcgccgggcagcacctgcctgacgccgcgcgcggggatctggcaccgttcgacgagccgcgcgcgcgccgcatgcgcgcgatgctgctgggcaggctcaaccgttga

SEQ ID NO: 501025 - DNA, 861 bp, Stenotrophomonas maltophilia
atgcctgtagcttcgaccccgccctggcggctcacgttccgcctggccgtgtgggcggcgctgctgctgttcatggccctggccaacagcgccgtggaagtgatggacgcgcagcggcgcggcgacgccctggcgttctgggagccgctgacctgggagctcagcagcgtcggcgtgatcctgctcacgctgccggcgatctggtgggggtgcaggcgctggcccctgcatgcagagacctggcggcgccgccttccgctctatctgctggccagcatcggctggtcgctactgcacgtactggccatgatggcgctgcgcaagctggtctacctgggtcttggtgccagctacgtggacggtgccggctgggtctcgcgcctgggctatgagtacctcaaggacgtgcgcgtgttcttcagcatcgtgctgctcgaacacttgatgagctggttcggacgccgccaacagggtgaggcgcatctgctcgcggcgccggaagacacggcgccggtggagccggttgagcggccacggcatttcctggtgcgcaagctgggcaaggaattcctggtggccaccgacgatgtggaatatgcgcaggcgtccggcaattacgtgaacctgcacgtgcgcgggcatgactatccgttgcgtaccacgttggcggcgcttgcgctgcggttggatccatcggtgttcctgcgctgccaccgcagctggctcgtcaaccgccaccagctgcgctcgatcgagcctgccgatggcggcgacgcggtgctgcacatggccgatggcgcacgggtgccgtgcagcaggcggcagctgcccgtgctccggcaggcgctggcggcaggctag

SEQ ID NO: 501026 - DNA, 1200 bp, Stenotrophomonas maltophilia
atgaaccgacgccacgacatcgacgcgctccgcgtcttcgccttcgcactgctcatcctgtatcacaccggcatggcgtacgtgggtgactggggcttccatctgaaaggcagcttcaccaccgacgcgctgcagtggccgatgcggctgctgaacggctggcgcatgtcgttgctgttcctgatctccggcgtcgccatcgcgctggtgcggccgcgcctgcaacgggggcggttcatcctcatccgcagttggcgcttgttgctgccgctgctgttcggcatgtttgtggtggtgccgatccaaccctactgcgagggtgtcagccggggcatggtcgcgccaggcttctgggacttcctgctgcgctactggcaggtgcggccgtggccggacggtagcttcgcgggggaccgcttcggcatcacctggaaccacctgtggtacctggcctatctgtgggcctatacggtggtgctggtggcagccctgccgctgctggattcggcgccgctgcggcggctgagtgccgggctggccggcgcacccgccgctgtgctgatcggcacgcccgcgctggtgctgctgctctggctggcctggctggcgcccgaccacccgcccaccaacaccttcgtggaggacctctaccagcacgccaagtacggcaccgtgttcctggccggctatctgctgggccgcgaaccacgcttctggcaacgcgtgcaggcccttcgccgggtgtcgctgtgcatcgctgcgggtgcggcggcctggtacctgctgctggaagcgctggggcactggctgcccgtcgattcggtgctgcggcgctggccgccgcggttctggggcctgcagtcgcagtactgcgaagtgctgtacgcatgggccatgctgctggccgtgctgggctggggcaagcactacctggacaggccgttccgctggttgccgtactgcaccgaagccgtctacccgtggtatgtgctgcaccagagcctgctgatcgcactgctgttctggctcaagccgctgcagctggggccgtggctggagccaacgctgctgctcgcaggcaccatcgccggttgcctgctgctgcatgaggcggtcatccgccgctccccttggttacggcccctgttcggactgaagcgcggggcagcacgtaccaccgcgcacgcgcgtggcgattga

SEQ ID NO: 501027 - DNA, 471 bp, Stenotrophomonas maltophilia
atgaagatgctgacctcttccctcatgttcctgggcttggtggttgcggcaggaatcgtttggataacgtatccgacctctctcgaatctgagctcagaacattccgctcacttccaccagaagcattcaagatgcttcgcgacgatgcgatcgccttcgctcgggcgaacgcatcgaatggcattgccatcgaagccggccccccgcagtcgagcgtgttcgaactgcggtgcagaaaggttccattgctcctggtcgagaacgggcatgacctgctcaccctcgatatctttggatacgcagaccgacgtgcgcgaggcattgccaagcttcaagatcagatgacatcgagactgatcccggagggtcagcccggcaagcccggcccgatttctggagagccctcgggactggaggcgctcatcatgaagcatcgagacggcatcgatgtcgcgcagcagtgccattga

SEQ ID NO: 501028 - DNA, 894 bp, Stenotrophomonas maltophilia
atgcgcctgctgccacgtactgcgttccaatgcacgatgctgatcctgctggtggctcccgcggcgggtgctgtggtcaccgacattcccttcgagcagggcaaggatcaccggatctatgtggagggcacgatcaacggctcgcgaccgctgcgctttctcgtcgataccggcgcctcggctgtggcggtggcccggcgcatccagcaggatgcgagactggtcattgacgaccggagcgagaacaccggctccgacggggtcacgttcctcgactacagcacgcacaacgtcgtccaggtcggtccggtgcggaggccaatgggggccgtagtggtcgactaccagggtcggcccttcgatgcggtcctgggctggacgttcttccagggcaaggtgctggagatcgactacgaccgcagcctgctgcgcgtgcacgacgcgctccccgatctcaccgggtatacccaggcccacgtgcgctggatcgacaataccccggccgtccaggtcacgctcggcaatggcagcgatgtctttgctccttggcttgcgctggacactggcagcaatggcagcatcgacctgacgtacgcattcggcgcccgccatcatctgcagcaggcatttccggagcggttgggaacatcacagttcagcggcagcgccgggcggaagatccgtgcggtggatgtcagggtacccgtggtcgccatttcggccctggcgctgaacggggcgaaggcgtcgatcacgatcgacgacgaaggttccagtggcgatgggacgctcggcagcgaaaccctgcagcagttcaacatcatgctggacacccgttccggtgccatctatctgcggccgaatcggcgctcggccacccatcgggcggaatga

SEQ ID NO: 501029 - DNA, 906 bp, Stenotrophomonas maltophilia
ttgaaccgattgcgatcattcttcggtgcttaccccatccagttcgcgatcgccgccaagctctacgtgctctgcctggacctgcccgtagccctccgcttgatcgcattcgggtatcgcctggggccgccggaggcctcacgtgaaatcggcaacgcggtggctgagctcggtttccgcctgagtctgtttgccggggcggcggtactggtgtcgatgctgctgttcgggcgccgcggcgcgctgcggatccgccgcccggtgatcgcttcgatcgcctttttcgggttgctcgtcgtgctggatcgcgccatgcgcattccgatggcgcagttgccgtttccagtctacagcgtcgcagccatcagtctggctccgcttgcgcatgcactggtcctcacgctgctggccttggtgccggcgctgctgatgcagcggcgcatccgtgccgagggcgtgcaccatcaccttatcagtgccagcatcgccggcgcggtgacgctggtggccggtagctgcctgcttcccatcctggcgttgcacttgcctgcggcaatctcgcctggcgagttcatcatgccggttttcgatgggcccgcgcggttgcagattgccagcctgatcctgctggtgtgctgcgcactggccacgtttgccggcctttgggccagcgagctgtcaccgcgacccgcatcgatgctgcgcacgatggtggtgtcgctggtcctgcttgctacctccctgctgatcagcctggccggcgtggcgtacctgctgcgaatgctgtccgctgggataccggcgatcgggcgcgggcttgccttggtcgtgctcatcggcgccgtattgcagttcctgttcgccagagtgctggcgtcacgatggctgcgcgtacaggcatcgtga

SEQ ID NO: 501030 - DNA, 531 bp, Stenotrophomonas maltophilia
atgaacggcaccaccctgtttcgcggccccgccacagcactggcactggccctgctgtcgatcggcgccggcgcctccgcgtccggtgcccgccagggcgtgaaggcgcaagccggcgagatcgtgctgttgcgggacgtatcggcgcggccagcctatcgcatggcaccgccgggcatggcgctgatcgccgatcccaagccgcagcgcgaaatcgccatggccttgggcaccgctggtgcggcgagcgggatggatgaactgagcgaacaagagtatgccggcatcggtgcaggccagtcggcgtccgtcgccgcacccggtggcaccaccgtcgaacggatcacccagcaggccctgggcggcacgctcggccgcagtggcgacggcaacgtcggcggcagtctcgggggcgccctgggtggcccgctcggcgcggtcggcagcagcacccgcggtgtcgccgatactgtgcgcggcgccctcgcccagttcccgttgcagggcccggccccggcaggtggcaagtga

SEQ ID NO: 501031 - DNA, 885 bp, Stenotrophomonas maltophilia
atgcccatcggattcatcggccttggcgtcatgggcatgcccatggcagcgcacctggcgcgcgccggccacatgctctggggctggtcccgctccgaccgcaaccatgccaccgcccgcgccgccggcatccgcgtcccagcggccgccggggacgtgttcgatgcatgcgcaacgatcgtcctgatgcttgccaacgacccggccatcgacgcggtcctgtcacgaaacggccctgcgttcgctgcccgcgtcgaaggccgcctggtgatcaacatggggaccagctcggcggagtattcccaggcactgggcgaacagatccgcgcggccggcgggcgctacgtggaggcgccggtctccggttcacggcttcaggccgagtccgcgcagctggtcatcatgctggccggcgatgcggctgacgttgcagaagcatcgcagctgcttgcgccgctgggccggcagtgcgtggcgtgcggccaggtacccgcggcgttgcgcatgaaactggcggtgaacctgtatctgatcacgctggtcaccgcgctgggcgaggccgtgcgctttgccgaggtccacggcattgccctggagcgctttgccgaagtgctcaacgccgggccgatggccagcgacgtatcgcggatcaagctggacaagatgctcagggaagacttcgccgtgcaggcctcgatcaccgacgtgctgaagaacagcgggctggtggctgcggcggcgcgcgaggcaggcatgcaggcccccctgatcgacgccagcgatgcgctgttcgcccgggcacagcagatgggcctgggaggccaggacatggcggcggtcctgcaggcgatccggggcaccccgccggctgccggcggcgcctga

SEQ ID NO: 501032 - DNA, 585 bp, Stenotrophomonas maltophilia
atggccgccgttcctgcccgtgcctgcctgtccgtcctgtgcttcctggccctgcccgcccttgcccaggacgcgtcgttcggcttcggtgaacagacctcccgtaccgagcagaccacgcaatccagcagtacccagacccagagcagtggtgcgatggccacgcagaccaccaccagcggcagctcgcagtccgagacgcgcagtgaaagcaaggggctggacgtggacttcggcttccacgacaacaacgatgactgggaccacgaccgccagcgcggcggccgcggcgtgcgcgaaggcgatttgttcggcagctggacgctgggccaggagaacggcagcacgtgcaccatcgaactgaagagcatcgagtggttcggtggctacagcgcctacgtacccgccggctgcccggacggcttcttctcggccaaccgctgggtgctgtcgggcaaccagctgctgctcaccgataccagcaacacggtattcgggcgcttccgcacgtcgggcggcgggcgctggtcggggttccgtgaatccgacggtgcgcggttgtatctcaaccccaaggggcgctga

SEQ ID NO: 501033 - DNA, 336 bp, Stenotrophomonas maltophilia
gtgctgctgcgggccgtcgagccgctggcgggccttgagcgcatgcacgagctgcgccccgccgcgcgccgggatcacgatctggccagtgggccgggcaagctgtcgcaggccttcgggctggaccgcggtttcgacggcgccgacctggtgaccggcagccacggcattgtcattgccagcgatggcgtgccgcctccggcggatccggtggtggggcctcgcatcggcatcacacgcgcagtcgatttcccttggcgctggcacatccgtgatcaccgtcacgtatcgattcgaccgcgctcccctgcatcgtctgtgaagagacgccgatga

SEQ ID NO: 501034 - DNA, 1587 bp, Stenotrophomonas maltophilia
atggcggtgcgtccgctgcgcgccatctaccagatcgacccctacctgttccgcgacagcaatggtcgcggctggggcacgctggatggcatcaccgaaaagctggaccatctgcaatggctcggcatcagccatgtgtggctgctgccgttctactgcaacgccggccatgacggtggctacgatgtcaccgaccactatcgcatcgatccacgcctcggcgatgagtccgcgttccagcgcctggtcgatgccgccgatgcgcgtggcatcggcatcatcgtggaactggtgatgcagcacactgccagcgcgcacccctggttcgtcgccgcgcagcagggcgacccggcctggcgcgcctggtatctctggagcgaccacgtaccggacgacggcctgcagccgatgttcccgcccatcgaggcctcggcctggacgtgggatgccgaggccggcgcgttcaaccggcacatgttctaccggcacgagccggacctggagctggcccacgcaccggttcgcgacgaactgctgcgggtgatgggattctggctgcagcgcggcgtagccggctttcgcgtggacgccgtcccgtatatggtcgagcgcgcccgccacgcggacccgcacgacgacggactgtggctgctggaggcgatgcgtgccacggcagacgcgcagcagccgggcctgccgctgatcggcgaagcggacgtcaccgcatcccactacggtgacttcctgtgcgaggggcggcgcctctcgcacctgctcgacttccacctcaacaatcacttcttcctggcactggcgcgcggtgacgcgagcgaagtggcgcgggtcatggccgaatacggcccacaggcgccgccggacacccgcatcgcctggctgcgcaacaatgatgagctggacctggagcagctggagccggacgaacgcgaagcggtgatgcagcgcttcgcacccgaacctggcatgcgcatctatggccgcggcatccgccgccggcttgcaccgatgctggagggcgatgtcgcatggcaggccatggcctgggcggcgctgctgtcgctgggccaggtgccggtgatccgctatggcgaggagatcggcctgggtgactgcctggagctgcccgaacgcaatgccgtgcgcatgcccatgcactggcatggccgcccaggggcggggttcaccgatcgaccgcggcatgcgtggcgcgcgccaccggcagacggcccctacggctaccggacggtgaatgtcgaggtgcaacgtagaacgcccggctcgctgctgctgcgcgtgcgcgagctgctgctgcagcgcaatgcccatcccgtgctgcagcaggggccacatgcgctcgacccaccgtcacctgcgttgctgatgctctgctacggcgacgcgccccggcaggcgttggcactgatcaacttcggcgacgaaccggtggaggtggatctgcccctgcgcggcccgctgcgcacgctggtggcccatggcgccaggctgcgcgatcaccgctgcatcctgcagggacacggctacacctggctggccgcagacggggcctga

SEQ ID NO: 501035 - DNA, 537 bp, Stenotrophomonas maltophilia
atggatgttcgccgcgcttacttggcctggtgtgcgccctcgccctggtcgctggcgctggtgatggcatcaaccatggcgtggctgctggccagccaggagccgatgccgccgctgctggccggcttcggcgccgccgcactggcgtggttccgcagcgacggccccggccacgccacccgcgcggggacagccgtctcgctgctgctgatcgggttggcgctgacgtcggccacggccttcggcgcccacgccgcgctgtacctgctgctggcggccacagcgctgctgctgctggccctgctggccctgcggctgcgcgccatcaccgccatggcggcacgcctgcaggcacgggtggatgccaccccgacggactgccgctggacccacctgccggctgcgctctccacgctgatcgtgcagcagctgcgcggcgcggggccggtggagccgtccctgcatcgcacgctggtgctggccacgctggcctgggcagccgacgcggaagcgcaggccatggagcgccgacgatga

SEQ ID NO: 501036 - DNA, 1422 bp, Stenotrophomonas maltophilia
atgagagatttgaacgacgcgatcgccgaagtcgcggccgatatccgccaggtccaggcatcgctggccgagcgtggcgatgcgtgccggaaactgatcaaggaacaggaggcgctgcacggccaggtccgcgaggacttcaatgccctggcccggctgcacgcccaggcggccattgattcgtcgccggcgatggccagggacctgctgcagcagtccagcgccgacctgcagcgccgtgaccgcaaagcagcgatgctggccgacgaactacaggcgctgctggacatcgaacagtcgttgcagcagcgctcgcaggcggccgtggccgcacgcgacgccgccggggggcagttgcaggcactgcaggaccaggtggatgctgcgctggaagcggaccccgcctaccgggccctgcaggacgaactgcagctggcacaggcgcgggccgagaccgtcgagcgcatggccgcctctgcacaggcggagcatgatgccaaggccggcgcctatcaggccgacccggtcttcatgtacctgcaccagcgcggcttcggcagcacggcctaccgcagctggccactggtgcgcacagtcgatggctggctggccgagctgtgcggcttcgagcgcgcccgccgcgagtacgccacgctggtcgaactcccgccgtacctgcaggcgcatgccggacaggcccgcgacgcgagcgaaactgcccgccagccagtgcagcaggcccgtgacgccgcgcttgcccaggccgggggcgagccgctgaggcagcagctgcagaccgcacagggcgccgttgcacaggcactgctgaacgagcagttgcatcggcaggccgtggacgccaagcaggcacagatcgatggcttccgcagctggaccgacgcggagggcagtgccctgctcaccgcgctggcacgcacgctgtcggccaccggcatgaacgaactgtaccggcgcgtcgccgccacggcgtccggcgaagacgatgcggtgcttgagcgcatccaaggcactcgccagcgcttgggcgagatcgatggcctggtggcagagcacacccgcgaaatggccgtactgaagaagcgcctggacaacctgcaggcgacgcgcaggagctaccaggcggcagcagacgccgaacgccaggcctaccaggccccgacctaccgcagggccaccgctaccgcagtttcggcgtccttcttcagtacgacccgcagcggcagcagcagcagcgcttcctcgggcggcctgttcaactgggcatcgagcagctccagcagtttcgattccagctccagttcgagttcccgctccagcgcccgttccgacagtggcgatggcttcagcagtggcggtggcatcagcggtgacggggatttcaggaccggcggcggcttctag

SEQ ID NO: 501037 - DNA, 870 bp, Stenotrophomonas maltophilia
atgcgcctctgcctgactcccctcgccctggctgccacgctcgtctttgatgtcgccgccgccgacgcaccgctgccgcagctccgggcctacaccgtcgacgcttcgtggctgcagccgatggcaccgctgcagattgccgaccacacctggcagatcggcaccgaggacctgaccgcactgctggtgcagaccaccgagggcgcagtgctattggatggcggcatgccgcagatggccggtcacctgctggacaacatgaaggcacgcggggtggcaccacaggatctacggctgatcctgctcagccatgcgcatgccgaccatgccgggccggtggcggaactgaagcgccgcaccggtgccacggtggtcgcgaacgccgaaacggccgtgctgcttgcgcgcggcggcagcaacgacctgcacttcggtgatgacatcacctacccgccggccagtgccgaccgcatcatcatggatggtgaaagggtgacggtaggcggcatggcattcaccgcgcacttcatgcctgggcacacccccggcagcaccgcctggacctggaccgatagccgcgatggcaagcccgtgcgcatcgcctacgccgacagcctgagtgcgccgggctaccagctgcagcacaacgcacgctatccccgactggtcgaggactaccggcgcagcttcacgacggtgcgcggcctgccctgcgacctgctgctgaccccgcatccgggcgccagccgctggaactatgccgccggtgccgaggccggggccaacgtcctgacctgcaaggcctacgcggatgcggccgagaaggcgttcgacgcgcagttggccaaggaagcggccggggcccgctga

SEQ ID NO: 501038 - DNA, 225 bp, Stenotrophomonas maltophilia
atggggggacgcaacggatccggcgtcaatggcgacgcgcgttgcgggctactggccggaacaggcgcctcgcgccagggcgaggcgggcgttccgttcaacgctgccagcatgcctaaacacgctgccgggcattcgcactcgctgctctggcaggccagcggggccgcatcatcgcagcagccgacggctgccatcgcggccgagtgcggtgcggcgcagtga

SEQ ID NO: 501039 - DNA, 396 bp, Stenotrophomonas maltophilia
atgatccagttctgcgtgcacgaccaagagggcctggatctgttcaaacagaccctccgcgctatcgccaaggacgaaggaatgcagttcttcgatggcagcgcggaattggatcggcagctcgccaagtcaaaggtcgacgtgaagcgtcctgtcgtctacgtcggagtcaagcgggaagatggctccggaatggaggcggggaacctcggattggatcgcttcgagatagctattggcttctctgaagggaggaagcctgccgaggcccagtcattttctgtccgtgtcgaacgcaccttggccgagcgctggaatgtactcgcgattccaccggacaagggcgctgcgccgctggcatgtcgggcgggcaggccacaatcggtcgcgcgatga

SEQ ID NO: 501040 - DNA, 399 bp, Stenotrophomonas maltophilia
atgattgtcatttttgatgacaacaattcgccccacggcgggtgggatgtcaaggtcgacggagatttggcaatcacgcgggactactacccctggctcaatgaatcattcctgggagaatatgcaagattcatcagtctattcacgggcagttatatctttattgcctacaaatcaaccaatgcccgcaacgcatacttcgaacccattcttcattcgacgcttttaactcaatcaattcaatcaatggtaaagcacccagagagtcgaaccacttttcactacccggatggaagcagctcgctcgaacatgacgtcgaacctagcttccagaacctgcaagcaatccggatggaaaccgaagtgcagcgccaggccctgtccgattccgaagggtga

SEQ ID NO: 501041 - DNA, 273 bp, Stenotrophomonas maltophilia
atgttcatctgcctgcccgggaacgaagagaccgtttgcatcaaacaatactacctgcggcttgccgcgactgacacgcagactccgggtggggccagcaacctcctcaaggatcgggttgaaaatcttccaacttgggcttcccttctgtctctgctcggtgaccgcgctccgggcagcgacatgaccgtcaggaccgtcgagcgcaatccggattgcgggaccagacatatgtgtcacctcgaatctgccaaccctggattcggcaactga

SEQ ID NO: 501042 - DNA, 456 bp, Stenotrophomonas maltophilia
atgaccgcgatgcgcccgttccgacgcctgttgcctgtgctgtcctgcgtgcttgttgccggtgccgtgcaggcacagcagccgcccttgaccggacagacgctcggtggcccatcgccgtcggcagcggccaccgcgccgatgcaggccgagccgctgcccaccgtggagctgcccgcgccggccggcaggagggtggcgccaccggcaaccgtcgcaaccgacgtcgcccccctgccgccggcgccgcgcacgcgcctgcagagcggcgaggccacccgcaacctgttccgcctgcaggcatccgggcagcacgctggccagcgcctgccgatcctgggtgaccaggccacgttgagctatgcgcggtacctgaagagttttgagcacgagatcccggacttctttgagaccgatgttgcccggtccaaggacgccgcttcctccggacgctga

SEQ ID NO: 501043 - DNA, 378 bp, Stenotrophomonas maltophilia
atgcgatggtcgctgatgctgtgcctgctgctgcccatggcggcaccggcccagacccttgtctacaaatgcgtggacggaccgcatccggtctaccagcagacgccctgccaggggcgtgcggcgtggcgctgggacgtgccggcagagcagtcactgtcccgcggcgctgcggctcccgtggttccggcaccgaaggcgtccgcccggccgcggcgtgcgacacgggcccggggcgcgttgatcacgatcagttcggacgcggtggcctgccagcgcgcgcggcgccaccgcgagcaggcgctgctcaagcgccgacgcaccgacttcgtgcagcgccggcaatgggacgacgcggtgcatgacgcctgccgatga

SEQ ID NO: 501044 - DNA, 330 bp, Stenotrophomonas maltophilia
atgcagcgcctgttcgtgatgttccccgaccgcggtccgggcattggcctgctgtggctgcggctgtgcctggcttcggcgttgtgcacgcccggcgtgcacgccggctggtggctgctgtgcctgctggcggcggccatgctcgcgctgggggtgttgacccccctggcggcgatgatggcggtcgcgggcatgttcgcgcagcaggcgccttggccgctggtggtgttgccgccggcgctgttgatggtcgggccgggcgcctattcgctggacgcgcgttggttcgggcgccgcctgctcggccgtcggcctcccccattcgggtag

SEQ ID NO: 501045 - DNA, 609 bp, Stenotrophomonas maltophilia
atgaagcgtttcatcctcactctcaccatcgccgcgttgctggctccggggctttcgtttgcccaggacagcacccagcccgaaccccaaaagaccaacaagctgcgcctgttcaaggccggcgggattggctgcgctgccggtgcaggcatcgctctgctgaccggcaagaaagacaaggccctgacggcgtgcgctgcaggcgcagtcgttggcggggttgcgtcgtatcgcgcgcaggtccaggaagcccaggaagtggcagacgctgccaaggctgcggggctggatgctcaggtgcataccaagaccgttgaagccaaggacggccaggccgaggccctggacaagctggtcattcgttacccggccgctgacatgcagccggtgagtgccaagaccgctgccacgctggacaagctggccgcgctcctgaaggcgagcaaggaaaagctgacggtcagcttcagcggtgcggacaccgccgtgtgccaggtgccggtcgttgagctggcaaagcgcggcgcgcttcagaacgtcacagtcgatgaccagtgcggccggggcgattacgccatcacggtttcgccgatccccgacgttcgctaa

SEQ ID NO: 501046 - DNA, 1128 bp, Stenotrophomonas maltophilia
atgacacccgaagaactcatcaaacaacgcaagcagcgcgagctgctcgccaaagcagcacaagccaagaccaccgcgcccgcggacgcggagaagctcgtcagcgatgcgacaaaagaaaacttgaaaaccgcaggccggctggctgcaagttttggcaaagccttggcagacaaaaccaagcaagcggcctcggtcgccgctgagaaggggcgagaggcgcaagaagcgttggcccgtcgtgcggaagaggcgaaggcacgcagggaagccgaagccgccgagaacgcgcgcttggaggccgagcgcgcccaagcgttggtcgagcaagaagcgactgcccagcccgagccgcgggtggttgagcccgagcccgttcaaaccgattccgctcccgaagcgcccgagccggttgttgaggaggtggttcccgagccgacagcagaaccagaagcaggccccgcgcctgtcatcaaagagccggtcagcgctcctgcgcctgccgtcagtgaagccgtggacgcaacgcctgccgctccagcacctgtcgagctggtggtcccgtctgttccggcctctgctccgagcaagccggctcaagccccggtagcggcccccaaggcgacggcgacccgggccccggtgaaaccggaagcccccaaggccaggcccgccaagctgtccggtgaggcggctgcgaaggacagcaacaagaagggttggcaacttctggctgggtcgggcgtggccgtctttgtgctgggtggggcgttggcgtggtggatcactcaccgctccagcgaaaccgttccgctccaagacaaaccggctgcagcagtgactgccccggcccccgtcgccgtgccagttgctccggttgtatccgcgccgccccaggtcgaggagcccaagcccgtgactgccccggttgtggaagccccggtgctggcagagccacctaaggcccagaccccggcaactgccccggcgtcaaagccgatgcccgtttcgaaaccggctgcaaagcccaagccggcccccaagcctgttgctaaacccgagccgaaaaacgattggcaggaccaagccaacagcgatatcgatgcgtgggcagaaaagatcaggtga

SEQ ID NO: 501047 - DNA, 495 bp, Stenotrophomonas maltophilia
atgtttgggtggttgtttacgcagtatcgaaagcccggaaggctccacttcggatcgaagtggctcaacctgcatgggcgcttcttcattggtaacccagaaagctttgggctctccgattgcagggaaaacgtcctgacctcgtattactacctgcggggggaccggaagatgccggtggcaaacgatgaggactttgatgcctggaggatggacgccctgcgcgccagccaggttcggcacgccagcgaaaaacatgtgtccaaagccggctttcttgtcacctccgccgcgtgcgtggccttttgctttggggcattggtcgtcaacaaagtgaaaggaacacgcccttcgccggcggcgatccaactcgcgccctcgttgtcgttgaacgagtgcaaaaagaaatggacgagcggcaccatcacgcctcaggaaatcgtggcgtgtcaggtgctatctcaaaccaacaacaacaacaacgggaggcactga

SEQ ID NO: 501048 - DNA, 3015 bp, Stenotrophomonas maltophilia
atgttgctatcgctgatggattggacggtcggtattggccgcaagctgttcaagaaggacgatcaagcgtcgagcacgctggagcaaatcattctggacggcaatgaccgctacgaaaacttggtcgggcgctttgacgtgagcgaccgcgtgaagagccgcgtgctggacgttcccccggaggacgtagacatggcggtcgaagcgggcgctgttttcgacgagaaagagatggcactggttgtgcccgaagaactggatctcgaccagttccatccgtggtggccgaaggttccggaggatctgcgcaacacccaggcccgcatgatcatcaccaaagaaggacgtcgtgccgaaggcttcgtgctgggggacgacatggcgctgggcggcgacagcactgcaacctcgctgatgtatctggccttcccgctgatcggtgcggttcaatacttcttgggctcgctcattggcgcttttagttacgtggtgctgctggccgcgattccttactttgttgcgttgaagcaagcggaagggatgaaggaagccttcaagggcctggccctgatggtgctgcccgtgctgattgcaaccgcttcggcggcgttgtcgtccgcgctccaagtggacgcggccagcatggggcaagcagcggttgacccgatgaacacgggagcggggatgatggcggtcgctgcgggctttgccaaaatggcgggcatcgttcttctgatcttgaccattcctggcctgctgttgttcgcggccttcctgagtgcggcctcgcatccccaccggggcgtgctgggcggaaccgccgagcgcttcattcagatgatgaagtggatggtggtgatcttggccctggtggggattggctcccttctcccggacggaatgggcgtggccgtggcgtttgtgatcgcggccatgtatgccctgcagttcacggaaggcaacttcgttcaaacggccgctcgcctctatctgcagaacttggacaacaacctggcgacccagggggccctgtccaagtcccacgtgaaggcccgcgagcagcaggctgccgaagcgttgcgcgacaagaccccgcttttgaaggtgggtcgagcgtctggtcacctgaacgaccgcggccatggctttgcgccggacaagggcacggtgatgatgctgtcctggcgcgacctgacccaaggcctgatcgtctacgggcgtatcggttcgggcaagtccttcagcgtgctgcggccgttggcccgtcgctatcgcgagtccgcattggccgtaggactgcggaatgaactgaaggggagcgccgcgggcgagaccgttcttgatgcgaagcgcagcgggggtggagcactcatcctcgacgcgaaggacggcgcgatcatctccgatctgggtaaggacgcgtttgatatcgtcgtgcgcgcaggcatgtcggtggccccctacgagggcctggagccggatcaaatcaccaaggcccttcgcggcgcgaccggcggcaaggttgatgagaagtccaagctctggagcgatggcggcgacgctttcctcttccacaccggcatcatcctgaaggccgcatgcgagcacgagcaggcctaccgagacttctgcatcgccaagctggaagggttggagcacgcccggttgatgatgctgctggagcgggaggagctggagaagcgtggcttggggttggaagacctggaagcggtgctggctcgcgtggaagagcaaatgggcacttacgcgattgtggcggaggcttcccggaactggttctacaccccattccaccatgccaagctgttggcgatggttgagcaggtggtgccgacgccgcgtggcggggagatcgccagcgctcgcgtgctggagttggtgaactggttggggttggagcgcccggatacgtctagcacggacgaagagcgggaggcctatgccgcctactcccgggactaccacaaccgcttggccacccggtccgagaccgtccatcccgacttgctgcgtcccatgtcccagctgcaaagctcgctggaatgggcattgttgggcgttcccgcaatgcataaggagcagcgccagtccttcacgttgaactcgcgggggctcatcgaaaaactgcttcggggtgaaaagctccggacggcggatgacatcccgtggcattccgttgaacgtggggaagtggacgtctcccaagcgctttacggaaagttcgtgggcttgttcctgccccccacgcagttcggcgaagcgggcgacatgatgcagcggttgctcaagcagcgtgtcatgaacggcattcgggcacgcggggcgcacggcgacaagtggcgcgaaatgctgccgggccaaaccgacgtgctgctgatgatggacgaggcgcatttgctgctgacttcggacgacgtgctgctcttcagcacctcccgaagcctggggttgatgccggtgatcgcggtgcagggccacgacagccttatcaacacctacgggtcggagaacgaagccgatttgctggccaacaccatgcaatcggtcatcgcgctcaaccactcgtttgtcacacgcaactacttgatgaagcggctgggcaaggctcagttgaccaccttcaaggagccgacgcgtggcatcgatttctcgggtggcttgaccaacttccgccacagcgttctcaacgacccgaaccacccctacgcagcggcctacgagcaaatgctgatgcagggcgcaggccgcttgagcgcgcttcgcgtggatccggcgacggggcgcaaatggcgcgtcggggctgaagacacggtgggccaagaggagctggcacgggacatcgacatgcccacagggggcaagcgggaggtcctgccgctcttcctggaagaggaatacccggccctgaccgctgcacgcggcaatgcgattgtctcgctctgccgggcaggcgtgagccgcacggacttggccgagatgatgcccaacgactga

SEQ ID NO: 501049 - DNA, 531 bp, Stenotrophomonas maltophilia
atgagcaatgcccacctcgatgccttgaacgacctgctgggcgctcgcgataaacggcgagccaagctggccggagagcgtccaaacgaccaccaaccgcagaagaaagcagccttcgaccagtcgctggcgaaggaccaggccgatatccaggagaagcaacaagccgtgttggactgggccaagcaagccaagcccgacgagatcaccgacgcgcgagagcgcttgcgcgcacaggtgcagcagcgcgctgaagacgcgcccaaagacaagcacgcccaagtggtgttcagcaccgtggacgaatggcgacagaagcgccagcagaaggacggggggcaacccttgggggaaaacatccccatgctgactgcggcccagcggcagcaaaccatggggcctggtaagttgggctacgcgcactacgccgccagcgcgaagaaggaagcagacttcatgaagcgctatgaggcgaacttcgactgggacaagcacgaggcccaagtccagaagaacatctaccgtcaatga

SEQ ID NO: 501050 - DNA, 123 bp, Stenotrophomonas maltophilia
atgtatatttttgccgatgcttacgagtatgccgtggacaatgtggggaacctgttgatcactttgggcgcgttttcggtggtgagctacgtggccgccaacgtggcggggttgctggcatga

SEQ ID NO: 501051 - DNA, 1071 bp, Stenotrophomonas maltophilia
atggaaccccaacacgacaacccagtaggcaaccccggtgggggcgatttcttgaatcctccccacgagccgttgcttcatcccattctccaccccctgacgctggcccagttctacgggaagcatcacgaggccgccgctgccgccgatgcgcgggaagtgttggacctggccacgcggttttgccgagaggcccaggttttcgggttggacacccagaccgacgcgggttttgactgggtgatgacccccagccgtttctccaaccgcatttccctggagctggggcagggcggccacgccgcgttgcttcaggtcgatccggacctgtccactcacccgctcgacgcagccatccatgcaggcgtgctgggccacaagcccctagcctccgcttacgccttgctcccggccgagcagcgggatgggctgttgagagaactgcgggaatccatcgaccaggttcagtcgaaccgttccgcagcgaagcagctccaggccctccgagccctgcctgaactgccggtgccgtctcagccgcctctggacatcgcccaactgctccggcggtttgaggtccccgatgcccaagcccggttggcggcggaccacgtcaaggcaacctatggaggagcgctgaccacgatgcatggtagccaggtgctggcagcagcccatgcgcatgccccgcacttggggctatacggagccccttggcagacgtggctttgcgagaacgccacgatcgggaacctgaagggggtggaggcctgtttgcgcatgcaggccgagcccaatgtgcccgacgccaacggcgagacgccgctacacctcgccgcgcgccacggccaccccggcatcgttcgtcggttgattgaggccggcgcggaccccgccttggggaacccccgcggggaaactcccctacatgtggcggcccagcacaaacgcgcgcagtgctgcctggagctcatggctgcaggcgcggaccctgggcggctcgacaacgccggccgcaagccgggcgacgctcaccgggagaaggcacgtgagcaagtccacgatttatga

SEQ ID NO: 501052 - DNA, 1737 bp, Stenotrophomonas maltophilia
atgaacttcaaccaggccctcactggcagcctggcagcgctgggcaaccttgccaccggcacgatctcattccgagagcctgccgccgcattctgggaggtggccaaggagcaggccacgtttggcacgttggcacgggtcggcgtcgccgcttgcttggccgggtgggcgtcggcttgggtgacgcggcgggggctcatcccgcgatcaaatacttggcatgtgtccggcgctcaactgctacaggggaaagatgccttgactgaggcccgtcgccgttcgctcacgaagaaagagcaggaagacgagctgcatgccttgtcgctgcatcccgactggaccgtcagcaaaaagctgctggcccgtcacctcttcatctacggaagcgtgggctcgggaaaatcagtcatcttgaagcacctgctggaacaggttgttcggctcgacaaaaaggcattcatctacgacatcaagggcgacttcacttcgatctttgaacggccagcgattgtctgtccgttcgacaagcgaagctggatctgggacgtgggccgtgacgtggcgacgcaaacccaggctgccgcgttctcccaatccatcatccccccggaggagggcagcggcgcattctgggcgtctgcggcgcaagccttgctggaagggtgcgtgcgcgaactccaggccacgaagggcaagaactgggggtgggcagagttggccgcgttggttgcccgccccgctgaactgatggctaaagcactgtcgctctactacccccgagccgccgctctcatttccaatcccgattcgaacaccaccagcagctgcatcgccgtgctcgccaacggcaccgcggttattgagcgcctagccttggcatggcccgagcgcacgcccgggcagatgttctccatgctggactggatcaaggacgactacacgggatgcaagcaggtcattgttcaatcaggtcctgatgaggtgctaaccaaggcctacatctccgccatgatcaactgcgcggtgccggaaatcatcggcccctcgctgccagatgacgaaaccgggcgattcctggggttcttcttcgatgagcttacctccaccggcaagctcaacatcgagccgttgcttgccttgggacgctcaaaaggcgtggtggcctgcatggccgtgcaggattggtcacaggtcgagaggatctatggggacaagaccgcgcaagccttttcagggttggttggcacacacattatttgccagctccaagttggcgagacccgggaaaaagtctcccggaacctgggcaagcgcaccgtggcttggcggacccacgacgaaaaagcaaccgtccacgaggagtcgaaagccgttgttccgccagggcgcctcacggacgatctgggcttccgcaaagggaaggcatacggccccgagcgctggggcatccgagccatcgtccagacgaccggggatccgctcttgttggactggccgggggtcagttatccgaaggttcgggaggggcagaagcgggcacggtggacgaagcagggcgctcgcccggtggagcaaaagcccatgccaccgagcgacgcgcagagcgcagccgaggtccagcgggtcttgaagatgaccgcagaccaagccgccgcagagctggagaagcggggtgccactccgccgaaacttcgcgccgtttctgacgacgagctggaagccatcttccgcaagtag

SEQ ID NO: 501053 - DNA, 3051 bp, Stenotrophomonas maltophilia
atgatcaacgccacactgctgaagcgaaacgccggggggaccaagggtggttccgcgtcgatttactacctcttggcccaggaaaagctctctgaagaagccgagcaggcaagcatggccgttggctactacagccgctccgcgccgagcaaagaggcgcaatcgaagttctacggcggcttggcccagcacctgggtctggcaggcgtccgcgccacggaagagctgatgattccgctgacggatggatttgaccccaagaccgggcgagcgctatgccacggagccggggatcgcggccaagtcaaagtccgctttgataagaccggcaaggccccgttgcgcgacaaagacggcaaggtggtcacgtatcttgccggcgggcatcgcatcggttttgacctgacaatcagcgcgccgctggatatcagcgtggcgtttgcactggcgtccgatccggcagaacaagaagccatccatgccgcgcaccgcaacgcggtccagcgggcgatggaagcctttgaagccatgtccgaaacccggcgcaacagggccgggaaagatgtcattggggtggatgggttgatctggagcagccatcaccactacgcctcccgagccaatgaggcgaccggcgagatgggcccgaacctccacacccacaacctgctctacaacctttccttgggcaacgacggcgaagaggccagcctctctgctgaagaaatctaccgctaccgcaaagcgatggatgaggtctacaagaccgagctctatcaaggcatgaaagcgctgggctatggggtagaccgcatccgtgaactggacgacgacggccaggaaaccgggcgcgtctacgcgcggatcgcgggcctggacgaggaggtgacggatcgctacggcaaccgccgcaaggaaatcctggcctacgcggccaagcacaacgtgtctaatcagcaggccacgttggccacgcgcaaagacaaggacgagccgccttaccaggagctcatcgcacactggcaggacacgctgaaaggcttcgacgtatccacggaaagcctgaagcaggccaagggcaacgcgcacgaaatgcagcaaaaatccccggcagaactgctggagcggctccacgagacggacgccattttctgcgaccacaacctcttggaggtcctgggccaagaatacgccggcagcgtcaccgtggcagagctctacagcttggttgaagcgtttaagaaggagcacggcctggtgctggtcaaccccacgcgcctgcacgacgacgacaagggcgattcgctggcaaggcggcatacccaggagcgctactgcgccacgtggatgctccagatcgagcaggaggtggtggccttcgcgattgagcgagccaaggaaacccatcaccacgtgccccaggccgacgtggaccgggtggtggaagactacgagaaggccaagggctttcagctctcaaaggagcagcgccacgcgctggaccacatcacccagggcagcgggggcgtggtcaacctttccgggctcgccggaaccggtaaaacgacgatcagtgagtgttttcgggcagcttacgaaagccaaggatttgagctgctgggcgtctgcgtttccaacgccgcggccgagaagctggaggcggaaagcggcatgtccagcgtgagcatggcgcagatgctccatgacctggacaaaggaaagatgcagttccgcaagacggacgtcatcgtggtggatgaggcaggcatggtcgatgcgcgcaacacccacaagcttttcagctacgccgccaaggcgggggcgaaggtcatcatgcagggggacgtggagcagcttcagcccatcggggctggttccggctttcagttgaccaagcaagcggtgggcgacgccaaactcacggagatccgacgccagggcaaacagggagaccgagacaccgctctgtcgttctacgccaccgacgagcacggccaggtcatcgacttgaagaaggccagccgttcacggtcgcagaccctcgacaagggcaacgaaataaaggcccggttgctcgacaccatccgcgaaacggccacggagaaggaagctcgcgagcggctgctacacgaatacttcgaagacgcggcgccgatgagcgagaagctggtaatcgcccatacccgagccgacgtggccgcgctcaacgccggcatccgggctgggttgaaagaacggggagagctgggccaggacgaagtggtgatcgaggcccgggacaaggggcgcaagttcgacctggcgttgtccaagggcgatcagatcgtcttcaccgcgaagaacaaggatctgggggtcatcaatggcacccaggtcgtggtggacaacatcaagccctcaagggcgggcggctacgacatcagcgtgtccattcgctcggagaccaagggcgacgggcggcggctgacgttcaacagttttgagatgaagagttttcagcattcctacgcagggacagtgcataagagccaaggccagggcaagcgggaggtctaccacctggcgaacctgggcatgctcgacgcccacagcgccctggtggcctttacccgtctcacgaagggttcctaccgcatgtatgcgacgtccgatgacgtggagcggttgaacgagcggctcgggttggagcgcttgaaggagaccgtgctggacgctggcttggtcaaggacaccaaagccgcgcagcgcagcggggccaaggtgacgttggacgacttgctgaaaaagcaggtcggggaagtagagcagaaggcatccaaccgcccggggcagcagcgcagcggcgcggaggtcaagttggatgccctgctgaaggagcaccaggagcagaagcaagcgaagctggccgtggcgaagatgagcgaatccgagcgcaaggcccgccaactgctggaggtgttcgagctggcacgaggacagaaggccaagcccgtgttgccggtcgcacagcccgtccagcgcgagcgggtgcgccagggcatggatcggtga

SEQ ID NO: 501054 - DNA, 1107 bp, Stenotrophomonas maltophilia
atgacactgcaacacggatggcaggcttgccgaaactgccacgcttccaacagcgatttgcgcgttgaggggccatggcatctacgcgccaatccaggctactggggcaccagcgagcccacggttcttgtgctgggattctccaagggcgccactcagatttccgcctctcagtcaggcaacttcgacggggttgccttcgccggcatgcgccctcgcctacgccaggttctggatgcgctgggcatcgacctgggaacggagacagtcgatcaagccctctcggcgtcaagccgttggctgggtgccgcgtcgctgattcgctgcggcctctcgctggacatcgacggcaagctgaccaccagcggcaccatcatgcccaaggcggcttcggcgacgttcacccggcaggtcatgcgctcctgtgtggagcagcacttgagcccgctgcctgccagcgtcgaaaaggtggtgatgctgggaaccacggatgcctacatcaaaggggtcaaggccctgatggcagaccggttctccgactaccggaacatcaacgaggtggcattcactgcgcagggccggacctgggtcttcgctgcgcacccgagccccgccaacggtgagttcaagcactggctgggcggggacatgggatccgcgtcagggcgaaagctgcagctggctcttaaggcccttggctcagcccctgtggtgccatctgcaatcgcaccgaccgttgccgttacaaagcccccacgccccactgcatcaagcactccaacccaggccccagtcgccaaggacagcattccgatgaccagcaccaccaatgaccgctttgcccagaccttccacctggtccgcggagatgggaagaaggtcgttcctgtcatgatgaagaacaaagacacgggacgcgtggctttccgcctggcaaagcaagggaatacaaaggatggaacggttgaagtcactgacgaggcagacctccttcgcaagtgcgaaagcggcctctaccaagtcagggcgcaacctttggacaagtcgtcacctgccaactttatccgcccgcttcataaccaccgaatcgtgaagaaccgagcttga

SEQ ID NO: 501055 - DNA, 480 bp, Stenotrophomonas maltophilia
ttgaactggaaacgcaatcagaaatacctgtcccgcccacggcatctctacggcttgttctttgacaacgggtgctgctacgtggggcagaccgtcgacttaaaccaacgcgagcagcagcaccgcagcgctcgtgggggctggcaggggcgccgattctcgttcgtgccgctgtcgagcatgacgggcacccaggccaatgcggaggctcacgaatacgcgtggcgctacaaggcctttcagcatggctggcgaatctatagcaagccgccgggcctcatcatccgcaatccgcgtcgccgcaccacggggcacatgaagtcattggctgcgggctatacgtggcctggtgctgcgccaacaccggctgggggtgggagcatggggagcagcgggattgggtggacggtgttcaagtggtgtttcgtctaccccggtgtcctgctgctggtgctgctggcctttgggattggtcggtga

SEQ ID NO: 501056 - DNA, 1692 bp, Stenotrophomonas maltophilia
atggcttcgcttcgcatttcgattttgacggctttgatgggggccgcgttgttttcctcaccatcgtttgctcaaaccgccacggggaccggggccacggcttcggaccccaactcgacggcgaccggggaatacgcccaagccttagccccgaatgccactgcaacgggggcctatgccaatgcctccgggaacggggccgtcgccaccggtgttcaagccaacgcctccgcagacaacgcagtggcgtcgggcacgaatgcccaagcgtccggcgcgaactccattgcgatgggccaagccgcgaatgccacggcggtgaacgccgttgcggtaggcacgctgagctacgccgggggcgaagcggccatggccctaggagcgcaatccgcggctaccggcgtccattccttggcggctggtgtccagtcacaagccagcggggacctctcgttgtcgctgggctacttcagccggtcgcgaggcaactcgtcgttggctcagggcaccttggcagaagccaacgcggatcatgcagtcgccattggctcctccacggtcgccgacgcgcgccagtctgtcgcactgggcgccggggcagaagcacgagcgcaagattgcgtcgccctgggctcccatagccgatgctgggccagcgacgaagtcagcgtgggatccacttctgaggacggaggccagagcacccgccgaatcaccaacgtccgcgccggcacctcggacaccgacgtcgcaaaccttggacaggtccgtcaggcggcccaagcgctgggcggcggtgccacgttcgtcaacggcaactttgtcgcgcccatctttcagttccgtagtggagccacctacaacactgtcgaggccgctatggatgatcttgatggtcgcttgactgtccaagagcagaatccaggcggtggctcgggcacgccaggcccgcgtggcgcagatgggttgagcgcttacgaggtggcgttggccaacggcttccaaggcaatgaacaagtttggctggcaagcctgaaaggggagccaggggaacaagggcctgccggcaacgatggggtggatggaaccgccggcaacggcacgggctcgactgtaaaggcgggcaagaacatcgaagtcaccgagagcgcggatggcacccaaaccgtggcggtcagcgacaacgttcaactgtctgacgcgggctcggtccaggtcggccagaccacggtcaacgcccacggcgtgacggttcagggcggcgcttcggtgaccacttcgggcgtcaacgcgggcaatcagcgcgtgaccagcgtggctccggggcgcatcgaacgcgggtccacggatgctgtgaacggtgggcaggtctacgaaatgcagcaggtgtgggatgaccgctgggtcgatacggaccgccgcctgcggcaccaggatcgccgcatcaacggcttgggcgcgcaactcggcgcgatgagccagatggccaccgctgcggcgcagaacgggggcacggccgttggcctggtgaacctgaacgtgggcgtgggattctcgggaggcagtgctgcaatggccgtgggctggggtgctcgggtgtctgaaaaggtcagcgtctcggcgggcctgtccttcggctctggcaacaagccggtagccgggcttgggatcagcatcaacctggggcgttaa

SEQ ID NO: 501057 - DNA, 756 bp, Stenotrophomonas maltophilia
atgcagtcccgatttaccatcaccgccatcctggcttgcctggccttggccgggtgttcgaccgttcaacccaaacccaagcccagcaccccttggatctaccaaacccctaagccgcacggcgccatttaccggttcttccatccgaaaagtgaaaggatgtggaaaggggtttccccagcgctgcgggaaaaggttgaagccgtccaagctcaactcgcagcagagggctacgacgtccgcccggtcgagggctaccgttcgccagagcggcaagctgcgctactcgcttcagcttctaatgtcacgacggttggtgcctacagtagttgccacaacttcggcctcgcattggatgccgccgttttcgtcaatggcgagccgagctggaacctggacgatgcctatgtaatggccggctatcaacgctttggcgagctggcggagatcgtggggctgaactggggcggccggtggaccaacccgaaagactatccccacgtcgaactgaaagccgagtgcggccaggccaagtgggcctaccggcagggacgcaagccgggcgcgtttcctccagtgaccgggacaccctcttctgaagtgctggcccgggcgctggctccggcctggtgtcctgctggcatggaaacggagtgtctggcgtggggcaatgaaaaccggatggcctggaactggacgctcccgcgtcgggtttgttttgcgacctttcctaacacattgaaaaagatcggatga

SEQ ID NO: 501058 - DNA, 972 bp, Stenotrophomonas maltophilia
atgtctgtgaccaatgcggagctggcgcgtggtctgcccaagctccaagatatccttgcgcgtatcgcctctaaggagctgaacgtttttggtggcgtggtgcgatacgccgcgggaactggcaaggggggccagatcgccgcgcaccttgtattcccgagcgacccgcagcaggcccagcagagcatttcccagctgcaggccgccatgcaacaaagcatgggcaaccttcagggcggcattgatgtcctccaacagagcatgggctcacttcaggccctgcagatggcaaacctcgccatggctggcttgaatctggcggtcacaaccgcaggcttcgtcattgtttgtagaaagctcaacaagatcagtggccaaatcgagtcccagtccgctggcatagcccagacacttcagctggtgagcgaggcccacgagcgtagcttgctgatggatgaggcgaggttccgcggcctggtcctggcttgccaacagcactttgaggaaggcgacacggagctcctcaagcacaagatccaagatttccacgagcaataccagttcaccaagctggtgttgcagcgccacgcagttaaggcagcaagcaacaacgaagctcgcttgattgatatccaggttctccaagaccgcctagtgaaccttggcctgttcctctcccatatccagaccaaggtgggagcccgcgagcgcgggcaagaaacccttcggaaccttgcgcaggatctggaggaactcaacgggagccgcgtgcaggccttgacctcggatcgccagttcgctttcagcatcaccgaagatcagctgagcaaggtgacttctttcatccaacaggggcagcaagccatccctgcccttacctaccaggccgaccttctcgccctcgaacacttcgatgtcgacgctgtgaacgaagcggcgacgacaggagagatcgtggtgattgcggcgtag

SEQ ID NO: 501059 - DNA, 867 bp, Stenotrophomonas maltophilia
atgcacgcgcttttcccagtgaccgaacttccgatctctttcggtgcgactccaatgaccgagactacggtggctttggttagaatccgatccgatgggccgattctagatagagccctgacgctaagagagagacgggttaggcaacatacaggggataacatggatttcagcgttccacggaaccggccattggccgagcttctttctcaagcctgcagtgaagatctggacgttctggctgacttgatcaccgacaacggcaaggggcggctcgcgctcaactctggcatcaaggcgctcatcgttaagagaaaggccgacggggcccttcagtcgattgctgatgtcctggaaaaggagatctgcgacttcggcggcaacaccctgatgaacacctaccggtcctacggggttgaatactcggagctagttaaagacgttgctaaaaagctgggtagcaagatcccagagggcgccgacgtctatgctctcgaagagttggcccttgcgggagccatcgggaaatactcgcccgacgatgtaactccagagggcgctcgcgagaccacgccgaactcggtcatcgacaaggtggtgcaacagctagtccagaacgcagggagggcaacaggcttggcctccgctggtggagtagcaggctttgcatccgctttgggcgctcgtgcggcatcgcttgtcgcaggccctgtcgctgttggggccgcgggatactcgctctacgaagcgacaggcccagcattccgcattacagtgccagctgttctccagatcgccaaaattcgtcgcaagcgcattgacgccgatttccaacactattccgagaggctgaaagcatgtctgtga

SEQ ID NO: 501060 - DNA, 2094 bp, Stenotrophomonas maltophilia
atgaacgtccgcaacctggtcccgctgggcctgaccatcgccatcgctgcctcactggcggcctgtggcaagaacgaaaccgccccggcggccagtgccgacgccaagccggccttcgacctgtcgcagatcaagacgccgctgatctcgctcaacagcgccgacctcgatccggccatttcggcctgtaccgacctcaatggcttcgtcaacagcaagtggctgaaggccaacccggtgccgggcgaccagaccacctggggcagcttcgagatcctgcgcgagcgctcgctggaagtgcagcacgcgctggtgcagcaggccgccgccagccaggccaaggccggctcggtggaagccaagatcggtgacatctggaagaccggcaacgacgaagcgaagatcgaagctgccggcctggcgccgctgcagccgcagctggacaagatcgccgcgctgaacgacaccgccgccatcacccggtacctgcgcgacagccaggccgagggcaagggcgtgctgttctcgctgttcgccaatgccgactacaaggattcggccaacgtcatcgcctacgtcggccagggtggcctgggcctgccggagaagggctactacttcgacgatgcgcaggccaagatccgcgatgcctacgtggcctacatcgcacaggtgctgaccctgtccggcgtggacgcggcgcaggccgccgagcaggccaaggccgtgatggccttcgaaacccgcctggcgaaggcctcgatgtcgcgcatcgaaatgcgtgatccggccaagcgctacaacccgctcagcgccgccgacgccgacaggctgaccccgaacttcagctggaccgcgctgttcgacaccctgaaggtgccggccgcgcagaagttctcgctggcccagcccggcttcttcagtgaaatggacaagatgctcgccgacgtgccggccagcacctggcaggcctatctgcgcttccacaccatcgacgacgcctcgccgtacctgagcagccagttcgagaaggccaacttcgatttctacggcaccaccctgcgcggccagaaggaaatgcagccgcgctggaagcgcgtgctggagtcggtcaacggtggcatgggtgaagcgctgggccagctgtacgtcgacgccgtgtttccggccgagtcgaaggtcgccatgcagcacctggtggagaacctgtcgcaggcgctgaaggcgcgcctggagcagctgccgtggatgggcgaagaaaccaagaagaaggcgctggaaaagtgggccagcttcaccccgaagatcggttacccggacaagtggcgtgactgggcgggcctgcagaccaacggcgacagctacctgggcaacatgcaggcggcgcgggcgttcaactaccgctacatgctggacaagatcggcaagccggtggacaagaccgagtggggcatgaccccgcagaccgtcaacgcgtactacaacgccaccaagaacgagatcgtgttcccggcggcgatcctgcaggcgccgttcttcgacgccaaggccgatccggcgctgaactacggcggcatcggtgcggtcatcggccacgagatgatgcatggctacgacgactcgggcagccagttcgccgccaacggcaacttcgacaactggtggaccgacgccgaccgcaaggccttcaccgagcgtaccgaccagctggtcgcgcagttcgacggctatgaagcggtgccgggggtgaacgtgaagggcaagctgaccctgggcgagaacatcggcgacctgggcggcctgaccgtggcctatgacgcgctgcagatggcgctgaaggaagacccgaaggcgaatgtcgaggtcgatggccacagccaggaccagcgcttcttcatgaactgggccacggtgtggcgccgcaatttcaccgatggtgagctgcgcgtccgcctcaacaccgatccgcatgcgccggccaacttccgtgccaacggtgcaccgtcgaacatgccttcgttcgcggccgccttccagtgcaaggccggcgatgcaatggtgcgtgccgacgacaagcgcgtggtgatctggtaa

SEQ ID NO: 501061 - DNA, 1593 bp, Stenotrophomonas maltophilia
gtgttgaagtggggtgtgctggccgtagcgctggcgatcgggggcaatgccgtggcgcagcagcgcgaggcggtggacctggacatggtcagccgcatccggcaggaggcgttccaccgttcgcaggtgatggacaccttcagctatctcaccgagcgcatcggcccacgcctgaccaactcgccggcgatgggccgcgccaacgcatggacccgcggcaagttcaccgaatggaagctggacaacgtccacgatgaagcctttgatgacttcggccgtggctgggagttcacctcggccagcgtggagatgctgggtgaccgcatccagccgctgcatgcgctgccgaaggcctggacgccgggcacgaacgggccggtcgaaggcgaactggtgcaggtcgacatcaagaagcccgaagacatcgagaagtaccgcggcaagctgcgcggcaaaatcctgctgctgggcgaggcgcgcgagtacaagcgcggcaccgaaccggattcgcaccggcacgacgcgacctcgctggaaggcctgcaggcgttcaccgtgcccaaggaccaggacgccaccgccgagcgcgccaagcgggtcaaggaataccaggagcgccagctgctggcgggcaaggtcaacgccttcttcgtcgaagagggcgcgctggcctcgatcagcgtcagcagctgggacaacggcatcatccgcgtcgccggtggcggttcgcgcaaggccggcgaggcggtcggcattcccgagctggcgatgatcagcgagcacttcaacccgctggtgcgcgcgctgaaggccaagcagcccgtgcgcctgcgcgtggacgtggccgcgcgcttcactgacgaggccgaccagcccggctacaacacgctggccgagatccgtggcagcagccggcccgatgaagtggtgatgatcggtgcgcacctggattcctggcacagcggcacgggcgcagccgacaacgccgccggcgtggcggtgatgatggaggcgatgcgcatcctcaaggccactggcgccaagcccaagcgcacgatccgcgtggcgctgtggagcggcgaagagcaggggctgatcggctcgcaggcatatgtggccaagcatttcggccggttcccggagcccaccgacccggcccagaaggcgctgccggcgtcgctgcgcgagccaaccggtgcgctgcagaagacccgcgattacagcaggttccaggtctacttcaacatggacaacggctcgggccggttccgtggcatctacgcgcaggaaaacctggcggcgatgccgatcttcgaagcctggctggccccgttccatgacgtgggcgccaccaccgtggccacccgcaacaccggcagcaccgaccacatcagcttcgaccgcatcggcctgccgggcttccagttcatccaggaccggctggactacttcaccaatgtccaccacagccacctggacacctgggaccacgccgagccggaagacctgaagcaggccgcagccatcgtcgcttcgttcgcctacaacgccgcgatgcgcgagcagccgttcccgcgcaaggccgaaccgtaa

SEQ ID NO: 501062 - DNA, 645 bp, Stenotrophomonas maltophilia
atgaaggcgaaagcaacagctctctggctcctggtgacctcggcattggccggtgcactggcatggcacttttcgataaacgaccctgcacatcgttctgctgcgcagaactcacaccgctcttccacaaacgcgcccaccgccactgagcgagagcccgccagcgtagcgggtcgttcgggtgcaaatcgccgcccagcgactcgtctcccgggtgacgcgcccaaggaggccgatctgatctacgacaatgcactggatgaaaaccgaatcgaccggctgcttgcaagcgccggcgccttcgctgccatgaccaacgccatgcacgcggcagcttcgacagacagggaactgtcggaatcgaccgctctgtttgccagccacctccagagtggcctttcggcggaaggccacgcccggacagtgctggacttcagctgcgggcgacggctgtgtctggcacagctgtcagaccctgcgagcgcgccgttggatctccggcccctgatgcagcatgacggagcgacctactttcaggcggcgagtgtgtcagatcaggtgaagaccctcgacggcaggccatcgctgcgggcagtgttcgcgatcgatccggccatcaaccagatcgtctcgatacccgactga

SEQ ID NO: 501063 - DNA, 1155 bp, Stenotrophomonas maltophilia
atgccccccgtcccgccccgacccgacgacgccgacaacgtgaccccaccgccgccgaccgacgcggcgcctgcgcccacgccggttgaaccggcggtcgcgccgaaatacctcaagcccagcgcgcgcagcgtggtagtgatggtggtggtggccctgctgggcatcgcgctgatcctgcgtgcgtggcacctgtggccgttcaccagcagcgtgatggtgaccgacaacgcctacgtgcgcgggcagatcacggtgatggcaccccaggtgaacggctatgtcaccgaagtgctggtgaaggatttccagcatgtgcggcagggcgagccgctgctgcgcatcgatgaccgcatctatgcgcagcgcgtggcccaggcgcaggcgacgctggacagcgcgcgcgcggcgctggccaattcggaccagtcacaggcgcagaaccgcgcacagattgcgtccgcccgcgccacgctctcggccggccaggcggaactgcagcgctcgcgcaatgagctgaaacgctacgaggaactggcggcgcagcagctggtgtccatcaacgaccgcgacaagttccgaaccacccaggcgtcggcacaggccagcgtgcaacaggcgcaggcgcagatccgcatcgccgaggagaccctggtatcgacccaggtggcgcgcaagagcctggaagcccaggtggagagcgcgcaggcgcagctggagctggcacgcatcgacctggccaacacggtgatccacgcgccgcgcgacggccagatcagtgaggccagcgtacgcgtgggccagtacgtcgcggccggttcgcagctgctgttcctggtgcccgatacgctgtgggtggtggccaactacaaggagggccagacctggggaatggcgatcggccagccggccacgttctcagtggatgcgttccagggccaggtgctgcggggccgcgtgcaggagatcgcgccggccaccgggtcggaattcagcgtgctgcgcccggacaatgccagcggcaacttcaccaaggtggtgcagcggctgccggtgcggatatcgatcgagccgggccaggaactggcggcacggctgcgcccgggcatgtcggtgatcgtgcgggtggatacccggtccaagccgatggactag

SEQ ID NO: 501064 - DNA, 567 bp, Stenotrophomonas maltophilia
atgaccgctcaacgtgccgatgctgccgcccgccgtgccctcatcctcgacgccgccgatcatgtcttcggccaacatggcgtcaccgccccgctggacctggtggtcgaacgtgcccaggtgggccgcgccaccctgtaccgcaacttccccgaccgcacagcactgatccaggcgctgctgcagcgcacggtcgaccgcatccggcgccaggtcgaacagctcggcgaccgcgacgacgccctgttcgaggtgttcgaaggcatggcccagcgcatcatcgattcgccggcactggccgactactggcgtgcggttgattcggacgtgccgtccatgcgcgccgcgcgcgagaccgtgcgcgacctgctggaggaaccgatcgcccgcgccaaggccgccgggctgtgccgtgccgacctggaaaagacggatatttcactgatctcgggcatgctgggtgcggccctgcgcggcaagacccgcgacgagcgcgcccagttggccgggcgcgccctgcagctgctgcgtgggggtctccagggagctgccagcgaggcccgttga

SEQ ID NO: 501065 - DNA, 2424 bp, Stenotrophomonas maltophilia
atgggtaggagtggcacggaccaacacagccggcgggtgccgatgacccgggggctgggactgcgatttgcgttgttgacgggcatggcgatcggactggtcgctctgtccgccctgatccaggaactgcaggcggcctccactgcctggatcgccggccagggctactggtcgcgtggccagcaggatgccactgccgcactcagtcgctacctggcgcgcggtgatgcccaggacctggacgacgcacgccaggccctgcaggtgccgttgggcgacctgcaggcgcgactggcgctggaacaggccgaaccggacgaggaaaaagccaggcagggcttcctgcagggcggcaacgcgcgtgccgacatcccacgcctggtgttctcgttccgctacgcgcgcgacatcggtgccttccgcgaagcgagcgcgttgtggcggcagaccgatggcgacctgatggcgctgcagcgactgatcgatgaactgcagttgcggcacgacggcagcctggtgcccgttgccgcacgcgaccactacctgcagcagctgcgtgacctggaccagcggatgaaggtgcagagccaggcgttctcgcaggcactgctgcggatggccacgctggtgcggctggcgaccctgatggtcgcgggcctgtcggtgctggcgatcagcttgatggcggtcgccctggcgcgccgcgtcggcaaggacctgaccgagcacgagagccgtttccgcgcagcgttctaccaggccaacgtcggcatgctcaagctcgacaccgaaggcaaggtgatcgaggccaaccaggcgatggccgatatcctcgaccatcgccgcgacgtgctgctgcagctgtcgctgggtgacctgctgatggacggtgagctggtcatcgacggagtggggcgcatcgactgggaccgccagctgcggccgagcgaactgcgcttccgccgtcgcgacggcagcctggtctggggccgctggagcggcaccggggtgcgcagcgccgggggcggcttgtcggtgtttgccatcatcgaagacgtcagccagaaccacgccctggcgcgcgagatcgaacaccacgccagccatgatccgctgaccggcctgatcaaccgccgcgagatcgagcggctgctggaacgcgcgctgctgcaggtgcgcagcgagggcggcacgcatgcgctgtgctacatcaacctggaccacttcaagttggtcaacgacagcttcggccacgccgccggcgaccagatgctgcgcagcttcgccgactacctggtggcggcggtgcgcgatggcgactgggtgggccggctgggtgcggacgaattcgcggtgttccttgcccatgccgggcaggacgaggccaagcgcgtgctgcagcgggtgatccgcaatctggggcaggcgacgttcccgatcagcgagggcagcccgcagctgagctgcagcatcggcgtggtcgaggtcagcgccgaggcaccggatgtgaactggttgatgagcgccgccgacagcgcctgctacgcggccaagcaggtcggccgcaaccgcgtgcactgcttcaacgaagaccgcatggcactggaggagcggcgccaggaagccgagcgcctgcagggcgtcagcctggccatggccgagaaccgcatggtgctgtacgcgcagcgcatcgcccgcgtcggcgatcccagctacctgcactatgaggtcctggtgcgcatgcgcggcagcgatggcagcctgcacctgccaggccagttcatgccggcggtggagcgctacggaatggccgtggcgctggaccggcacgtgctcggcctgctgttccggcatctgcaggtatgcccggcgcacgtgcggcagctggggctgtgcaacgtcaacgtgtcggcgcagtcgatcgccgagcccggcttccttgcctttgtctgcgacctgctggagcgcaaccgcgcgctggccgccaagctgtgcttcgagatcaccgaaacggcggcgatcagcaacctcagccaggcgcgcgccttcatcgacgcggtgaaggcacgggggtgccggatggccctggatgatttcggctccggcctgtcctcgttcggttacctgcgccagttgccggccgatatcctgaagatcgacggggcattcgtgcgcgacatggatactgatccggtcagccatgccacggtgcgcgcgatcagtgagctggggcgcgagctgcagatggaggtggtggccgaatgggtggagaccgccgaagtggccgccgcactgacccggctcggggtgcagggcctgcagggctatgcgatcgaacggccgcagccgctggagcggatgaccctggccgacctgcggccggtgcgcctggtggcggtgaaggggccgcccgccgctggctga

SEQ ID NO: 501066 - DNA, 1230 bp, Stenotrophomonas maltophilia
atgatccgatgcctgcgcccactgctgctggcacttggtttggccacaacggccgcagccgcggcgacggcacccgtgcaaggcgaacagctcgagcaggtcgtcctgctcagccgccacaacctgcgcgcgccggtggtcgcgtcgggcgccctggcccatgccacgccagagcactggacacgctgggacgtaagccccggcgagctgaccaccaagggcggcgtgctggaggtctacatgggccgctacatcggccagtggctgcgccaggcgcagctgctgccggggtcgggttgcccgcagcgggctgacttccacgcccatgccaacagcctgcagcgcacccaggccaccgcgcagttcttcgttgccggcgcattcccgggttgtcatgtggaggtcgagcagcgcatggcgctgggcacgatggatccgttgttcaatccggtgatccaccgtgacgacgcggccttccgcaagcgcgcgctggcggcaatgcagcaggcgctggccgcagcagatctggcaccggcactgtccgtggtggaggcgatcaccctctacccgcagtcggcggcctgtgcagggcgcagcgactgccatctgacgctggccgacacgaccttcagtgcggagccgggcaaggagccacgcgcttcgggttcactggcactggccagcggtctggtcgatgccctgctgatggagcattaccagggaagtggcgttccgcgcgaaggttggggccgcttgaacgcggaacgccaatggcaggcgttggcgcagatccgtaacggttaccaggacatcctgtttggcacccctgacgtggcacgggacgtggccgcgccgctgctggcggagctcgatgccttgttcgacgatccggcgtcgcccagggtgagcctgctggtcggccacgattcgaacatcggttcggtgctggcggcaatgggaatcggcgactaccggctgccagggcagtacgagaagacgcccattggtggcctgctgcagttcgagcgttggcgtgaccgccggagcggtggcgagcggttccgcttggcctacgtctatccgacctccgcgcagctacgcgatgccgtgccgctgaccgaggcgcagccgccggggcgcgtcgtgctgtccttgccaggctgcaatcggcagggctgcagccctgcgcagttcaagcacctgctgcagcggggccgtcgctggaactga

SEQ ID NO: 501067 - DNA, 699 bp, Stenotrophomonas maltophilia
atgcgcgcgctgctgctcctgctggccctgctgctggccctgcccgccgcagcgctggaactgctgccaaccaccctgcagctgccagccgaaggcggccgtgccgaactgtggctgcacaatcccggccccggccgctggcaaggccgggtgcaggtgctgacctgggatcagcagctggacgccgaacgactgcacccgagcgaccagatccgggtcagccctgcgcagctggacctggcacctggcggcacccagcgcgtctggctgctgcccggcgaccccgtgccggcaaccgccgaacaggcctatcggatcgtcctggcgcccgcgctggcaggcctgccgcgctattccctgccgctgttccgcggcccggcgacgccgccccggcaggccctggtacagggccgccttgaggcgtacgcgtcgcaaaccactctgcgactcggcaattccggtaatctgcacgctcgcctgcatgatctgcgcttcgtcaccgcggacggccgatcatcgctgttgctgcccgggctggccggctacatcctggccgggcatgaccgccgatggcccctgcccgcccgcgccgatggctacgcaggtggccgcttccaggcccgcctgcaggacggccgcgacattgatctggtcacgcccgcccctgcgattgcagcacgtgcccgcgacgggctataa

SEQ ID NO: 501068 - DNA, 216 bp, Stenotrophomonas maltophilia
atgctggtcgccagcacgccggcatgggccgaacccagcagccccctgcagatccggctgaccgtggtcgacgcctgcagtgatgacgccggtggcaccggctgcccggcgccgcaccagcgcagcgacgcaccgcagctgccgccccaggtccgcgacctcgcgccgcctgcggcagacgacgatgaaaggccggccgtgacgctcatttactga

SEQ ID NO: 501069 - DNA, 330 bp, Stenotrophomonas maltophilia
atgatgctgctggcgctggccctgtcgttctctgcgttcaccgccctgtcgctggcgatggaaagacaccagcacgacctgcacggcaaggccgcggccacgctggcacggcgcacgcaatggcggctgctgggctggacgctgctgacggcggcgttcgcggtgtgcgtggccgaccacggctgggcgatggggccggtgctgtggctgggcacgatgacactgagcggcgtggcgctgtcgttcgggctgtacccgtaccggccgaactggatcgcgccgctggcgatcgtgctgccggtggccgggctgctggtggcggtgctgtaa

SEQ ID NO: 501070 - DNA, 1353 bp, Stenotrophomonas maltophilia
atgaagcatcccgcgagcgacctgcacgacctggctacccagcgcccggaatcactggaggcgtactggatgccgttcaccgccaaccgccagtacaaggccgccccgcgtgtgctggtacgtgccgagggcatgcactacgaggatgtcgacggccgccagatcctcgacggcaccgccggcctgtggtgctgcaatgccggccatgcccgcccgcgcatcgtcgaggccatcgtcgagcaggcgcgcacgctggactactcacccgccttccagatgggctcgccgccggcgttcgcactggcgcagcggttggccgcgctggcaccggggccgctcaaccatgtgttcttcaccagctccggctccgaggcggtggataccgcgatgaagatcgtgctggcttaccaccgccagcgtggcgaaggccagcgcacccgtttcatcagccgcgagaaggcctaccacggcgtcggcttcggcggcatggcgctgggcgggctgcccaacaaccgcaagtcgttcgccctgcaactgggcggtgtggactacctgcggcacaccctggatctgcagcgcaatgccttcagcaagggcctgccacgccagggcgcggagctggccgacgacctggaacgactgatcgcactgcatgacgcctccaccatcgccgcagtgttcgtcgaacccattgccggttcggccggggtgatcctgcccgcgcccggctacctgcaacgcctgcgcgagctgtgcgaccagcaccgcatcctgctggtgttcgacgaggtcatcaccggtttcggccgtgtcggcatgcccttcgccgcgcagcgtttcggggtcaccccggacctgctgacgttcgccaaggcggtcagcaatggcgcggtgccactgggcggcgtactggtggccgatgcggtgcatgccgggctgatgcaggcgccgccgcaagccatcgagctgttccacggctacacctggtccgggcacccgctggcctgcgccgcggcgctggcgacactggacgtctacgccgaggaacgcctgttcgagcgcgccatcgagctgggcgagtactggcagcaacggctgcatgcgctgcagggcctgcccaacgtgatcgacatccgcaacttcggcctggtcggcgcggtcgagctggcgccgcgccgcgatgcgcccggcagccggggctacgaggtctaccggcgttgcttccacgacggccggctgctggtgcgctgcaccggcgacatcatcgcgctgtcgccgccgctgatcgtggacaaggcgcagatcgaccagatcaccggcaccctgggcgagatgatccgggccaccgcctga

SEQ ID NO: 501071 - DNA, 342 bp, Stenotrophomonas maltophilia
atggctcagaccggtctgggggaggctctgccggtagccacgaatctgagttcgaaccccaactggcttgtttatggatttgaacgtgatgggatcagttactaccaggtgaacgatctctcgggacaggtcgtcctgatcgtgggaaatgtcgatgcgacgttctggacgcttccagcgggcaatagcgctgcaaaggtatctctgccttcgcatcgactgcgtctgcccgaaaagagcgtccgacgcgtggtgttccagaacgccgagttctcgttggtagtctatggggaaggcgcgagcgctgtatgggtcgtcgaatccgtggatgctgcaggctga

SEQ ID NO: 501072 - DNA, 1581 bp, Stenotrophomonas maltophilia
ttgaattggtggaaaaggggaattgagctgacgttccgcgtacggcccttggggctcgcgattgccgcgatgtacgcgatcacgtgttgggccgcctggcgggtctctttggaccagttttacctgcctgccggcattcgtgtagcggctttgcttgtgtgtccgcctcgcctctggtcctacctgcttattggcgaatatgcgttcttcgcacaactgcgctacccgctgatagatgactatggactcgcgtgggtcatcctgggttcggcgttcctgctgccagccgtggctctggttgtacatgcgcatcgaaaattcatgaccgcaaaggcagatgcgtggctgctttcagtcgcagtttcagccgccgtgattgctactgccttaaagcttgggctgtctcacctgctttcagagaacccttcaagcgtgccgattgcgacaagggccgtgcgctttgtcctcggtgactacattgccattctgaccgtcgcaccgctcgcagttctctggagcagacgccatgcaatgtacgaatggaggctctggcgctcccctcccacaatcgctgctctcgcagtgatgctggggctcggcctggttaccgcactggcccccggcctgtcggatgcgagcaaaacgagtctgcagttgaccatggcactgcccgtgatcgtgttgacatgcattcatggctggcagggagcagccattggtgttcccctgttgaatattctcattgcggtggtcacccctacatccggcctccttggctcatacgatgatcgaacgttcacgacgcagcagctgattgccattgcaggaacggggttgctggcactcggctcccggatcacccggcactatcatcaacgggggcgtagtgacgcagacggacaccagaccgctcggctatcaaggtcggctcatatggcgagcgagatggatctgcgggagcgcgccctggatctcaggagaattgcggatggcattgaagtttccttgaacaagacagtcgacttgttgaagacacacggccatcactcgccggcgctggatcttcttctcacgtccaccgcgcattcccgccagttccgcgaattgaccagcatggtatatccgaccgaagtcgagcacgtcgggctctacctggccctgcaggtcagcggcattcgcgaaagctgggatcagacacacagggtcacatctcccatcctgaccggggatccctgcagattgagcattgcattgcagctggcggcctaccgcacgctcaccgaggccgtttcattgctgctcaaacaggaacaaggacagatccagatacatgctcgttgtggacgactgaaagggcaacaaggaattctgctcagaattgctctactggaccgtgatcgtgagctgctcgtcgacaccacaaggttggctattgaacgcctgagttcgcgtgcacaagcctatgggggaaaagtgcactgcgaaaggaaccgcgtgcgtgtgctgctgctggaaactgcgaccagcagcgcgcaaagcagcatgcaagctgcctggacaagccgagtggacatcgcctga

SEQ ID NO: 501073 - DNA, 1605 bp, Stenotrophomonas maltophilia
atgcagtggtggaaggacggcctgctggtgaggatccgggtcagccccgaggggctggcgctggcgttcgtctatgcgctcgcctgctgggcggcgcgcaagctgtccctggaccagtttttcctgcccgccggtgtgcgggtggccgccctcctactgtgcccgccccgtctctggccctatctgctgatcggcgagtacgcctacttcgcgcatctgcgcgtccccctgctgggcaagtacggcctcacctgggtgatctgcgcatcagtcttcctgatgcctaccgttatgctgatcgtgcagctgcaccggaaactgctcgcacgcaccaccgtcgtgggtgtaatttccatcgcggtctgcgcggctgcggcgatcagcctgctcaacctgggcatctcctccctgctttggccaccgttgcgggaaacgccatttctcacccacgtgttgcgctacgcgctgggcgacttcaccggcatccttatcctggcaccgctggcactgctgtggatccgtcgcgccgaggaacaatggacggcccggtccgttgcggccgtggcaggtgcactcggggccatgctggtcatcggcctgcaggcgacgccagtacctgcatcgatcaccagcccgggctcgctgcagctgctgcttatcctgccgattccagcaatcgccctgacctgcctgctggggtggcgtggagcagccattggtgttgcagccgtgaacatgatcctgggcatgagtacaccggccgatcgcccagacgcgttcgatgccgcaaccttcgccacccagcaggccatggccatcgccagcgtcgccctgttgctgctgggtgcgcgcatcacccacttccagaaccaacaccggttacgcgaggaagatggccgggcagccctgcagcttgcccgcaactcgcacttggccagcgagatggaattgcgcgaacgggcggcgcacctgcgccagctcggtgatggcatggacctgtccctgaatgagatggtgaactggctgcatgcccagggtcatcacgccgtggccgacagcctgcggcatacctcggaggtgcactcgcgcctgttcagggcccaggccagcatgatctatcccgccgccctggaacgactgggcctgtatgtggcactgcaggccggtggagtgcgcgaggcttgggacgccacacatcggatcgggcggcccaggttgatgggtgatccctgctcgctcggggtcggcctgcagcttgcggcctaccgactcgtggttgacgcggtgtcactgctcctgaaatgcgaatccggacagatttctgtcagtatccgctgcgggaacttcatccagaagcccggcgtattcatctgcatagccctcgtgggccgaaacgaatcattgggaacccggacctcggaacaagcaaatgagcatttgctgggccgaatcctggtgcatggtggccacatggacatcacgggcaacaggctcaggatcgtgttgacggaagcacagggagattcccgccagacggacgccaacgaatccatgcgtggaagtacgcgcttcatcgatccaggcgccccacgggccgcgacctga

SEQ ID NO: 501074 - DNA, 1173 bp, Stenotrophomonas maltophilia
atgaccgaacagcccgcgcgcaacgacagcgcccacgacgacgaccggcagcagaaggaacaggacacgccctctccgctgaagaatcccagggtgcgctggacgctggcgatcatcgggctgctggtcgcggtggccctggttgcctggctggtctatcacctcctggtcgggcgctacctgcaggagaccaacaacgcctacctgcaggccgacgctgttgccgtggcgccgcgcataaacggctacgtcaccgaggtgctggtcaaggacaaccaatgggtaaaggtgggcgagccgctgctgcgcatcgacccgcgcacctaccgtgccaccctggaccaggccgaagcagtgatcgccgtccgcgaagcagatatcgcggcggcaaccgccggcgtgcagggccagcagtccagcctgctgcaggcgcgcacccaactcacggccgcgaccgcctcactgcgcttcgcaagatccgagctggcccgtttcacccccctggccgccagcggcgcagacacccacgagcatgtggagagcctgcgccacgacgtagagcgggcgcaggcccagtacgacgccgccagggcgcagatccagggcgtgcagagccagatcgacgccagccaggcgcagctggaacaggcacaggccggcctcaagcaggcacaggccgatgccgcgcaggcccgggtcgcattcgaggacactgaactgcgcgcgcgcatcgatggccgcatcggcaacaagaccgtgcaggtcggccagttcgtcgccgcgggtacccgcacgatgaccgttgtcccggtcgcctcgctgtacctgagcgccaacttcaaggaaacccaggtaggcctgatgcgggccgggcagccggcggagatcaaggtcgatgccctgccgggtaccaccctgcacggtacggtcgagagcatttcgccaggcaccggatcgcagttcgcgctgctgccgccgcagaatgccaccggcaacttcaccaaggtggtgcagcgggtgccggtgcgcatccgggtcgatgccggtgccgaagcgcgcaaggtgctggtgccgggcatgtcggtggaagtgaccgtggacacccgcagcgccaaggacgcgcgcaggcgcacccgcgatgaggccgaggccacggccgcacccgtgcgatga

SEQ ID NO: 501075 - DNA, 1554 bp, Stenotrophomonas maltophilia
atgaacgccgccgccgcccctgccgccgccgccgaaggcaaggccgacgctggcgcgtggttggccgttgccgcgggcacgatcggttcgttcatggccacgctggacatctccatcgtcaacgcggccctgcccaccatccagggcgaggtcggcgccagcggcaccgaaggcacctggatttccaccgccttcctggtgtcggagatcgtgatgatcccgctcaccggctggttcgtgcgcaccctgggcctgcgcaccttcctgctgatctgcgcgacgctgttcaccgccttctcggtgatgtgcgggttggccgactcgctgccgatgatgattgccgggcgggtggggcagggattcgccggtggggccctgatccccacggcgttgaccatcgtcggcacgcgcctgccaccgaagcagcagccgctgggcaccgcgctgttcggcatgaccgtcatcctcgggccggtgatcggcccgctgctgggcggctggctgaccgagaacgtgagctggcattacgccttcttcatcaacgtgccgatctgcgccgggctggtggcgctgctgctgctgggactcccgcatgaaagatcggactggggaggcctgctgcgcgctgactggctgggcatcctcggcatgaccgccggcctgtccgcgcttaccgtggtgctggaagacgggcagcgcgagcgctggttcgaatccacgctgatcgtggtgctcaccgtggtctcggtggtggggttcgccctgctggcgctttcgcagttcaccagcaagaccccggtgatccgtctcaacatcctgttccagcgcagtttcggcgcggtgttcgtgatggtgatggcggtgggcatgatcctgttcggggtcatgtacatgatcccgcagttcctggcgatcatcgctggctacaacaccgagcaggccggctacgtgctgctgctggccggccttccaaccatcctgctgatgccgttgatgccaaagatgctggaaacggtggacgtacgcatcatggtgttcggcggcatgctgtgctttgcagcggcctgcttcgtcaacctcggtctcacgccggacagtgtcggcccgcatttcatcgtcggccagctgctgcagggctgcgggttggcgctggcaatgatggcgctgaaccaggcggccatcacgtcggtaccgcgcgagtacaccagtgatgcctcgggcctgttcaatgccgcgcgcaacctcggcggctcgatcggcctggcgatcatctcgaccttccaggaacgtcgcacgatcctgcatgtcgatgcgatcggcagcagtgtcaccgcgaattcgccgctggcccaggatgcgctgcacgcctatggccagcagctgggtgacgcgacccaggcggcggcggtgctggcgcagacggtccagatgcaggcgatggtgatggcctacaacgacctgttctggatcttcggcctgatcgtggtactgaccttcccgctggttttcctgctcaagcccctgcccaagggcgttccattggcgatgcactga

SEQ ID NO: 501076 - DNA, 1500 bp, Stenotrophomonas maltophilia
atgtggccggccgtggtaccgctgctgctggccggctgcacgctcgggccggattacgtgcggcccgaccttgccggcggcgctaccgcgcaggcggcgttgccacgtgcagcgcaggccggcgtgcagcctgcggcgccaccgagccaatggtggcgcgcgctgaacgatccgttgctggaccagctggtggacgaggccctgcgcaacagccccaacctgcgcgccgcccaggccaagctgctggcctcgcgctcactgcagcgccagcgccgtgccgaacagctgcccagcgtgggcgctgcggccggctacgccaacatcaaggcgccggattcgatcgggaaccgtgtgcgcagcatcggcgagaacgtcgccggcgttgccgaggccaacggtcgcccgcaggaagcggcgcagctgcgccagcagttcgccgataccgatctggataccgagttgtacgtggccggcttcgatgccagctgggagctggacctgttcggccgacgccgccgcgcagtggagcaggccagtgccgaggccgaggccaacgctgcggcgctggccgacgcacaggtgcagctggccgccgagctggcccaggtctacctggggtatcgcagcagccgtgagcgcatcgcgctggccgaggacaacctgcggacggcccaggagagcctgcagctgacgcgccagcgccgccagcgtggcgccgactcggacctgcaggtggaacgcgcgcaggccgagcttgagcagcagcaggcggcgctgcccacgctgcaggcccaggccgacgaggcgcgcgacctgctggcgctgatggtggggcgcgagccgggtgcgctggacgcgcggctggcggcggatcagccgctgccgcagctgccggccagggtgccggtggatgatgcgcgcgccctgatccagcgcaggcccgatgtgcgcaaggccgagcgcgaactggccgcgtcgtcggcacagatcgggcaggccctctccgcctactttccgcaggtgacgctgctgggcagcatcggcgccggcgccacctcggtatccgatctgggacgggattcggcggctaccgtcatcgctccgttcctgcgctggtcgctgttcgacttcggcgtgaacaaggcacgggtggcgcaggcccgggcgggcaaccaggcgcgcctggccgcctacgagggcacggtactggcagcgctgcaggatgccaataccgcgctggcgcggtttggcgccgcgcggcagcagctgcaggccagcggccgtgccgaggcctctgcagagcgcgcgctggccctgatgcggcagcgacgccaggccggggccacctcgcagatcgacctgctggacgtgcagcgccagcgcctgcaggcccaggatgccgccgcccaggcccgcctgcaggtgctggtgcgctacgtggcgctgcagaagagcctgggcctgggctggcaggacgcgccaccggtggccgtgcgctga

SEQ ID NO: 501077 - DNA, 405 bp, Stenotrophomonas maltophilia
atggcttcgcccgcgcccaccgccacgctgtgccagctcgcccgccaagggtggccgctgctcgtggccgcgctgctgacgctgctgctgggctggtcggcgctgcacgaagggcgcggcaacgggcctgcggcccacggctggcaggcgcacgctgacgggctgcagcaagccatgccgttgccggccccgccggtggacgaatgcccgcaccatgccgccccggcaccggagccgccgctggatggcgagggcgccgcgccctgcaccgcactggctcccccgcgtgccgtcctggtcgcgcacattccgctgtggtgctccgacgccctgcgctggcagcggcacgatcccgcactgcggttgaaccccggccacgcgccgcccgcaccgcacgccagctga

SEQ ID NO: 501078 - DNA, 372 bp, Stenotrophomonas maltophilia
atgcagtctggcctcatttctcatccgcgcgccgcaatggcggccaagcgtctgcttctgggtgtcgttggcctgtgcgtgctggcaccggtcgccgtttcagcccagatcgttcccacctggcggcaggagtacgacaagcggctgaagtacggggaccttgtcgaaccgctgaagggcgagatcttcggcgagcaggtcaatctctatgacggctcgatcagtttcaaggctacggatatttctattggtttgagtgcccgtttcaatgatcacggcggagggtctctgtcggtttctgctgggggtggctttggtggacaggcaatagtcaagcctcccgcaatggggggatgggagaaagagctatga

SEQ ID NO: 501079 - DNA, 330 bp, Stenotrophomonas maltophilia
atgagctggttgttcttgctttcaattctgggaatcatcatcttctatccagcatatttctaccttcttcacgagtttaaggtgaggctggagcgtgatcatccggagttgagcaggcgcaaacgtccgggagtttcttgggcatttgaaggcgcccatcaacggctccgcgcagtgaaaagagggcgccttgatggagtgatcttgagtaagagtgtttgtgactcgcatcggctggcgagcctatttctgtacttggggatgacttccttcatggtgcttctcatgctggggctttacgactcggtatggggtggcggcaagcgttga

SEQ ID NO: 501080 - DNA, 555 bp, Stenotrophomonas maltophilia
atgcgcagggccctgttccagatcatcccattactgatcgccccttgggtgctgccgggctgctcgcgcccggccgccgagctaaccggcgaacgcgcccacgcgtccgaggacgttgcggccactgcggccaccgacccggcgcttggcccgcaggcgccggcgctgcaggcaagcgaaatcccgctgctggctgccgtcgacgacggcgcagagccgccttcgacgatgctcaaccgctacgtcgccgcactgctcaaccgcgaccgcgccgccagtgacgccgcctggacgattccgcccggcgatccacggcgcgccgacgacgccgcgctgcggcagctgcaggacctgcgcaccctgcgcctgcacagcgatcccccgatcgcgcgcgatgatcggcagccaccgcagctgctcgaggtgccggtgcaggtccgcgcggtcaccgccaacggcaccttccgcttcagcggctggtaccgcgtgcagcccagccgcgatggcagtgcctggcagatccactcggcacaactgcgcccaacgctggactga

SEQ ID NO: 501081 - DNA, 534 bp, Stenotrophomonas maltophilia
atgtgtaccttcatcaccctgttcctgcccgcattgttctcgcacgctgaagccgccgcgatcatggagcgcagcggacggcgcctgtttgcgcaggattcgcccagcctgctggcggccaccggtcccggctggcagccctggctgagcgcgggccactgcgattgcggtacggcgctggcctcgtcgcatggcgagcgggagtggaagggcgatgccgaacgctggcggaagaagggctggagcgcggcgaagatcgcccgtgcgctggccgagcagcgggcacgacaggaacgggatcagcaggaacgtcgcgatgacgccctggccgacgccggccactggctgcagcgtatcgacgcgctgttgcaggctggggccgcgcgcatcggcctgctggtacgcgactacgacggttccgtgggagcccggcagccgaagccgccggaacgccactggccgcgcgcgcacctggcggcgtcggatctgctggcattcgagccgggcgcgttgcactggatcgaacgcgggtag

SEQ ID NO: 501082 - DNA, 2163 bp, Stenotrophomonas maltophilia
atgccacagggagacgcggtaccgtcggtgccgggggacgaaggggcgcacgaacaccaggacctggcactgcgggggctggtgctgcttgctcaattccatggcatcgccgctgacgcgggtcagctggcgcatgatgctggagtgggcagtgcggcaatggacgagacgacgctggtcctcgccgcgcgcaagcttggcctgaaggccagagtgagttcgacagcgctggctcgcttggcgatgaccagccttccggcgctggcactgggtgacaacggcgacgccttcatcattgcccgcatcaccggcgaccaggtactgatccacgacctcacccagcggcgtccccgcatcatcgacatgcccgcgctgcagcaacgctatcgtgggcgacttcttcaggtgtcttcgcgggcatccgtgcttggcgagctggcgcgctttgatttcagctggttcattcctgcggtaatcaagtatcggaagatgctgctggaggtctttgtcgtctccttcttcatccagctgtttgccctggtaacgcccctgttctaccaggtggtgatggacaaagtgctggtgcatcaaggcctgaccacgctggacgtgatcgcgatcggcctggtgtcgatcgccgtattcgaagtcgtcctgagcggactgcgtacctatgtattcgcccatactaccagcaagatcgatgttgagctcggtgcgcgcctgttccgccatgtcctggcattgccactggcctacttcgagtcccgccgcgtgggcgacaccatcgcccgcgtgcgcgagttggagaacatacggaattttctgaccgggcaggccctgacgtcggtgctagacctgttcttcaccgcggtcttcctcaccgtgatgttctactacagtggctggctgacgctgatcgtggtgatctcgctgccggtctacgcgctcatttcggccggcatcaccccggtactgcgcaagcggctggatgagaagttcgcgcgcggtgccgacaaccagtccttcctcgtcgagacgatcagcggcatcggaacggtcaaggccagcgcggtcgatccgcgggtgacgcgtacctgggacaaccagctggccggttatgtgaatgccggcttcggggtcaccaaagtagccaccgtcggccaacagagcgtgcagctggtgcagaatctggtcagcgtcgccatactgttctggggcgcgaaactggtgatcgacggggggctgtcgctgggccagctgatcgcgttcaacatgctgtccggccaagtggctgcaccgatcatcaggctggcgcagctgtggcaggagttccagcaggtcggcatctcggtccagcgcctgggcgacattctcaacacgcgtaccgaactgccgggcagccgcatggcactgccgccgatccgcggtgacatcacgtttgaacaggtcggattccgctatcgaacggatacgcccgagatcctggccggcatcgacctgcacatcccggccgggcaggtcatcggcatcgtcgggcgttccggctcaggcaagagcacattgaccaagctggtccagcgcctgtacacgcctgagcgcggccgtgtgctggtggatgggcatgacctggccctggtcgaccctgcctggctgcggcggcagctgggcgtggtgctgcaggagaatttcctgttcaaccgcagcgtgcgcgacaacatcgcgctgagcgatcccggcgtgccgctggatcgggtgatccaggcggcaaccctggccggcgcgcacgagttcatctcggccctgcccgaaggctatgacacccgggtgggtgagcacggcgccggcctgtcgggcggacagcggcagcgggtggcgatcgcgcgtgcgctcatcaccgatccgcgcatcctgatcctggacgaagcgaccagcgcgctcgactacgagtccgaacatgcggtgatggccaacatgcgcgagatctgcaaggcgcgaaccgtcatcatcatcgctcatcgcctgtctaccgtgcgcagggccaaccgcatcgtcgtggtcgatcgcggccgtatcgtggagagtggaacccacgatgagcttctggcccagtccgatggccactatgcccagctgcaccgcctgcagcagggggccgcatga

SEQ ID NO: 501083 - DNA, 1422 bp, Stenotrophomonas maltophilia
atgaagcacatccgcgaaggtctgggtgatttcgctgcacgctatatctccgtgttcaaggcggcctggcgcaatcgccacgcactggactcgctgcagcgcgatgccgacgagcgtgcttttctgcctgcgcacctggagctggtcgaaacgccgacctcgccggctgcgcgctggaccctgcgcatcatcatggcgatgttctgcgcggcgttgctctgggccaccctcggcaagctcgatatcgtcgcggtagcgcccggcaggaccgtcatcgactcgcgtaccaaggtggtgcagccggtggaaaccggcgtagtgcggcgcatcctggtgcgcgacgggcaggtggtgaaggcagggcaggtgctgatcgagcttgacccgaccgcaacggcggccgatgtggtcaaatccggcgacgccttgctgaatgcacggatgaccgcgatgcgcctgcgggcactggacatcgccgtgcaggcgggtgaagtgccagtgatccgtgcggagccggacctgccggccgaccgcgtcttggccgagcagatgctggcgcgtagccagtacgaggcactgcaggccaggcggcataatctgcatgctgtgatctcacagcgtcgcgccgaatgggaaaccacccaggccgcagtcaagccattggcggagtcggcacggatctccacgttgcgggcggacgattatcgccgcctgctggaaggcaactacgtcggccgccatgactatctgcttcgcgagcaggagcgcatcgcgggggagcgtgacctgatggcgcaacgcaaccgcctgcgggagatccgttccgcccagcaagctgccgaggaagaactgcgcgtactgatggcggatttccaccaacagaccctggacggcctgcgcgccgcgcaggagcaggtcggccagatgacacccgaagtcgcgcgcacggtccagcgtgaccagcagaagatcctgcgcgccccggtcgatggcaccgtgcaacagttggccgtgcataccgtaggcggcgttgtcactccggcgcagcccctgttggccgtggtgcccagcgaggaagcgctggaagtggaggccagcatcctcaacaaggatgtcggttttgtccgcaatggccagccagtgactgtgaaagtcgagagcttcccgtacacccgctatggatacctgacgggcagggtggtgagcgtgtcgcatgacgccttgcaggacgaaaagctgggcctggtgtttccggtgcggatacgcctggacagcgcaacgctggagattgatggcatccgcgtgcggatgaccgctggcatgaatctgaatgccgagatcaagaccggcaggcgacgggtgatcgactacctgctgagcccgttgcgccagcatgcgggcgaagcgatgcgtgagcgctag

SEQ ID NO: 501084 - DNA, 3078 bp, Stenotrophomonas maltophilia
atgagcgaaccgaactacatcgtcggaaccaatggttacgacaatatcaacggaacggatggcgatgacatcatcgacggacgtgacggaaccgactatctgcacgggaatggcggaaacgacattctgatcggtggctacgcggccgacacactctggggcggcgatggcaatgacctgctgatcggagggcccggtgatgacgtcctttatggcggcgccggagatgacgtctatcgctttgacaatggatttggccacgacgtaatcgagacggaatggaatctggagctgcccggcttcgatactgtcgagttcaccggcttgcttgtctcatccgtcttcacgttcgcgttcaggaacggaagtctggtgatgaatgccttggggaatcaactggaaataaggagcttcctgggcggtactgactatccggttcagcagttccggttcgctgatggtgtggtgatgtcggcgagccaggtgcacgaatgggcgatgttgccgacggcagccgatcaggagcttcaaggcactgaaggtgacgatgtgatacatggcggcggcggcaatgattggttggtcggagatggaggcaatgacatcctctggggggatgatggcaaagattcgctccagggacgcgacggcaatgacgtccttcatggcggctctggcgacgaccatctctatggggacagcggagacgatgttctcatcggtggtagtggcgccgactatctttccggtggcgagggcagcgatacatatcgcttcgaaatcggcttcggtgccgacgagatcgatgagcctgcatcgggcaacgcggccgatcttgatttcatcgagttcggcaatggaatcctggccgccagcgttctgctgttccgcgaagctgacgaccttctgctgaagctggcgggcaatacaacggacagcatccgcgtccggaatttctacgtcgcatccgagccgggcgtggaaggcatcgacggtgtgaagtttgccgatggcaccttctggagcgcggtcgagcttcgccagcgtgtgctgacacccaatgatacggcccagctgatgatcggcagcgatctcgccgatgtgctggatggtggcggtgggaatgacacgttggagggaggcggtggcgatgacgaactcattggcgggtccggccacgatgtcctgcgcggcgggacaggcaacgacctcctgaaggggggcagcggcaacgacgaacttgacggtggtgacggtgatgaccggctgatgggtggtacaggcaatgatcgcctgtcaggcggggcgggcaccaatacctatgtctttgcgcgtggagacggggcagacaccatcagcgctgccggctcggaggggttggatgtgctcgagctgggcgtgggactggggcgcgccgaacttgccttcgtgcggcaggacgacgggctgcgaatcgatgtgatcggcagcgcggacagcatcttcgtcgagaatgcgttcaatggcggggccctgtcgcgtttgcgcttcgctgatggcagcgtgctggaagccgcgcagatgcgcgagctggccctgctcgagcatcgcggcggtggccttgcggacacgctggctggaggccttgcgaatgactatctgcttggcctggatggcaatgacatcttgaacggcggcgccggcgatgacctcctggaaggcggccgtggcaacgatacccttgacggtgggaccggcaacgacacctacgtgttcgcgcccggatgggggcaggatgtcatcctcaacctggacgtgcatgccgatggactggatacggatcgtatcgtgttcgttggcggtatacgcgcggaagacgtggaggtatccagttccgggcatgacctggtgctccggcacaagggcacggcggaccgggtgacggtgagtgggttcttcgtcgatgcggtgggacaggatcgccagatcgatgaagtgcagttcagtgatggcagcatctggacactggccgatctctaccaggctcagcagattgggacatctgcagcccagacgatgcatggcggagcgctcgccgacctgctcgatgccggcggcgggaacgactggctgtacgggcacgatggcgacgatacgctggtcggcggagccggtcatgatgtgctgatcggtggccgcggcagcgatacctaccgcttcgacctcggctggggcaccgacatcatcgataacagtgcggcaggcgatatcgcgtcggatatcgatcgggttgtcttcggcaccagtgtggcggtccaggatatccgcgtgtcgagccgcctggatgatctggtgctccagcatgccaacggcgactcggtaacattgcagaacttcttcggcgcaggcaatcaggtccaggaggtggtgtttgccgatgggacgcgctggatgcagtctgatctgctgcagatgcagctgcccggcgacgccagcgatcagtatctgtacggcaccgcactcaatgatctgatccagggactggacggcaacgaccagttgtacggcaatgccggtgcagacaccctggagggcggtgccggagatgacgtgctggatggcggtaccggcaacgacatcctggatggcggcgaaggcaacgacatctttgtattcgcgcgtggcagcgggcatgaccgcatcatcagccaggatccggacggtgccttctgggatgtcctgcagatggggacaggcattgccgcaagcgacgtcacgctcagcaggagtggcagggatgtggtgctcaccctcgacggtggcaacgacagcgtaaccctggttgacttcctgcctgccgtggaaggtgattggcccaccgcactggatgaaatctggtttgccgacggcaccgtatgggatgctcctggcatcgtttcggcattgccggtgcaggcttctgcccagagcgccgaggtcggccagctggtcgctgcgatggcaacgtcggctgccgacagcagccgtttcctccagccacatgcggaccgctcggaggcgggtacgcagctgttcgccgtgcacacgctgttgcgatga

SEQ ID NO: 501085 - DNA, 804 bp, Stenotrophomonas maltophilia
atgagctcgccgcccgtgtcggcgattccggagtcggtggtattcccgttgggaggactgcacctcggtgacctgctgatggcgctgccggcgattgccgcagcgcggcgtttcgccacgccggttgtatcggggctgcagccgcggcactttgccgcggtgtcggcgctacccctgctattccggcagaacggtccgccggcggcacggacgctgttgccggtgtggcggaccggccagcaccgaaccgatggctggctggccacgctcggtgccggcgtggagcctgagcggatggcgatcccggtgcgtggcctggcgcaggcacacggcgccttgccgggaccgggctgggcattgctcagcccttgggcggaccatccgcccaagcgctggcacgcgcagggctggcggcaggtggctgggcatctgcgcgggcgtggataccgcatcgccctgattggccccaggccctcggcggcgctcgtctcacagatttgcgcagccgaagatcgcgtgctggtcggcatggattcgccgacaacctggccggcattgctgacccgtgccgacatcgtggtcagtccggatacgggctgcgtgcatatggccgatgccctgggcgtgccggtggtggggttgtatggcccgacctctgctgccgagtatggtccgtactggcaacgcgatttctgtgcgagtgcaccggacatggcgtcgctgcgggcagatacggtctgcgagaggattgatggcctgctgtccgggcttgggcggcagaggcagaatcgcgccgcgccctaa

SEQ ID NO: 501086 - DNA, 14067 bp, Stenotrophomonas maltophilia
atggccgcagtgatttcagggaatggtctgggtctgttcaacagttctttgcaggccggcctggggctgggcagcgacgcacgcctcggcgcgcagggcagcactcgccagtatgtgaacatcgccaacggcaatctcgtgctgcagggccaggatgaacagctcctgttccgcggcatgtcgatcgggcagctgcgtacctacaacagccagggactgcccagccaggtgggcgcggacggatggctgaccggcttcgagcgccgggtcgagctccttgccggaacggtgaacagcgcaggcagcatcatgcgcctgcacacaggggacggcgccttccaggactttgcctacgccgggaatggcagctaccagtccacctccggcgatggcgcgcatgattcgctgacatacgcctccgcaacacgttcgtggacgtatgtggaaggcagtacgcggcgcgaggaaacctacgcggaccacgccaacgcgaccttgaaggggcggttgacacgcctgcgcgatctgcgcggtgacgcagccaatccgaccacctgggacgttctctacgatggcgcagggcgcataacgcagatccgcagcaaggacatcgcggctggcgcaacgccggacggaatggtgttcagctatgacgccgcgggacggctctcgggcatatcgacccgcgagaacggcgtgctgctcggccaggtcggctacgggtatgacagcgttggccgcctcacgtccgtactggtggacctgacgccgcgcgacggggtgaacgaccgcgacagctgggatgcgggaagcgctgccgcgaatgatggctacctgttccgtaccacctacagctatgtcgatgcgaccagcctgcagatcagccaggtgcgccggagtgatggcttgctggtcagctatacctacgatactgccggccggattcgctcggtaaccagtggcgatgccaacgccgacgacagcgacggcgtggggcagaccctgttctacagctatgacaccaacaaccgccgcaccgacatcagcgatgccggcggccggacctggacctacggctacgacgcggccggccagctgatcgaagtgcaggggccggccagcgacggcctgcgcgacgtcagccagtacgcctacgacgccgatggtaacctggtgcagagcgtgacccgtcgtgcgggacaggtactggcccaggccgacttcgagtacgacgcgcagggcaacctcacctggcagtggaaccgggtcgagggcggtgcatccgccgcctcggcgatccaccgaacctacacggcaggcaatcagctggcatcggaaaccgtgtttgccgggctggatgcggatggcgcaggcagtgccgcggctcccagcggcggtgccaccatccactatctgtatgatgcgcagaatcgcctgcgcttcaccatcaaccccgctggcgaggtaagcgagtcccgctatgccggtgcaggcaatgggatcgggcagctggcgtccacgcgtcgctacctcggcgctaccttcagcggtacgttcaccaccacggatctggagacctgggcggccgggcagctcgcgcagagtggtctcaccgaatacgcctatgacctccggggtcgcttgagccagacccgcgcgtatgcacaggtggatggcgccggcaatggcgtgcaggacgatggcctcgagatcatcgactacgtgcacgacgcgcagggcctgctgcgtgagaaggcggtgacccgctatgccggtggcaggaatggcggcgttgccagccagcgtgaggtggcaagctacacctacgatggcatgggccggctgttaagcgagatcgtccagcagcacgcactggacggggcatcggatgtactgatcctgcgcaccagtacctggatctaccaggactccggaagcaccgtgcgcacggtgctgcaaggcggcggcgatgccggcgatctgctgcgcaccgaagtgcgtgatgcggccggacgcctgctgttggtgaccgattcggcagtggccgggaacggcggcgtgcgcagcacgcagaacatctacgatgcactgggtcagctgcgtgcagtccaggacgccaacggcggacggacctatttcttctacgatgccgaaggactgctggtaggccaggtcgacgcgaccggtgcggtcgtggagtacgtgcgcgacccgctggggcgcgccatcagtaccatcgcctacgccacccgcgtggataccggcaactggttggccggcggtgccgtggtcccgggtgaactggccaatgtacggccgcccacaggcagtgatgatcgccgcacgtatgtcacgtacgacgcgctcgggcacaagctcagcgagaccgatgccgaaggcggcatcgtcacttacctgtacgacggcgctggacgcctgctgcggaccacagcaaccgatgccgctggcactgccgaaacggcgcgggtgcagcgctatttctacgacgcgacgggccgtgaacgcgccaggctcgacgccaatggctacctgaccgagttccagcgtgacgcgggtggccgcctggttcgaacctccgcctatgccacgatggttccggtggcactgcgtggcgctggcgatctggacgcgatgcgaccgggaccggctgcggctgatgcggtcacccggtacttccacgatgggcgcggcaatctggttggccagctcgatgcggagggctacctaaccgagtatgtctacgacgaagcgcgcaaccagcgcgcggtgaaggtctacgccctgcgccttgatgcggccgacccggccctggggttcaatggcttgcgcacgttggcgcaggccggcgccgcgcggaccacccagcgcagctacgacgcggctgggcgactggtggtggaggtcaccccggaaggcagggtgacccgtttcagctacgacgcacagggccggttgctgggtaccacctcggccgccgggaccgatgagcagcggcagagcctgcgccgctacgatgcgttcggcaacctgatcggtgaactgaacgcggaaggttcggcgctgtacacctcgtcgatgagcgcctccgagctggacgcgctgtacgcgcagtatggagtacggcacagctatgacctgctgggccggcggatccagagcaccgatgcggcgggatatcagacctggtacttccatgatgctgctggtcgggtcacccacaccgtgtacggcacgcaggatgccagcgggcggctcaatgcggaaggtgaagtcgaggaaacccggtacgacgccttcggccaggcccgggagacaatccgctataccgggcgcctccagatcgacgtgccattcggttgggagcaggcctcggcagcggtaagggtgctgcagtacgttgccgccatcgacagcaggcaacagtatcgctatgaccgccgggggcttcttgcagaactgacccgtgcggagggatacaggacgctgtacacgcacaacgcctttggtgacctggtcgagcaacgggaccagattgacggcagccagtggcgggtcacgcgcagcagctacgacaggctaggccagcgcaccgaattgctggaagacgccgatgggctacagcgtgcaacctcaagcgcgttcgatgccttcggtcgcatcatccgaagcagcgacggccgtggcaacaccaccggctacgagtatgaccggctggggcggcaggtcgccgtcacccggatggtcggcggtcagctggagagcatgcagacgacctacgacgcctacggtcgtacactcagccagaccgatgccatcggacgtaccacgcagttcctgcacgatgacgccgacaggacgctgacgatgatcacgccggagggcgtgcaggtgatcacgcggtacaacctgcacgggcagaccgtagagatcctgcgtggcgatggctcatcacaggtcttcgcctatgacgccgacgggcgccttgtcgaggagtccattggcgcaggctacgcggtctcacagaccacttaccgctatgacatccgtggcaagctagccgggcagtcggacggtacaggacgcgaagtaaccttccagtacgacgcaaggggccggatcctggagcgtcgccaggaactgcagtacgccctgcaggatgcggtggtcacccgctacacctacgacggacagggacggcagctcagcatcactgacgccagtggacgccgtacggtcatggaatacgaccgcgaggggcgcctgcttgcgtccatcgtggatcccgatggactgtcgttgcgcacgaccttcagctgggatgcgctgggtcgacggctttcggtaacggagggcgcaggcaccgctgatgcgcggagcaccacatacagctacgacggattggggcgtcgtacggcccaggtcgtggcggcgggtgcgctcaatctgctgacccgcttcagctacgacgccaacgacaacctggtggccagccaggaccccgaaaaccgcatcacccgctacgtgtacgacgactccaatcgccttcgcttcaccgtcaacccgcaaggcggcgtgaccgagcagcgttacgatccggctggccagcgtgtatccgtgcggcagtatgccggccagatcaacctggcagggttgccggagcaggccaccctcgtcgaggtgcagcagcgcctgcaagccgacgacggcaaggacctgcagacctatctgctgtatgaccgcgatggacggcagacgctcagcattgatgccgcaggtgcggtgacccagcaattgtttgatcgggctggcaatgtcgtgcagacgcgtcggtatgcgaccgcctatccgctggatgcgggccggcgcggtcttctggccgcggggcagggccagcaggacgtcgtgctcgcagagcttgtggtcagcgatgccgaccgtgtcgactcctatgtacatgacgccgcaggacgcgtgcgcttccatctgaacagtgaccgcgccgtggtcgagacgaactacgaccttgccggcagggtggtcaatcggtacgaatacgccgacttcctcccgacgatcacgcatgcggccattgctgccgggacggtgagcgcggacgacatcacgtcagacctgagcgagacatactgggagctcatgcgtggcgtgagctttatctacgatggtgctggcaggctttcgttcacgcttacccgagtgcatgacgcaacacggtgggggtacggggatgaggtgaactccatcctggtccagcgcaatatctacgatggctctggcaacatcgtatccgacgttacctacacatatgcattggatccgacccgggagacgggtgcctacgacagcgaggctgctgtcattgccgcgctgtttggtgagtacggcgaaccgcagggcctgcagacggctccggagcggaccaaccagcacgtctacgatcaggcagggcgtgagcgcttctccgttggaccggacggggcggtgaccgagtatcgctatgacgctatgggtcagcgcatcgaaacgcggcactatggcgaggcggtcgagccccgtcgttggggcgaggcggaactggccgcggcggtagccggaatcggctccgtgcggatcagccgccaggaatacgatgccgctggccgcgttatctccaggaccgatccgttgacggcggtggagcgctaccagtatgacggtgcggggcagctgcttgcctataccgacaagaaccaggcggtctggacctatcagtacgatgctgccggtcgcaggacactggagaccagcccggtggtcatcgtctcgatcgccgccgccgacggcaccctgtccacggtggcccgctcgatctcgacgctgaccgagtacgatgcgttgggcaacgtgacccgccgtatcgaggacgcgggcacgccgacggcgcgggcgaccgagtacgagtacgacagccgcggactgcagatccgcacgcgcttcccagacgcggggcgcatgaacgtcgatgggcaactggttgccaccggcgagcgcccaacggtcgaagtgacctacaacgcgcttggtcaggccgtgatgcagaaggacgtgctgggctactacagctacaacacctacgacgcggccggcaggcttcagttcgaggtcgatgcggagggctacgtcagcgcgtacggatacgatgcatttggcaagcagacccggtttcagcgctacgccaatcccatcgcgctgccttcgggccaagtggcaaagggctccgacgttgctgcactgttagtgcctgccacattccaggaccgtatccagcgcaaagagtacgacgtagccggcaggctgctgagaacctacgaaacccgattcgtgaagaacgagtgggatgctgaaccgcatgaagagctgggtggcgggaccaaggcggagtacgacctgcttggcaacatgatcagcgagggccggatggtcagcgcgaacgagtgggttcccgccggctcggagtacgtcaagtggagtgaggtcaactatcggtacgacatcgccgggcgtcgaatcgccagtgttgatgatctgggcttcttcactgcctggacttacaacgccaatggtgaagtgatgcaggaatggcaggtggcgcgcccggtgtgggagccggtgcaaccgacgttgatgagatcaatctggaatgacgggattcctttcccagaagtgtcgcttgatggtggcacggcagagctgggcttcgatcgtgtcaccgagtggcagtacgatgccctgggacggaagatctccgagcgcgtcagtcgcggcaatccctacgatgggaacttcgtcgagtcactgacggcctatgatgcatctggacgcgtgatccagaccaccgtcgatggccaggccagcaagaccttctacgatgctctcggcagggtcacggcgattcgcgagagcgagcgcgatgtggtcaatggcaacgcggacatccagctggcctcgaccggggttggcctgggttcggggtcactgtatcggcgtgcatcgccctacagcagcatggcctacgacgctttcgggaacgtcgtgcaggtgcggcgctatgccgaaggggccgagccgggccaggcgccgtcggcgtcttcgcaggaccaggtacagagcactgtctacgactggcagggccgtggcgtactcgagcgcgatgcgctgggttccgtcactgcccgcacctacgatgctgccgaccggttgcttgccacgcggtcgcgtcttgacggcaacgcagggcgatggtccctggtggtcaaccaggccacctacgacaaggtggggcgccaactgaccagcgtggtgtcccgcgagctgtaccagaccggcagctccgcggccttgcgtaccgaggtagatagcacctcccaggtccgctacaacgcattcggggagatcatcgccaaggacagccggctcgatgcgtcgctggtcaccgacagcttcgcggtgcgctacgtctacgaccagaacgggcgggtgagttccaccaatgccgaaggtggtgtctggcgcaacttcgcctatgacctgtccgggcatgtgattgccgaatggcattcggttcgtgactccgccggcaacttgatcaatgtcgaaacccggatggagctggacacccggggcaacgttctggagcagcacctgccaaccagtaacgacgatccgtttgatcaggcaaggatcatccggacctatgaccgctggggcaatgtcctgtcgatgacagacccgcgaggcggcaccaccacctacgagtacaaccagcgcaatcagctggtgcgcgagatcaagcccgaagtccgggttctggatgccaatggcacggcgcggtcggttcgcccggaaacgctgtgggaatacgacgtgatggggcgcaacaccggggtgcgcgacgccaatggcaactggcagcgcaccggctacgacggagccggccggcagatctacaccgagaccgccaccggcaaccgcacgttcatcgcctacgacgcgttcggccagaagcgctacacccaggatccactgggttacgtgaccttcctggagtatgaccggggcggacgcgtggttgcgcagggtgacttccttcgcgaagccgatggggcgacccggcagcgtgccacccgcgagcgctacaccctcaaccagaatggcaaccgtatccgggtcaatgacgcgctcggctacgccagcacctacgactatgacagtcgtgggctggtcatacgcagccacactgcggccggagttggcatgtcctatgcctatgacgcgcagggcaacaagattcgcgagaccaatgcactgtccgatcccagcctcgcggcggatggccagccggtcttcaatggtggcctggtcgagagccagtatggtgtggtgggccaggccttcagccacaccctcggcgccggcgccttcagcatcgtgggtggcgaaattcccagcctgtcggtgcgggtggagtactgggatgccaccttgaacgtgtaccgggacgccccgggcttcagctatgacccgcagacccgcgtactgagcggcacgccggcacagaccgggccgtatcgcattacctacaccgctaccagcagcaacggaaaatccgccagcatcaccgccagcctgtactcggtcacccaggcggcgtatgacagctactacgcaggagcgccgaaggccaatacgggactgttcaatcgctcggtcggggtgaaccaggccttcagctaccaggttccacccggtacgttcactgccgcggcggggcagggtatctcctattcggcgcaggtctacgcgctggtcgaaaccttcgactacgaaacacgccagcacgtgcgtgagtaccagtgggtgaccctgggatcggccgaggatgattccggattcagcttcgacgctgccaccgcaaccctgtcgggaacaccggcaacgcgtgggacgtggcaggtgcagatcgtagccaccggggccaatggccgcagttccgcgcttggattgaccgtcgaggcgcggcaggcagacggccgtcgtaccgtgaccgatgccgagggcgatgtcctgtatctggacgagaacacctggaaatatgactactttggtcgattgatcgaccacaacgacctcagtggcgccgactacaactacagctacgatgccgtgaccggtcagctgctcggcgagaacagcaagtggaccgagcagggtcgccagtactcgacgccggccaccgattactggtacgaccgggactggcggcagtacggcctggattcggagctggtcggcctggacctgcctgatccggttctgctgaacgaccccgcgcgcagctacagctactacaagtccggcgcgctcaaggaactgcgcgagggtaacaactggttccgctaccagtacgatgcagccggaaaccgcacctccgaggaggcgtatacctacgatgcagacggtcagctgctgcacgtgctgaccaaggtcacctacgatgcacatggccggatcaccaaggtcatccagcaggacgtgagcgcgggtcgccgcctgctcgagctcaactacgactatgacgcggtgggcaaccgccgtcgcgtgctggcccgctctgcgtacgatgcggactcgccgggcatcgatatcaacggcatcaccaatcccgatttcgaagatggtgactttggctggaagcggggggatggctggaccatcgtgccaggcggagagaatggcagcacgcagcgcgcccagttccacatggacggcacgtcgaagctgatgaacatccagcgcgtgcaggtaactcctggcgagagaatcaccgcggcggtccgggtcgatcaaggtgcatcgagtgcgggcaaggcaggtgcggcggtcatcatcgagtggtacgacgcctccggtgcgctgatctcgacctccgagggcaacatggtcgattcggcctccggtggcgccatctacgaatcacgtgtgatcgctgacgcgccctgggaggcagtgttcatgtccatcggcgcacgtgccttccgcgacggcgacaatgacgagctgttcgtcgacaacttcagctggggggccatgccgtacaacggtggccttgacaacaactattcctggaatttcggggattactggtcgccaacaggctggtcatggagcagcgagtacggcggatcggcacagttcaaccggaccggcgaagggcgcatggtcagccacggccgcctggatgtgcgccctggcagccaggtcagcgctcgcgtcaatgtgcagcagggtgcgtccagtgcgggggaggcgtggggcgcggtgttcctgcgcttctttgatgccaatggcagcatcatcgcggatgtcgagggaaatcgcgttgacagcgggtcaggcggcgaatggcatgagtcggtgctcagcacgaaggtgccgccgggcgcggtgagcatgagcatcggtgctgtcgccgggcgcaatggaggaacggatccgctttgggtggacgacttcagctggaactacgagcgcgatggcgaactcgattcgaccgggaactatgtcgatcccgatcccagcgatccgtacaacatggccgagcctttcaaggtctactggtacgactacgacgcgcagaatcgggtcaaggtggccaatggccgcctggtcaacaaccagatcgtgctgggcaacgccgacgtcagctatgcgctggactacgacgaggccggccgtgccgtacgccgccgttacctgtccgggcttaccgaggtttccgaaaccacccagtacgatgaccgcggccagcgcctgaaggtgttccaggccgttggcctggacagcaccgcaccggtatcgctgaaggacagctacagctacgacgcgatgggccgggtgatcgaacagcgtacctacttcgatgccggcagcacccgcaatggcatcgacatcggtggttggctcaagcatgccgagaccttcagctacgatgccgacggccgcattctgcggcagagcatccaggggcgggagctgggctggaccgcgactgcccagaacgatggcggcgccgcacaggtaacccagctgggtgtactgcagaacctggcgtggatcgattattccgcctatggctatgacgccgcggggcgcctgcgtggttatacgtaccagtactccctgcatgaagagagcagtggtgcgctgccaggcgatcccaagggctatacccaccgttacacctattcctacgaggcgcgtgacagctacctggagtcgcgcatctacggacagagcagcaaccagaacttccgcgcctccaccagctacagcagctacgatgcctgggggcgtcgtgtcgcagtacgcgaacagacgccgctgagcagcgacctgggcaagctggacgaccgtatccgctatttcagctatgacggtaccggcagcatcctgcgtcgccgcgaggggtcgttggccggcggtgtgttcacccagagcgccgcgcagaagacccagaaccagctgtacgcctatgttggtggccaacttgtggcctcgggcaaacgcaacggcgaggtcgatgtggttggccggctgacggcttaccaaagcaacaacgctgccggcagttcgcggaccacggtgcaggcgggcgagaccctgcggggtatcgcgcagcgcgtctacggcaatgccaatctctggtacgtgttggcagaggccaacgccatcgccgatgacagtggcctgaccgccggcaccaccctggtggtgccggaagtgaaggtcaccgccaacgacgcgagcacgttcaagccgttcaacccgcaggaagcgatcggcaatacatcgccgtcgctgccctacatcgaaccgccgccgaaggagcattgcaacggcatcgccatggtgctgatggtcattgtggccgtcgtcgcaaccgtgttcaccgcgggtgccgccgcgttggcattcggcgcggttgcggcgggtaccggcgccttcgcagcgggtaccgcggtattgaccggaacggccatggccgcggcaaccggctttgccgcgaccgctgcggtcgccggcgcggccttcgtcggaggaatggcgggcagtattgccagccaggcggtcggcaaggcgatgggcgtggtcgacagcttcagcctgagaagtgcggtgggcagcggcctgggcgctgcggccggcgccggtatcgccggtgccatcggtggtggtgcgcaggtgagtgagctgatccaggccggaagctacggccgggttgccgcgataggcgcagcaaatgcagctgccggctatgcagcgggcaagatcgccggcgttgcagacacccacttcagctggcgcgccatcgcagcgaatgcggtgagttcggtggtgggcggaaagatcaaccagaagcttggcacctcggtctcgccgtacgtgggcaatggcatcgtcaatgacaccatcggcggcatggtgggtggtgtggtgagcctgcacgcacgccggacctttggcgtggctgatgacatcaactatggtgcgattgcggctgatgcgtttgggaatgcgcttggctcctcgatggccagtgccttcagcgtggcagccatgcggaacaaacaagcagtgcctaacgcatccggcaatgcaacatacgatccaacattgatgaaccggtggcatgaagaagacatgtcgaaccttcgtcgaggcctcgcctcggagcgcctgcctgttcgcgcgatcggttcattctacagtccggagaatacgatccttctgggtgaaactcagatggctggatctggcgacggattgagtgcagatgagaggtcgcggtgggtatcgactgaaaagtaccggaccaggaacgttgatccgtacgtactgggccggaacggaaaccagcgttggagcaccaatgaggtaatggcgttccgcgccagcagtgcgccggctgtatccgtcgagcttttgagcaccccccccgcagtgactgactgggtctggaccaacgatggaggtcggagggtcatgccggctgtcgtttcgtggaccgagatccgtacggcctccttggagagagataaggccgaatccttgcagtactggaagggcgcaatgccgatgagggccgcatctaccgcaggctacagtctgctgcagaccagcaacaagttgtttggtgtcatgaccgacgcggagtacggcaggacgatcgaaaggacgatcgggattgttgcccagaatcctggggcggtagcgagaggcctgggcaaggagctcggtgattggtggcattctcctgttagccagaaagcagaaggtgtaatggcatttggcttcgaaactgctgccaccatgggcttcagcaccctgagcaaagcatcttatggcgggcgtgcggctgcagacgtggctgagctggcaacacgaagtgcggtgcgatctggtgatgttgctggggccgaattgctgggtggcctccggaatgccgatgttgtcttgaatgacacagtgtcatctattggagaattctcgggaagtgaggcgctcgcgatccgagtgtacagaggtacggataactacaatgaaatctggatcaatgacgagactgggcacctcctcagcgatgcggctcgaagagaatacttggagaccggttcaatggatgttgcctacgagtcaacgcgtcttacccatcagaagtggatagacatttgggggtcagaggctcggtttattgaggagcattcactgagaggcacggagttccctcgagaatttgggatggatcggacattcatgtcggttacgactgacctaagtgttgctcagcattacgcgggcagcggcagggtctactctgccctggttcctgcatcccagctcctgaagcaaacattggcaacatccacagagagtgagtatcttattaggataggtagtgatctgttcaggccgctgcctcagggattgtag

SEQ ID NO: 501087 - DNA, 228 bp, Stenotrophomonas maltophilia
atggttgagctgttccaggagcgcctcgagcagattccggtatacagggaaggggtgaggcgggaactttacgagagccttcatgatcccgaattttcctggaaattggctctctggaatgaggactttcatgtcgaagagtttgagacagagggagatgcgcgcgcctttattgagaatgttgtgttgccgttggtagagcgcgtcttcgcaaaggtgcagtcttag

SEQ ID NO: 501088 - DNA, 558 bp, Stenotrophomonas maltophilia
atggaatacacgaggctggacatggaagagctactccgcctgtcgatcgatgcgatcgcgggcaactgcctggccgacgcgctggtgctgctcaagaccgcgcttgagcgcgaaccggagcacgtccacgcgacctacctgctggcggcccagcacgcccagctgggcctggtggaccgggccgaggtgggtttccgcaaggtggtcgcggccgcccctaacctggccatcgcgcgcttccagtacgcgcagttgctgatggggcagggcagggccgaagaggcgcgacagatgctggcgccggtgctggcccagttcgacgcgctgggggcgtatgcccgggccctcgatgccgcggctgaccagcgcatggacgacgccctgcgtgaactggatgagggcctggcccagccacaggcactgccggcgctggccatcgacatgcgccgtctgcgtgaccagctggcgggttcggcgcctgcgtcgttgaccgaggtggcaacgcgcatcgacacgcctgcaccgatcttcctgaccgggtatggtcgcaccaactag

SEQ ID NO: 501089 - DNA, 366 bp, Stenotrophomonas maltophilia
atgccgattgatcggacctccctaccaacgccgttgatcgccgtgatgcgcgccgagctcagccggcgcggcgagcgggcgcgtgcggggaacgccggtgcccctgcttcggctccgccgccgtcgtcgccccgctcgctgcgtgccgaagtggccggcctggtgcgcggcgtggatacccaggacccggtggcgatgcgcgccgcacgccgccgggtgatacgtgcggtcctgctcgccgaactgggttcggagctgcgtgagtacagccaatggcagccgatgctggacaccctggtggacagccttgaggcgaacgaggaacaccgcgaagcgttccaggcgctcatccgttctgtgacctga

SEQ ID NO: 501090 - DNA, 1140 bp, Stenotrophomonas maltophilia
atggaaggcaacggtgtgcgtgtggcgcgcctgcgagggtatctcgcagcggattcaggtaactcggaacttgcgtgtgaactgctggatctgctgctggccgaaggcgcggtcggcgaagctgatcgcgtgctttcagagctgcccgccagcacgctcgggcaccccgcggtagctttccggcaggcacgctgcgcactggccagtggccgttacgcacaggctgcgcagcagttgcagggcctgatcgaagccgggacggatgcgccgggtatcgcccacgatctcgccttctgccagctgtgcctgcgccaacctgagcgcgcccaggcgaccgtgtcgcaggcgatcaccacgcatggcgcgtcggcatcgttgctgattcttgcggcccggatcgccttgatgcaggccgaccatgaccaggcattggctcacgctgacggcgccttgatccttgatcccgaggacgcgcaggcgttgggggtgcgggcactggcactgttcgatggcaaccatctggagcaggccgcagtggctgccgatgcaggccttcgccgcgatccggaccagcatgagtcgctgctggtggcggccacgcttgcgctgtggcgccgcgatgcggctgctgccgagcggatgtatgagcgcgcactgcagcgccacccaaactccgggcgtgccctgtccggtcaaggccagtgcgcgatgatggccaacgacctgccgcgtgcccgtagcatcctggagcatgctgtgcaggccatgccggggcatatcggtacgtggcacgcattggcctggacccagttgctgcagggccagcgcgaggccgcgcggggcagctaccagcaagcctatgcgatcgaccgcaatttcggcgatacccacggtgggctggcactggtcgcggtgctagcgggcgagcacgacgaggcggagcagtcgatccagaaggcattgcggcttgcgcctggctcgatcaccgcgcgctacgcgcgcagcctcttgctggaggcgcagggcgatgcccagggcgcgcaggcattgctgtctgagctgctcgaaggctcaggcgtgacaacgctgcccgtcgccgagttctcccggcgcctgcaccgcacactcgttccccactga

SEQ ID NO: 501091 - DNA, 264 bp, Stenotrophomonas maltophilia
atggattctgatttcgccatgcgcctgctgatcgacacccttatcgccgcactgaaaatgtcggcgcccgtgctgctgtccacgctggtcatcggcttgttgatctcgatcgtgcaggtggtcacccaggtgcaggaaatgaccctcaccttcgtccccaagatcatcgtcgtcggcgtggtctgcgtggccatgggcggctggatgctgtcgatcgcggtcgaacttgccaagcgcatgttcgaagcggcggcgggaatgtag

SEQ ID NO: 501092 - DNA, 765 bp, Stenotrophomonas maltophilia
atggatgccctgcaccagtttgccggcagcttcctgctggcaatgatccgctacctgcctgccacagcgatgacatcgttgacgccgctgcgctgggcgccgccgatggtgcgcatcgtgctggcgatggtgctggcgtggctgaccgtgcaggcgcagccgttgcaggcaaccctgccgcagggcggagcgttcggctgggtggtggcggcggtgggtgagctgatgctgggcctggcgttcggcctggcggtgatgttgccgcaggccgcgttgcacatgggcggctggttgatcgacatccaggccggtgccagcgcagcggtgctgttcaatccggccgcacagggcgagacccagtcactgctgggcacgttgctgatgctggtcggtacggtgctgttcttcactttggatctgcacctggacctgtaccgcatgctggtatccagtgcgcaggtacttccgctcgggcagggcggccgcctgcatgccgacgggctgttcggcatgctgggcagcagcttcctgctgggcctggtgatggtggcgccggtggtgctggcattgcttgccgtggacatcggtgctgcatatgccacgcgctcgatgccgcaggccaacgtgtactttctggtgctgccggtgaagatgatcgtggcgctgctgatgctgatggcaacgctgccgttcgtgccggcgttgttcgagcgcctgtatcgcgatgccttccagcgcatcccttcgttgctggggggcgcatga

SEQ ID NO: 501093 - DNA, 1068 bp, Stenotrophomonas maltophilia
atgagccagcccgatcaggacaagaccgagcagccgaccccgcaccaccttgagcaggcgcgacagcgcggcgaggtcgccaagagcgcggacgtgtcgggcagcctggtgctggtcgtgttcgcggcggcgctggccatgaccgtggcaggcatcgcgattgcgttggccgacgcgacccggcgcctgctggccctggcaggcaacgcgccggagctcaatgcggcgtttgtgcactggactgtgcgtgcctatggcccggtcgggcaggccgtgctgccgctggtgctggcgctgctggtcaccggcttgcttggcaacctgctgcagaccggcccgatgttcactgcccagccgttgaagcccgacttcaagcggatgaacccagccaatgcgctgcgccgcatcttttcgatgcggaccctgtgggagctcggcaagatgaccgccaagttcctgttgctgggcgccgtgtgcgcggtattcgcctggaaggcgcggggcctggcggaagccgtgatccaggtgctgccgcagcgcgtgggcgcgttgttccgcgacatgttcgtgcagacatcgctgtacgtgctgctggtgctgggcctggtggcggttgccgacttgctgttcacccggcgcgagtacatgcgcaagatgcgcatgagccggcgcgaggtgcgcgacgaagtgcgccgccgcgacggcgatcccgccatcaagtccaagcgccgccagcaatcgcgcgagctgctgcgcaagacccgtgcactggcgcgcgtgcacgaggccgacgtggtactgaccaacccgacccatgtggcggtggcactccgctatcgcccgggcaagatgctggggccggtggtcattgccaagggcgctggttcgctggcggccatcatccgccgcttggccggccgccatcaggtcccggtgatgcgcctgcccgtgttggcacgcgcactctacaaggagtgcgagatcgaccacaccgtgcccgaggcactgtacggcgagctggcgccggtgtaccgaacgctgtggaagcgaaagggagcgtcggcatga

SEQ ID NO: 501094 - DNA, 2061 bp, Stenotrophomonas maltophilia
atgaagctgctgctcagccagatgtggggcgggcgacgtgacctggcgctggtggcgctggtgatcggtgtgctggtggtgctgttcgtgccgattccgccggtgctgctggacttcctgctggtggtgaacatcagcatggccatgctgatcctgctggtgacattcttcaccgacacgccgctgaaattttccacgttcccgaccatcctgctgttgtccacgctgttccggttgtcgctgaacgtctcggccacgcgcctgatcctggaaggtggcgatgcgggccgggtgatcaacgcgatcggcgagttcgtgatcggcggcaattacatcgtcggcatcgtggtgttcctgatcctggtggtcgtgcagtacgtggtggtcacctccggtgcgcagcgggtggcggaagtcgccgcccgttttaccctagattcgatgcccggcaagcagatgagcatcgatgccgacatgaacatggggctgatcgatgagcacgaggcacgtcagcgccgcgcacagatcgagaaggaagccaacttctacggcgcgatggacggcgccaccaagttcgtcaagggcgatgcgatcgccggcatcatcatcatcctgaccaacatcatcggcggcctcgccatcggcatcgcgcagctgggcctgccctggggcgaggcggtgcagcacttcacgttgatgaccatcggcgacggtatcgtcacccagattccgtcgctggtcatcgcggtggccaccggcatcatcatcacccgcgctgccgccgacgcgcagctgggcaccgagattcccaggcaggtgatggccaacccgaaggcgttggcgatcgtggccatggtccttctgctggtgctgttgttgccgggtttcccgaaactaccggtaatcgcggtcctgctggtactcggtggcctgggctgggcggcgatgcgtgcccgtgctgatgatgtggccgagctggcgcaggacatcgccgtagccaaggcagatgccaaggctggggaaggtgccagtgactggatgcgcatcgagccgatcgagatccagttgggcgccgagctcgccgatgccttccttggcgccgatggcgacctggccgatcgcatcgcgcatgtgcgccggcagtttgcgcaggacatgggcttcctggtgccgcgcgtacacaccagccggcgatcggagctgcgcggcaacgcctatgagatccacttccagggcacgcgggcggggcagggtgagctgacgatcgaccgcgtgctggccatcaacccgggcggcagccgtgcgcgcttggagggaccggagacccgggatccggcgtatgggctgcccgcgcagtggatcagcaaggagcagcgccagcacgcgcgcagcgccggctataccctggtggatgccgatacggtggtgatcacccatctgagtgagctgatcaagcgccattgcgcagatctgttgacccgcgctgaggccgaacgcatggtcaaccgcttgcgcgagcagcagggctcgctggtcgaggagttggtgcccggcgtcctgacctattcggagatccagaaggtactgcagcacctgctgcgcgagcaggtcagcatccgccatctggaagctatcctggaagtgctggttgatgccggccgcaccaccaagcaacccgatgagctggccgagcgggtgcgagagcggctgggtgcggcgatctgccagagcctgcgcgacgcgcagggcgatctgcatgtgatgaccctgtcgccggaactcgagcgaaccctgctggccaacctgcgcccggttgacggtcgcgccggctcgctgttcggtgacatggcccagctggacggcttcatgaagaacctggccagccaggccgaatcgatgatgggccgcagcctggtgccggtgctgttgtgcccctcgccggcgcgacgctcgctacgggcgttgctggtgcgttcgatgccgtatctggcggtgctgggcctgaacgaagtgccggccacgctgccggtccgctccttcgccgcgatccagtcccactga

SEQ ID NO: 501095 - DNA, 681 bp, Stenotrophomonas maltophilia
atgaccgacaccctcgaagcgatcagccgcagccttgctgccgaagtcaggaccctggccaccatcagccagaacgtggccaacgcgcatacacccggctaccgcgccttgcgcaccgctccggatttcgccgcccaggccgggctgcgcaccgtggccgaccagcgtgatggtgggcttgcacagaccggccgggcgcttgactttgccttgcgcggcgagggctttttcgtagtggagcgcgaggggcgggccatgctggcgcgctcgggcgccctgcgcatcggcgaggccgggcagctgatgacaacgaacggggaagctgtggtcggcagcgcgggaccgatcgtgattccggggggccagaccgccagcgttcgcgtggacggtgacgggcgcctgtgggtggaagagcaggaagtggaccagctgcgcctggtggcaacagccgatccggccgcggtgtcgccgctgggcgcaggaacctatgactacagcggcgaactgcatccgtgggaaggcaaggtggtgcagggggctcttgagcgcgccaatgtcgaggcggccgacgaaatgctgcgcttgatggaaaccacccgccacatcgattcggttcgccgcgccatcagcacctacgaccagatgctggatcggggcatcaacaaccttggcaacaactga

SEQ ID NO: 501096 - DNA, 780 bp, Stenotrophomonas maltophilia
atgatcgatgccctctacatcgccgccagcggcttgcgcagcgagcagaaacagatcgacgtgatctccaacaacgtcgccaacatgcagactcctggcttcaagcgcagccgggtcaacttcgccgacgtggccggtgccgcgatgccaccggccctcgatgccacgttgccggcagcacccgcgcaggcgatgccgggtggcacccggatcagtgccaccctggccgagttcgagaccggtgatatccgcgcgaccggtaatccgctggatctggcgatcaacggctccgggctgttcgagctggagcttgacgacggcagcgttgcctacacccgcgacggccagttcaggcttgacgccgaaggcagcctgcgcaccctgcagggcgcccgcctggcaaacgccccgcagatcccgctcgatgcgaccaagctggaggtatccagcgctggcgaggtttcggtgctgatgccgggcgagacccagcgcaccgtgctgggcgcgatcgagctggcagtgttcggtgccacctatgccctgcagtcggtgggcgacaaccgctttaccgccaccgttgccgccggctcgcccagctacgcggtacccggtgaagccggcagcggcaagctgcagcagggctacgtggaaatggccaacgtccagatgatcgaagagatgtccagcctggtgatggcacagcgcgcctatcagctcaatgcgcgtgtgctgcaggctgcagaccaggtcctggaaaccatcaacaacctgcgccgctga

SEQ ID NO: 501097 - DNA, 699 bp, Stenotrophomonas maltophilia
atgcactccttgatcctgatgcttgccctggcgtcgccgaccgccgcccactccacgcctgcgccattgtcaggccagtacctggctgcccgcgtggtggagacagtgcaggcacgcctgcaggcacagggcagtagcgcgatcgtgtcggtgctgggccgcgtggcggacgttgccggtgttggtgccgatcccgaggtcgaggtcggtacggttgccgggcgctggccacgtgcgcgcgcctcggtcccggtgcgccttaccgattcgaggggcacgcgccgccttgtcacggtatggcttgcagcgagcgacctgcgcgaagtgctggcctacagcaacgactatccggcgatggttccggcggagaagctgcaggcaacgcccgtccgcatcgatatggcctgttgcgaagggcccgcgattgccacgctggccgacgtgcggggcaagcgactgcggcgcgcggtgcatgccggtcgtccggtgctggccgaggatcttgcggctgcacccgaggttgcggcacagcagcaggtgaccttggcagtggagcggggtgccgtccgcatcgtaatggcgggaacggcactggccagtggacggctgggtgagcgcatccaggtgcgtccgcagggatcgcagcgggcagtgcaggcacgggtcagcgctccggcagaggtggtgatcgatgaatag

SEQ ID NO: 501098 - DNA, 576 bp, Stenotrophomonas maltophilia
atgaatagacaggctgttgccgccctgttgggcgctttgctggtgacccaggccgcacaggcacagagtctggttgaacccgaacggtaccgcgcgctggcggcagaccatcgggcctatcgcctgggtgatgtcattaccgtgtacgtcgccgaagcgacccgggccaaatcgcaagcggccaccgacgcgtccagcaggcttgagctcagtgcgggattgcgttcgcccagcaccgacttcaacgccgatgccggcgtgggcggaagcaattccggtggcgcacaaaccacgcgggtgggggagctgcggacccaggtttcggtgcaggtggttgcgttggagcccgatggcagcctgcgcatcgagggtatgcagacattgaccgtcaacggcgagaaccagcgcatccggctgaaaggcctggtgcgcccgcaggacgtgtcagcgcagaacacggtgtggtccaaccgcatcgccaatgccgaactggaactggatggcgtgggcatcgtcagcgaatcccagcgccagagcgcgatctaccgactcttcaagtggctgaggttgatgtga

SEQ ID NO: 501099 - DNA, 1116 bp, Stenotrophomonas maltophilia
gtgaggatcacaatcgcagcagtactggtggccgccttgtgccaggccggctgggcccacgccggcgcagtgaaggtgaaggatatcgcccgcgtggccggcgttcgcgagaaccagctgaccggctacggcctggtgtttggcctgtcgggatccggtgactcccagcgcaaccgcgccaccgtgcagtcggtggccaatactctgcgcaacttcggcgtcaacgtgaccgaggacgatatcgccagccgcaatgtggctgcggtgatcgtcaccgccaaactgccgccgtttgccgaacctggtcagatggtggatgtgcaggtcgcctcgtccggcgatgcgcgcagcttgaccggcggcacgctgatgctgacgccgttgatggccgccgatggccgactgtatgcaatggcgcagggagcgatttcggtgggcggctaccagttccagggggttaccgcatcgctgcagaagaaccacccgactgtaggctggattccatccggagccagcatcgaacgggcatcgccattgccggtggccggagaaggacgtgagctgagcattctgctcaatgaacccgacttcaccaacgccagccgcatcgccagtgtgatccgcagtgccgaaccgtcatcgacggtacgtgcggcgcatgcgggcaaggtcacggtgtcattcgcctcgccgccggccgatctggtggagcgcatcgcgcatctggagaacctctccgtggtccaggacaggccggcgcgggtggtggtcaacgagcgcaccggcaccgttgtcgccggtggcgacgtgcgcctgggccaggtcggcatctcgcatgccggcctgcgcgtggagatccgtaccgagtaccaggtgtcccagccggacggcatctactaccgccctgggcacagcattgccacggcggtggtgcccagcaccacgatcaaggccgaggatcctgaggcaccgctggtacgcatccctgaaggtgccaccgtcgccgacctgatctcggcgctgcgcgcggtgcatctgagcacgcgcgacgtcattgccgtacttcaatcgatcaaggccgccggttcgctcgacggcgagcttgtcatccagtaa

SEQ ID NO: 501100 - DNA, 363 bp, Stenotrophomonas maltophilia
atgatgtccagcagtgagaccaccatcgacgcgatccggctggcgctgggcatgtaccagagccgggccgagatcgccaattccaacatcgccaatgcttcgatgcctggtgcattggcgctgcgtgcggacttctcgcagtaccaggtgatgcttgatgcagccgtggagggccgaagtgatggcctgcggcaggcgattgcgcaggtgcgtgagccggacatccgtccgttggaaacaccgctgaacctggatgcgcaggttggcgagctggtaggggtaggggtgggcttccagtcgctgactgaagcgctgaaccgacagttcggcttgatgcgcctggctgtggtcgggaggaactga

SEQ ID NO: 501101 - DNA, 393 bp, Stenotrophomonas maltophilia
atgccgatcgattcagtactggatgtggcccgcgacggcctgaactacgagcggctgcgcctcgatgcggccagccgcaatatcgcggccgccaacgttgcagtacctgctggacaggaggtgacgctatggcaggtcgggaacagcggctcgttcggccaatggttggggcagggcggcacgctgcagcaggcgccggcggccacccgggtggtccatgaccccggtaatccgttggccgacagcaacggccaggtacgttttccgcaggtcgacctggtacaggaaatgaccaccctgatgactgccagccgtggctatgaggccaacgtacgttcgttcaacctgctgcgcagcatgatgctgcgctcgcttgaaatcggggccaagtga

SEQ ID NO: 501102 - DNA, 297 bp, Stenotrophomonas maltophilia
atgagcatcgaggcaatcggcccaatcgggctggaacagggacagagtctggccatatcggcgccggccacacctgcggcggacttctccggatggcttgccagtggcgttgggcatgtcgagcacagcctggatgttgccgagaccggggtccgcgcactcgccgccggacgtgacgtgccggtgcacgaagtgatgatcgcactggaacaggcacgcctggatctcagcctggccaccgaagtgcgcaaccgtctggtagaggcctaccaggaactggcgcggatccagctgtaa

SEQ ID NO: 501103 - DNA, 1389 bp, Stenotrophomonas maltophilia
atggatcccaggaatttctatctttcgttgcagcgcccggcgcggattggcctgatcatcggcatggtcgcgctgctggcgctgaccattgcgaccctgtggtgggtgatgacgccccggcagcagctgctgttcggcaacatgaatgaacgcgatgctgccgaggtggtggcgtcgctcaacgaatggaaggtgccacacaccatcacggacggcggcgccggcatcaccgtagcggccgatcaggtgtatgacacccgcatgcggttggtttcggccggggtgccgcgtggggggcatgtcggcttcgagctgttcgacgattcggacttcggtgtcaccgagttcgcgcagcgggtcaattaccaacgcgccctgcagggcgagatcgaacgtaccatcgccgcgcttcccggtgtcaccagtgcgcgcgtgcacctcaccatccgccgtcctggcctgttcgccaatcagcatgatgactcgaaggcatctgtcgcactggcactggagccgggccagcgcctgacccgcaagcagatcaatggtgtacgcagcctggtggccgcatcggtggagggcctggcgccgacccaggtctcggtgctggattccgatggtggtctgcttgcagccgcaagcgcggatggcgccaacgatgccgatctgcaggggcatgccgaagaagaccagcggctggagaaccgcctgcaggcgcgcatcgtggatctgctggggcaggtcctgcatgacgaagaattccgtgtgtcggtggaggccaccctcaacttcgacgcggttcgtgaagtgagcgaacggccgctggcgcaggggggcgatggcaacggcctgcttgccaacaagcgggtcagccactcgggcggcagcgagggcgggcagaaccagaacgaggaggagtccaccttcgtgcacggtaccgcgcgccaggagatcgcccgcgcgccgggccggatcgagacgctgtccgtggcggtcatcctgccgccgaacctggacgacagcgaggtcgagcggatccgtgcgctggtcgccgccgcagccggcatcaacgaggtgcggggagatcgcctggcggtatcgcggcttggccgcggccagcgctgggatgcctcacccggcgcggcccgtgccgtcactgcgctgggtgcaacgcagaccccaccaccctcccagccggcatcgccggtgaagaagacggtggcatcgcccccctggatccgttgggccctgatcgccgttgccggtgccttgctgggcgggattgtgatcctggctacgcaacgacgcccaaagcgattgagccgcaccgaacgggacgccgttctggccaggatgcgtggctggttggccgaggggggcgcgccatga

SEQ ID NO: 501104 - DNA, 447 bp, Stenotrophomonas maltophilia
atgaacagttcgcgcggcgaacgcaagtgcgccctgatgctggccacgctggcggcgtctgaccggcgccagctgcttgcccagttgccaccggccgcagcatcccgaatcaagcgactggtgggtgagctgcaggcgttgcgcctgcccatcgccgagcttgcccaggcgctgctggccgacgaagtggttggactcaccagcgaaacgtcgctggatgtagagcagttgatgggactggcggcgcacctgccggatgcctggtacgcacgcgtactggcggcctggggggagctggatcgatcgttctgcgtgtcgctgctggagccgtcgcgtggtgcggcggtggcgcgcgagctgggcagggtgcccgcgctgccgccgcgcctggcccatgcactcaaggcagaggcgatgcagttggccgcggtggggcgcgccgcatga

SEQ ID NO: 501105 - DNA, 654 bp, Stenotrophomonas maltophilia
atgatccagcgactgcctgctgatgagccgagggtggtagggctggggacgttgttcgcgcccgccgaagcgatggcgtcgcctgtgatcggtatcgatccggagcaggagcgcctgcagcggttgcaggaagcacgcgaagccggccatgccgaaggcatgcgccaggccgatgcgcagatccgtgatgcggtggctgctgcggaactggcttgccagcagcgtcacgcccaggccctggcggaactgcaggatgagcgtgcacgactggcgcagtggtcgctgcagctgcccacgcagctcgctgaactggaacgcgccactctggcaacggcggcacaactggcttatgtcgccatgcttcgcgtgctggatacgctgcctgccgaagagcgtattgcgcaggcctgccggcaggcgctggccgagcagaagcagcgcccgttgcggctgcgactgcctccgctggacgtgccgttcgcgcaggccctggcaagcgcggagatcctcatcgaagcagacgcgcgcctgcagccgggccagtgccggatcgaaagtccactggggatcgacgatgcggggctggatgtgcgtctggatgcgttgcgtaccgccttcctgcagggactggccagcgcaggggctgcgcaatga

SEQ ID NO: 501106 - DNA, 1317 bp, Stenotrophomonas maltophilia
atgacggctgcctgcgcccccctgcttgaagccattgccgcggcgccgatggtgcgtcgcctcggccaggtggcgtcctataacggcttggtgatcgaggcgcttggccccgaggtcggtgtaggcgagttgtgccgtatcgaccgcgacgggcgtgcaccaatcctggccgaggtggtcgggtttcgccaggggcgcacccagctgatgccgttcggcgagatcgacggcctggctccggggcaggagatccgtgcctgcgagcgtaccttggaagtgccggtcggcgacgccctgcttggccgcgtggtgaatgcactctgcgagccgatcgacggtcgtccactacagtgcacgcaacgctacgcgctgcgccgggcgccgatcaatcccctgcaccgagcgccgatcgatacgccgttggccacgggcatccgtgcggtcgacaccctgttgaccctgggtgaaggccagcggatcggcgtcttcgccggcagcggtgttggcaaaagcacattgctgggggcacttgcacgggaggtacaagctgacgtgaccgtgcttgccctgatcggcgagcgcgggcgcgaggtgggcgacttcctgcgccactccctgggcgataccggactgcgccggtcggtggtgatggtggcgaccgccgatgagacggccgtgacccgcgtgcatgcggcgcacgctgcccacgccgtcgccgagtacttccgcgacagcggccgttcggtgctgctggtggtcgattcgatgacccgctttgcgatggcgcagcgtgagatcggcctggcggtcggcgagccccccacgttccgtggctacacgccatcggtgttcgcgcagctgccacggatgctcgagcgctgcggaaaactgcaggcgggtggctcgatcacaggcatctacagcgtgctggtggaaggcgatgacatgaatgagccagtgaccgaccatatgcgcgccatcctcgacggccacgtcgtgctgtcgcgggacctggccgcgcgaggacaccatccggccatcgatgtgctgcacagtgccagccgggtgatggatgcggtggccagcagcgatgagctggcactggcacgtgaagcgcgacgccatctggcgctgtatgaagcgtcgcgcgacctgatcgagctgggggcacaccagaagggcgccaatccggcactggaccgggtcatcgagcagcggccgcatcttgaagccgtgctgcaacagccgcccagcgaggcgaccccgcgcgaagcggcctatcgccgcctggcagccgcattgcaggggacggcatga

SEQ ID NO: 501107 - DNA, 453 bp, Stenotrophomonas maltophilia
atgagcattccgcgcagcaagggcctgcatgcgttgcagcgctggcgcagtttcgctgaagaccgcgctgcgctggcccgccagctggcattgcgcgcggttgcggaggcgaccgctgaggtcgcggtcgtgcaggatcgtgcgcaggcggccagcgagcagcgcctgaggctgctgcagagtccgctgctggatctggcgcgcttgaccgcgagtgcgggcatgggggaagccgcatggcgggatgtgcaggtgtgtcaacagcgcttgcagcacgccgaggatgatgccctgctcgcgcgcgagcggcacgaaacagcgcaccgcatggcccgcgcggtggcgcaccgtgcaacgcgtgtggctgcgatcgaacgcgatgcggccgagaagcatgtctttgattcgttggtggaactgcgtggccgcttgcccggaggttcgcatgattga

SEQ ID NO: 501108 - DNA, 387 bp, Stenotrophomonas maltophilia
atggcggctgccaactccgtgccggcggtggctgccatgtccggcaggagcgcggccactgccgtcgccctcgccgctccgaacgcgcgagtcaccgcagcctctaccgctgccgatgcagtgggcgccagcgctgcactgtctgaactgggcgagcgatggcaggcgcgcctgctgcgctggggcaggaccgcaggcgaggggctgagcattcgcatccgcgattaccgcctggatgcgcaggatgcgcaggcgcttgcagagcggttgctggcgttcgccggacgacacggtctgcagctgcagcggatcgtcatcaatgcgcgcgagctttggcgtgcaacccacacctatcctcaaccgaccggagatatgcatggccgttga

SEQ ID NO: 501109 - DNA, 420 bp, Stenotrophomonas maltophilia
atggccgttgatgcaatcggaagctcactgggcacccagcagaactccgcactggcacagagcagtacgatcgaccaggaagatttcatccgcctgttccttgctcagctgcagttccaggacccgctggagccggtcgacaaccgcgagttcctggcccagctggcgcagttctccgcactggaacaatcccgtcaactcagcgagaacaccgcgtcgatgctggcgatgagtgcctccgaccaggccgtgggcctgctcaatcgccaggtggacctgaccaatctgggcgtgacccgctcgggcacggtggtggcggtgcagtttggcagcgccggtccggagctgagcgtgcgcgacgccaccggatcagtcagcacaggcatccgcctgtcgcagatctccctcgtcaaaccctga

SEQ ID NO: 501110 - DNA, 1158 bp, Stenotrophomonas maltophilia
atgttccaagccctgttcaacagtctttccggcatgttcagcttctcgcgaagcctggatacggtgtccaacaacgtatccaacatgaatacacctgggtttcgtggcagtgatgcgttcttcaccaacgtggaaggtggctatggctcgcgcatcaccggtgacgacatgcgaaccaaccccggcgacatccgccagacggagaacgccaccgacctggcggtgaacggcaacggctacttcgtgctgcgcgaccccgctggcgacctgcattacacccgcgccggccagttccgcttcgacgagcacagccttctggtggacagcgtcaatggctaccaggtgatgggcctggatggcagcggcaacatggtcgcgatcgacctggacagctatcgcaacattccagctgtggggaccagccaggtgcgcgtcaccggcaacatcgcgccgtcctcgaccaccaccaacatcaatgcggtgactgtgttcgacgcctccggtgcatcacgcgtgctttcggtcaagttcaccaacaacaccgccaacacgccgggcagcttcctggtgaccgtgaccgattcctcaggaaaggccctgggcagcggcgaagtgcgcttccgtaccgacggcacgccattgaccgggtacgcagggatggacgtggtactgcaggggccgggcggcgcgcaggcgatccggctggatttcggtacccccggaacattgaccggcatgacctcgctgagcggaaccaccagcagcctgtcggccaaggtgaccgatggccacggcattctggccgtcaacggcatcaccttcgatgacaagggcgtgatgcagttgacctactccgaaacggaaaagcgcagtggtccgcaggtcgcactggccttgttcccgaatgaaagcgcattgcacctggagggcgggcgcctgatcgcaggcgccagcgtgcaggaacgcgatatcggccgcccgggcgatactggctttggtcgcatccgcggcttcagcctggagatgtccaatgtggacctgacccgggagttcgccgacatgatcgtgatccaacgcggctaccaggccagctcacgcgtgatgacggtcagcaacgaaatgattgagcagctgtacaacagcacgcggggcgggtga

SEQ ID NO: 501111 - DNA, 750 bp, Stenotrophomonas maltophilia
atgacggtccttccgttccggcggcatggcgtgaggcgcgttgcgcagatcgaagcagcattgcagcagcggctggaccattggcgcacccagtgggccgccgagcccggccattgcgaagtggaggtggcggacgttgcgttgccatcatcaccgggccagtggtggcactgcacgggaaccggcgccttcgcgcaccttggcaacaatggcctggagcggattgcagccgctctggccgcagttcctggcgggaagtccagccccattgcggcaggaataggccgccgcgcctttgccgatctgttgcgtgaactggtgccatcggctgcagaggtaatcgccggcgctgcgccgatggcggccttgtgcgacgcgcgtcatggcgtgctgtgcttcagcgtgtcgctgccaggtgccgaggccctgctgtatctgccactggctgcctgcgacgcactcgtgccgatcccggtcggtgcctccgggcccgtgctgacgtcgcgtcgcagcgcgttgctggcatccaccgtgagcctgtacgccaccctggagctgggcagtgctgacctggatgctgccagcaccctcaggcccggcgaaaccctgcgcacctcgcgtatcgccgatgccgtggtcaagctgcagtcggccgacggccacaccgtgttcagcgcgagcctgcattcgtccgagggccgcaaggcacttcgctgtatcaatgacacaacccagccaggaatgaagtaa

SEQ ID NO: 501112 - DNA, 300 bp, Stenotrophomonas maltophilia
atggaacgtacatcggtgttggaagcggtgcgcgccgagccggcgcaggcggaacagggcgatgcggccgagcgcagcatcgcgctggtccggcatgtgcaggtagcgctgagcgcgcagatcggcacggttgatatgagcgtggaccggctgttcggcctgaaggcaggggacgaggtggtgttgaacgagcagctggaagcaccggtgacgctgctgctcaatggcaaggcggtggcacgcgcggagctggtggcgattgatgaccacttcggcgtgcggatcctggagatcgcatga

SEQ ID NO: 501113 - DNA, 363 bp, Stenotrophomonas maltophilia
atgaccgctgcgtcgttcgttctggccgcggcacccatccgcttcaagagtgaagcgggcagcgttggcacgacgctggtggggccgctgatcatcgcaagcctgctgcttgcgcttgccgtcgctgctctttacgtcgcgcgccggaaaggctggttgcggcgttggagcgtggcgccggccgcagcggcggacatgccactgggcctgagggtggagcaggtgctgcggctcagtcagcgcacgcggctttaccgggtcagcgacggtgtagcggtcttcacggtggtggagtccaccgcgcatgcacagattgtgcccggcaccggacgcggggagccggaggccaccgatgcaggctga

SEQ ID NO: 501114 - DNA, 744 bp, Stenotrophomonas maltophilia
atgcaggctgaccgccgctggcgcgtactaccgctggtcgctgccctgatgctggtggccgggcaggcgtgggcgggcccgaccgaggacgcggtggccgaggcgctgaagcaggactactcacccgcgctgcgtaacttcgtgatcctcacgatgttgtcgctgattccggtgctgatgatcggcatgactgccttcaccaggatcatcatcgtgctgtccctgctgcggcatgcgctgggcattccacagacgccgcccaacagcgtggtgatcaccttggcgatctgtatgacctacttcaccatgtcgccggtcctcgatcgcatgaaccatgatgcgatcgcaccctacatgagtgagcagatcaccgcccagcaggccatcgaactgggcagccggccgctgcgtgagttcatggtctcccagacacgcgaatcggacctgcgcacggtgatcgagatggccaaggcgccggcgcccaagactatggacgacatccgctttggccatctggtcactgcgttcttgctgagcgagctgaagaccgccttccagatcggcttcgtgatcttcctgcctttcgtgctcatcgacctggtggtcgctgcggcactgatggcgctgggcatgatcatgctgccaccgaccaccatcagcctgcccttgaagatactgctgtttgtactgatcgatggctgggtgttgctgtccaaggcgttgctgggcagctactggaactga

SEQ ID NO: 501115 - DNA, 675 bp, Stenotrophomonas maltophilia
atggacacgcatgccacggatggcgaggcggtactgtggtcccagctcagggagcaacgctgctcgcaggcgcgtgatgccctctacctgcgctacaggccgtgggcgacagcgatcgcgcggcgggtacaccgccgcttcccacggctgggtgcggaccgggacgacttcatccagaacgccagcattggactgctggaggcgattgatcgttttgatccggcacgcggcattgcgttccaggcctatgcaatgaaccgggtacgcggctctgttttcaatggccttcgcgtgatccttgggggcgcatcgaacgagcgcaatcaggagcggctgggcaccctgcagggtgggtccgatgaccccttcaatgagctggtcgcttcgatcgtcgggttgggcctgggctacatgctggacgatgcggccaatccgctggtcatcgacagtcacgatgcgcttcgcttcgccgaggatcagcaggtcatcggacagttgcttgccggagtggagcaactaccgccaaggttgaaggcgatcatcgtccgccactacttcgagttcacgcccttcattgagcttgcccaggagtgggggctgagtaaggggcgcatttcgcagctacaccgtgcggcgctcgacgcactgcgactcagcgtgcaggcaactgattga

SEQ ID NO: 501116 - DNA, 309 bp, Stenotrophomonas maltophilia
ttggatatccgcctgaaaccgatcctgaccctggccgtgctcctgtgcggcacgacactggcaaccgccgcgtggtgcaaggacgaccctgccgccggggcgaagctctactccgccaactgcaccgcctgccatggcgcggaccgcgctggcatgccgggtgcgttcccggcgctcaccgatgtcagcaagcgcctggatgccgcgcagatcaaggacaagatcaggaagggcggcggcctgatgccgcccttcccccagctgtcgcagcaggagatcgatgacatcgccagctacctggcgaagtaa

SEQ ID NO: 501117 - DNA, 870 bp, Stenotrophomonas maltophilia
atgatgaacatccgtgtgcgtagaactgcaagccttgtcgtgctgttgctcgctgccctgcccgccttcgcgcggaacgcagcagccccgcagcaacccatcgccgtgcagatgtacacgctgcgcaacgccggctcactggaccagcagctgaagatcgtccacgacgcgggcgtgcgcgcggtggaaacggtcggtacccagaacgtcagcgcgcaggcgttgaagcagttgctggaccgctacgcgatcaaggcggtttcgtcgcatgtcccgttgaccgaactgcgcaacaaccttgatggcgtggtggcgttcaaccgcgcgatcggcaacaccacgctggtggtgccctacctggatcagaaggaccggccggccgatgccgcaggctggaccgcgctgggccaggacctgggccggatcgccaggcaactgcgcggcaagggcatgcagctggcctatcacaaccacgacttcgagctggccgacttcgaaggcaggaccggactggagctgctgttcgcagcggccgggcccgagctgcagaccgagctggacctggcctgggtcgcgcgtgcgggtctggacccggcggcgatgctgggcaagttcagcggccgcctgttcgccgtgcatgccaaggacaatgcgcccaagggccaggccgaagacgaaggcggattcgccgcggtgggccagggcgtgctggactggaacgcgatcctgcctgccgcagcggcggccaacgtgaagtggtacatcgtcgagcacgaccagccacgcgatccgggcaaggtcatccagaccggcgcggattacctgcgtaaacacctgaccctcagccagcccgctcgtgcgcggcgctga

SEQ ID NO: 501118 - DNA, 735 bp, Stenotrophomonas maltophilia
atggctgagtcgttggccaccctgcaacggcgttgggccgaccatgtgcgcgacccatcagtggccgcacccgatggcatcgaagcacgcaggctggcggtataccgccgcctgtgcatcgacagcctggacagtctgctggccggcagcctgccgcacctgcgacagcagttgggcacgccgcgctggcgcgacacggtggagcactactacgcccgccacacctgccagaccgcgttgttcccacggatcgccgacgagttcgcggcctggctggcggtgcaggacacgctggcactgccgggctgggcggcggaactggcgcactacgagagcacacggcagtcgctgtacatcgaagcgcgtgacgccgggcgtttgctgcagcgcgtacccgaggacagtgatgtgctggcggtgtcgccgttggcaagagtgcttggctaccagtggccggtgcacgaggacgaggggccggggtcggtgctgagcactgcgcccatgctgctgctgatccggcgcctcgccgatttcagcctgcaggtcgagcaactgtcgccgctggcctacgcgctgctatcggtctttggtgacgacggcgccgctgtggaagcggcactgcgggcgctgtcccaggcacatggcgtggcaacggatgcattgcgcgtggcctgcgcgcccgttctggacgaactgtgcgcggcaggcgtgctggttgcattgccttcttcctga

SEQ ID NO: 501119 - DNA, 921 bp, Stenotrophomonas maltophilia
atgagccttgccctgctctgccctggacagggtgcgcaacatgcggcgatgttcgatcgcgtgcgcgacgttgctgccgcgcagccggtgctcgatgccacggatgaactgctgggccgcgatgcattcgccgccgcggcggccgccgaccgctttgacaatgcgaaggcgcagccgctgctgtgcgcggccagcctggcgcactggcagggcctgcgcgaggcgttgccaacgccgactgtgatcgcgggctacagcatcggggagttggccgcacatgccatcgccggcagcttcgacaccccgacctgccttgccctggccgcgcagcgcgcgcggctgatggatgccgccagtccggatggtgccgggctcctggcagtcctggggctgggccgcattgccacacagcgcctgtgcgatgcgcacggcgcgttcatcgcgattgccaatggtgatgaccacttcatcctggggggtgcacggccgtcgctactcgcgttggcggcagacgcgcaggccttcggcgccgaaatccgtccgttgccggtccatgtgcccgcgcacacgccactgctggccggcgcagtggcatcgtttgccgccgtgctcgaagcagcgcagatgcaggcaccacgcctgcccctgctggccggcatcgacgcgcgaccggtgcgggatcgcacaacggcggtccacacgctgtcggcgcagctggcgcagaccatcgaatgggcgcaggtgatgcgccaggccttcgagcgtggcgcgcgggtgttcctgcagctgggcccgggcaacgcattggcgcgcatggtcgcgccggcctatccgtgctgcgaggtacgcgcggtggaagagttccagagccttgaaggcgctgcggcctgggtgcgcagtgcgctgcaacggcggcagtaa

SEQ ID NO: 501120 - DNA, 858 bp, Stenotrophomonas maltophilia
atgaacgccgtcgcgcagccgactgccaggccggccgccgccgtggactgcgcgcgcctggggcgcctcgccgttgccagcctgcatgcagaactggccctggcaccaaaaccgggattggtcacgccgttcgaccgcggcagccatcacgacatggatgcgcgcaccttcctgcgcagcctgttcgcgctgcgccactatttcaccgcggtggcccgcctcggtgcagccggggcggacttcgaggcgatgcgccggtgtggcattgccgccgaagccgcgatgctgcgcgcgaccggcggcatcaacacccatcgtggcgcggtcttcagtctcggcctgttggtggccgccgccgcggcctgccgctcccgcttgggccatgcggccaccggtgagcaggtctgcctggaggtccgtcgctgggctgcggacttcgcacgggcaccgctggatgcaggcagcccgggccaacgtgcgcgcgccctgcacaaggtgccaggcgtgcgcgaacaggccgccgccggctacccgctgttgcgcgaggtggcgctgccggtcctgcgcgatgcactggccaatgggctggcgcgcgaggccgcgatgtgccacacgctgatgcagctggtcgcacacaccgacgacctcaacctgctgcatcgcggtggtactgaaggcctgcgctgggcgcagcagcaggcccgtcgtttcctggccgaaggtggtgccttcgcacacgattggcggccgcgcctgcacgtcatcgccgacgccttcgttgcacgccacctcagccccggtggcagcgccgacctgcttgcctgcagcctcttcctgctgcagcaggagcgcacatga

SEQ ID NO: 501121 - DNA, 2193 bp, Stenotrophomonas maltophilia
atgtccctgaccttccgtaaccgcctgccccgccgtgcgctgctgccggccgctttgcttgcgtcgatggccctgctggccacgcccagcgcgttcgccgccgccgacggcacggccgacgccaagaccctggaccgggtcagcgtgcgtgccgagcagtccgctccgccggccagcaccacgcgcctgccgatcaccctgcaggaaaccccgcagtcggccaccgcgatcagcctgcagcgcctgcaggacgaatcgctgttcagcatcaacgacgtgatgcgcaacgtgaccggcgtcagcgtgtccttctatgacacccagcgcccgctgtactacgcacgcggctttgccatcaccgacttccaggtcgacggcattcccacctacagcggctcgaccaatcaggaatacgacaccgccttctacgaccgcatcgaagtgatccgcggtgccaacggcctgctcagcggcgccggcgtgccatcggccacggtcaacctgctgcgcaagcgccccggcaaggaattcgacgcgtcattctcggtcagtgccggcagttgggactaccgccgcatggaagccgacgtgaccgcaccactgaccgatgacggccgcttccgcagccgcgtggtcgccgcctataccgatcgcgggctgtactacgaccgctacgacgagaacaagatggccggcatggcggtgctggaaggcgatgtcaccgacagcaccacggtcacccttggctaccagacccaggacaacaacccgaccggctcgacctggggcacggtgccgttcttcgacaaccagggcaacttcgcgcacctgccgcgctcgaccaacctgtcgccgaagtggagctactggaagcgcgagagcaacaccgccttcgccaacctggaacagcgcttcggcgacaactggctgttgaaggtcaacaccgcctacacccgcggcaacgtgcagaacgtgcgcctgtacggcaccggcaacccggacccggtgaccggcgcaggcatctacctgcgcgcggccgccggtgattccaaggacacccgccgcaatgtcgatgcctacctgaccggcagcttcccgctgttcggccgcgaccacgacctcacggtcggcgcgcaatggtcggacctggaaggcaccacgaacaccgtggcgctgaacttcccgaccgactgggcccgctgcggcagcgaacgctgctactacattcccaacgtgcacagctggaacggcgacatctccgaggtgacctacacccgtaccggcgcacgccgcgtggccaagaccacgcagagcggcgtctatctggccacccgcctgcacctggccgatccgctgtcgctgattgccggtgcgcgcctgagccgatgggaaaccctcagccggtcctacaacgcggcgggcgcctacaccggcaccagtggtgcctacaaggtgagcgatgaggtcaccccgtacgtgggcctggtctatgagatcaccccgaacgtgtcggcctatgccagctacaccgagatcttcaatccgcagaactacaaggaccgcaacgagaacctgctggcgccggtgcagggttcgaacttggaagcgggcatcaagacgcagtggttcgagggccgcctgaccgccaatgcggcggtgttcgaagccaagcaggacaactacgcggtgcgtgacatgggggtgccggaaggcacgctgagcgacggcagctcggcctacatcggcgtcaacggcaccaaggcgcgcggctgggagatggacgtcaacggcgagatcctgccgggctggacggtcaatgccggctacacccacgtcaaggtgacccgcgcggccaccgacctgctgtacgccaatccgcccaaggacctgctgcagctcaacacccagttgcagctgcgcggcgcgctcgagcgcctgagcatcggcggtggcctgcagtggcagagcagagtgcagggctacaacatcgcctacccgctcggcggcacggtgacggtgaaccagccggcgtacaccctggtgcagttcaacgccaactaccgcatcagcgacaactggaccgcgacgctgagcgtgcgcaacgcgctggacaagacctactgggccaacctggactacaacaactacggcgagccgcgcttcgtgtcggccagcctgcgctggaagttctga

SEQ ID NO: 501122 - DNA, 498 bp, Stenotrophomonas maltophilia
atgaagacccctgccattgacgccggccgccttgcccgggcgacgttcctcgccgtgctggcggccggcatgctgccggcgcagctgtttggcggcctcttgttcgcgctcgaattcaggcgcacgccgatgcccgcgctcaccggcggtgggctgatgttcgggctgggcgtctgcagcgccatcgcggtgttcctgccgatggcgctgatcctgcagtcccggcggcccttgcgccggatcagcttcgcgcttgtgggggctgcgctgggcgcgctggccatggcggtccatgaatggccgggtgcggtccaggggccgctgctgcagcgcctgcgctatgtggataccttcgatgtgatccgctatgggctgacggtgtcgttggccggggggctgggcctggccgccgggctggccttccatgcggtattccggctgtcactgcagggcggtgccgtccctgccgcgccagcgccgcggggcgagggcgcctga

SEQ ID NO: 501123 - DNA, 450 bp, Stenotrophomonas maltophilia
atgcgcacgcgatccccctcatgcagaagatcctcgccctcaagccttgagtggcgcccctcgcggctgcaggccgccgcccagctggcggtgttgctggccgcgccctggctgctgcgcgcatcggacctgccgccgcggctgctgatccccgccgttttgctggcgtggggcgtgggcctggccgaactggcctggcgccagcgcaggccgcgcgtgcaggtgcttcttccgccgcttcccgagccactgcaggtggccgggcagggcatcgatgcgccgcggctgatcgtgcgcggcccctggctgttgttgctctggcgtgagggcggcaggcgccagcggctgttgttctggcccgatgtgctcgattccgggcagcgacgtgaactgcgactggccgtggccgcacgcagcgtttcccgtcgggcccggtcaatggcaccataa

SEQ ID NO: 501124 - DNA, 300 bp, Stenotrophomonas maltophilia
atggacaacgtgatgggaaccgctctgggtggcatgcgcgcggcccagcagggcatgcaggtggccacgcacaacgtggccaacctggccacccccgatgcgcagcgcctgcagttgcagcgcaatgcggtggcgcagggcggggtggcgacggcggtgaccaccaccgcccccgatccgggcgcccccctgggcgatctgctggcggccaaggccgaagtagtggccttcgccgccaatgccgcggtcatccgccgccaggaccagatgctgggttcgctgctggatcgcaaggtttga

SEQ ID NO: 501125 - DNA, 726 bp, Stenotrophomonas maltophilia
atgagcctttcccgaaccatcctgatcaccggcgcctccagcggcatcggtgccggcatcgcccgcgccctcgcacagccgggcgcgcgcctggtcctcggtgcccgccgcgtggatcgcctgcaggcgcttgccgacgaactgcgccaacagggcgccgaggtgcgggtccacgccctcgacgtgacccagcgcgcgcaggtcgatgccttcgtcgaagccgcgttgctgcatttcggctcgatcgacgtgatcgtcaacaacgccggcgtgatgccactgtccctgatgggctcgctgaaggtggaggaatgggaccggatgatcgacgtgaacatccgtggcgtgctgtacggcatcgctgccgtgctgcccggcatgatcgcccagcgcagcggccagatcatcaacatcgcctctgtcggcgcactgtcggtggtgccgaccgcagcggtctactgcgcgaccaagtatgcggtgcgcgcgatttccgacggcctgcgccaagagcaccgcgaactgcgggtgacctgcatccatcctggcgtggtggaaagcgaactggccgacagcatcaccgatccggctgccgccgagatgatggtcggctaccgcgccattgcgttgcagccggatgcgatcgggcgtgcggtgaggtttgcgatcgagcagccggacgatgtggatgtgaatgagatcgtggtgcggccgacggcgacggtgtaa

SEQ ID NO: 501126 - DNA, 891 bp, Stenotrophomonas maltophilia
atgtccgtcgatctcaacgctttggccgtgttccagcgggtggccgactgtcgcagcttcaccgccgcggcccagcaactcggcgtgactcgatctgcggtcagccagaccctcaccaagctggagcagtcgctgggcgttgccctgctgctgcgcacgacgcgcagcgtcagcctcaccgatgccgggcaggcgctgttggtctcggtcagccctgcgctggcggaactgggcaatgcgctggaggccagcgtgcgccgccaggccgccgtgtccgggcagctgcggcttgccgtgtcctccatcgccgaagcgttcctggcgggcccgctgttggccacgttcgcagcacgctacccggcgctgcagctggacatcaccgtgaccgacgaggcgttcgacatcgtcggcgcgggcttcgacgccggcgtgcgtctaggggaggtcattgcgcaggacatggtcgcggtcccggtgtcggcgcggcagcgccagctggtggtgtgctcgccggactatcgcgatgcgcacgtgctgccgacccacccgcgtgaactgggcgcgcatcgctgcatcggctggcgcagcgcgcccggcagagcgccttatcgctgggaattcgaggagcgcggccgggaattcagtgttgatgtgcagcctgaaatcaccagcaacgacatgggcgtgatgctcaggctggcgctggccggcgcgggcctggccatcggcatggaagagacctggcggccttggctgcagcgcggcgaactggtgccggtgctggaagcatactgtccgcggtttgcgggctttttcctgtattaccccagccgccggcaggccgagccgaagctgcgcgcgctggtggagcacgtgctgtccgaacggtag

SEQ ID NO: 501127 - DNA, 228 bp, Stenotrophomonas maltophilia
atgactatccgtggctttcatcgaaccctgcgcggtttccacgatggctaccatttcgtgctgaccatcaccagcagcgtggatgacgttttcgcgtacacagccgaagtcgacggcatcgctgtcgacttgcgatccgagggcgtgatcaggagcaagggcgacgctatgcagctcggcatggctgcggttgagcgccacgtggcgggccttacccctaagcgctga

SEQ ID NO: 501128 - DNA, 738 bp, Stenotrophomonas maltophilia
atgagcaacgacaacaagaccctggcggacgtgcagcccggtgggagggtgaggctggcaactgtgccgtacgaccgggcacgcgacctgatgaatgacgcatacaacgccgggactcacggcatcggctacagccagcaggccatggagctgcacgatgcgatcattcccgcccagccctcgccgggtggtcaggaggatgacagcgatctgttggcagagctacgtgacgttgaggactacttcgaagacgtagacccaaacccgatccatcttgcaaccgttcgagctgcaatcgaagcactcgccgcccgccagccggtacatgaaaccgacgcctatcagcaagggttccgcgatgggcaggaccgtacctgcaccgttgttgcccggcagtcggcggaacaggaaccggtggcccaccgacttgtcacgggcgacccgaagcgcaagtggatggtcgttcagggcgctccgtccatcggcgtaatccggcaggcgcaggaatacggctgggaggtcgagtgtttctactcgcacaccttcaagcccaccactccgtcgtgggcgaccccgaccgcacaggtcgtgggcctggacgggctccgcgaggtgctggaaagctggaagaacagcgactacccgttctcctacgacggacaatgcgcacagcgagcgctggatgcgtgcgtcgaggaccttcagggctggctcgacagccaggcggtgggcaaatga

SEQ ID NO: 501129 - DNA, 213 bp, Stenotrophomonas maltophilia
atggccaagccggtccagatggacattttcgacgacgacccagcgcgcgaggcagccgcttggcgcgtacaggcggaagagtcgctgaagcacttccagttccccgaatcgatccgtctggaacggcatgcctactacctcggcgtggccgaacaacttgaagccagggcgcgcggcgcgcgctccaccaacagcaaggacatgcaggcatga

SEQ ID NO: 501130 - DNA, 384 bp, Stenotrophomonas maltophilia
atgaccgattcagtcgttgtcgatttccagcacgagccagagttcgccaagaaggagaacggcgaactcccccgagttgaactgatccgcgagcaggttgccgggttcgttgagggctataccaccgccaagggccagcggccaccgcgcatcgtcgtgcaggcttcagacctgaagcactgtgtgcgccggatcctcgcgcgcatgcagaagcctcatcgtgatgaagccaaggcagcatggatgcgggcgcgcaaggctgggtcgaagcagccatggcgcgaagcgaagcccgagccaatcccgggcgccacgctcacctggtgtggcatcccgatcgaaggcgtcggctacagccgccaccgcgccgtcgacaagcactga

SEQ ID NO: 501131 - DNA, 243 bp, Stenotrophomonas maltophilia
atgcgccacctggccctgcccttctactgcgccatcgtcgtcggcctgctgctggcgctgctcgcgcgcgccatctacaccggcgccggctccctcctcccgccctttggtgctggcgttgtcttcttcacctggtgcggcgtgcgcgacctgcggcgcaactggcccgcgttccgcggcgagatgcggcagcgcgcggcagagagagcgcccacaccgctgcccgccgacgacacccactga

SEQ ID NO: 501132 - DNA, 405 bp, Stenotrophomonas maltophilia
atggataagcccacctacagctggtccttcgatgaagagacctaccacggccacttcggatcgatcgaggaggccatgaaagccgcctttgatcgagaattgcgcatcgccgacgccggcgaactgaggccgggcgtgcacatcggcgaatgcgagccgttctatccggctagccacctggacgccgacgcgttcatcgactgggcgcagacgcagatatacgacgaactgggcgaggcgtcagaggacttcctgggctcgatcaccgccgagcaaaagcaggaactgatcaacttcctggccgactggatcggccgcgccgacgccggaagcaactactggaagatcgtcaacagctcgttccaccgcttcgccgactacggcctgcggcaggaggccgagtaa

SEQ ID NO: 501133 - DNA, 177 bp, Stenotrophomonas maltophilia
gtgaacgaccccgacttcttcgacgccatggccgtcggcatcccgcccatcaccccgccaacccgtatcggcctcgacctggccgccggcaccgacacaaccgtcgtggccgaggtcgcggccgacggaacgatcaccccaatgaccaccctcccgaaggaacagagcaatggataa

SEQ ID NO: 501134 - DNA, 237 bp, Stenotrophomonas maltophilia
atggccgccttcaccagcaccagccgcggcgcagcccgcgtcgaatcccggccccacgccggcaccgttgtcgtccaggtcggaggctccgcactgctcagcctgacctcggccgaggcccgcgagctagccgaacaccttgccgtctgcgccgacgccatcgacgaaggcgcgaccgaagtcgccaccatcgcccgctccaagccgctggcgctccagcaggcggtggccgcatga

SEQ ID NO: 501135 - DNA, 405 bp, Stenotrophomonas maltophilia
atgaagaggaacattgctgcggcactgctggccgcaacgctcgttggatgcgcgaccaccggccagagttcggctgctctaaagcaggagttccagagcgggatccagtcctgcgaggggcaggcgcagtgcgacgcagcctgggaagcggctcaagtgtgggtagctcagaacagccgccttaagattcagactgccaccaacgttctcatcgaaacttatggcagtgggcagtacgatcccacacttgcaatgcgtgtcctcaaagaaccgcaaggcgctggcaagtatcgaattgtcttcagtggcggctgcaacaacatgttcggctgtcagcccaacgtgttcgacgcaggggtcaggttcaacgaagcgatcaaagctgcagtgcagtcatcgcagtaa

SEQ ID NO: 501136 - DNA, 444 bp, Stenotrophomonas maltophilia
atgaacatcatcgacgcagcccacaagaccgtgcatgcctatccaggcggtagcgagtctctggcaccgcgcattgccatgtcagcggcggtgctccggaacaaggtcaatccgaacaactccacgcaccacctgacgctggtcgaagccagcgaggtgatgggcgtgaccggcgactaccgaatcctgcacgccttggccggcgagcacggctacacgctgagcaagatggaaggcaggaccagcggcagcctgatcggcgcgctgcttgctgccgccggcgccaagggcgacctggccgaggccatcgccgaagcgatggctgatcagcggatcacgccgaacgagtccagcaccatcgcgcagcactgctcgcgcttgcaggagatctttgccgagcttgctcggcatgcggcgaacgctgctgcgagggatgcgcaatga

SEQ ID NO: 501137 - DNA, 219 bp, Stenotrophomonas maltophilia
atggacttcaccaactacagcacgcgcagcaggttcgccaaggagatcaacgccggctactcggcgcggctcaacggcctgcgcctgagcgacaacccgcacctggtctggaccgaatgcgagaccgaagacggcgccaaccgcagggcggggccgctgagcgagaaggcggaagcctggcagcacggctggtggctggccgaccagggcgcgcgttga

SEQ ID NO: 501138 - DNA, 291 bp, Stenotrophomonas maltophilia
atgaaagggaaagcgctcctgcagcagttcacgaccgatgagcttcttgaggagcttgtgcgccgacggactcagaagaccaaggacctggagggcgtgcccagctgcgaggactgcaagcacttcaggttctggaccaacacgggggatgcaccgcggtcctacaacccctgcgccaagaagatgcggatgagcttcgatatgccggaagagtgggagggcccacatgctggcatcggctactaccgccgggtgtgcccccatcggtcggcggttgaggccgcgcgctga

SEQ ID NO: 501139 - DNA, 336 bp, Stenotrophomonas maltophilia
gtgaccgccatcgacctgaagccgtgcccgttctgcggctgccacgacattgatcccgaaggctgggccagtaccgacagctcaggccccgcgtgcgacaactgcggcgctggcgcgggaggtgtcagcagcacgctgcaggagaacatcgagcactggaaccgtcgtgccgcgtcgggggccgactggaagcccatcgctgatgctccgcaggacggcacgcggctgatgctgtgggactcggcgagtaagcgggcggtgttcggcagctggcgcggtggcaacccggcgatcacgcactatgcggccgagccggccggcccggaggtggcctga

SEQ ID NO: 501140 - DNA, 141 bp, Stenotrophomonas maltophilia
atggcaaccaagccttttgtggcgggatgggcgctgatcctgatcggagcctgcgggaatggaccgtggtgggcgaacgccgcggttggcctgatcggtgtgcttgttgtcaggtcgtgtagccagaaggagcgcagttga

SEQ ID NO: 501141 - DNA, 273 bp, Stenotrophomonas maltophilia
atggacgccatcgagaagcgggcgcgggagctgctggctcaggctttcggctgtgagccgggggagcttttgccagtcgaggtcagggcagttcgtgcggtccttgcctaccatgccgccctcacgccgccggagggctacgtgctggtgccggcggagctgcccgacatgggcgaagccccggggttcgtagaaggtcactacagccgcagcaactggcgagccgcaatcgctgatttgcaatggctcggcgctcgcccggaggtgccgtga

SEQ ID NO: 501142 - DNA, 708 bp, Stenotrophomonas maltophilia
atgaatccacgagagactatggcgcggctggggccgagcacggtgaagttcgacatcggccggggaggcgggaagcccgacctgacgaaccaggacattgccgcggcgctgggcatggtgccggctgggttgggccgggagctgctggaggcctgctggtggccggacggtgcggcactgcgccgacacaagctacgggacgcggtgatcgcgctggtcacgccggagctgcagcgccagcagcgccggctggctgaggcccggacggatctcggcttggccgaggtgtgcatcggctggggcggcgcggcgacggcggagcagcgggcgaaccgtgacgcagcccagcagcggctgggccggatcaaggctcagtgctggccgatcagcaccctggagtcgctgccgaccctggcggcggcagtgatcagcgagatcgccaagcggccgcactgcgcggcctgcgagggcaggggccaggctatggttggggagctgctggtgccgtgcaaactgtgcggcgggtcggggttgggcccggtcagcgaccggcgtcgggctgccgctatcggacgggaccagtcgacctaccgggcgaagtggcgcggggtctatgagtggctgctgcagaagatgaccgaggcggagcaggaggccgcctgggcgcttatgatcgcgcttgggaaaggagaatcaacggcggcgtaa

SEQ ID NO: 501143 - DNA, 762 bp, Stenotrophomonas maltophilia
atggtctatgcgctgtactgctattccgaacgaatcttcggtgtggcgccgctcaaaatgtatgagctgggcgagatcgtcgcgtcgaaaccagaggcggccttggcggccgccggcactgtcgtggcggtggcctcgatgctcgcattcaagcgggtaaagcgattggatctggagcttgccgctgcggcagacatatcgctggtcttgaaagacggtatggacatgatgacgaggttgcggggattcgcaaccggcgtgtatgaagttcgccagttgcttcttccctttgacccggaatgccaaatggagccggaagaggcgcgccgacggatggacgaaatcacggcgaggtggactgttctgcacgcaaaggtcccacagctgcgaacggaccagtctgaaatgtggcagctcagcagtcggatactggatattgagcggcagcatggcgtagtcatcaaggcaaggatgttggctccttacgccctgagcaaagctcagccactggccctccaaatggcagagaaggctggctttcaccttccagccgaacaggatagcgtcggattttacttggactgcctcgaagtgtacggcggcatttcaatccctgagttcttggaggcagacgaaaaggtatggacaaggtttctggaatggatgggcgcggcatccgccatcgggtcatcgtcgattgcgttaccttccgcggtaactgccgcgaggactgcatggacgatcgcgacgctgcgggattga

SEQ ID NO: 501144 - DNA, 327 bp, Stenotrophomonas maltophilia
atgacgccgaagaagaagggcgcccggctatcgccggtaagtcagctgcagggcgtgctggtggtgttggagagtcagaaggccaagagccccacagccgagctgctgctggccattcgtgagatggtcagcgacgcgcttgcggtgttgcaggagcctgatccgaccaagcagcgcatcgcattcgtgctgctggctgttcagcagtccacccaggtggccatcaaggaagtgcgaggaaagcgcctcacgcgcgtgaccatcatcgaccagcagctctaccactgggcgctggaggaaattcattcactggcaggtgccgcatga

SEQ ID NO: 501145 - DNA, 216 bp, Stenotrophomonas maltophilia
atgaccttcgcgacccgcaacatcggcgccgctcgcgtcggcatcgccgtgctggtgctgttcctgcttgggatggccatggccgccctgatcgcagtggccattccgccggagaacaaggactcgttcggcatgctgatcggcggcttgaacaacgcgaccggcatggtcatcggctacttcttcggcatgacccgcaaggggccgggagcctga

SEQ ID NO: 501146 - DNA, 477 bp, Stenotrophomonas maltophilia
atgaaccggatcgccatctacctttcggtgttcgtcgcctggtctgctggcatgttcggtgcaggctgggcctggcgcggtgaacgggccgagaccgtggacgcccggcagcttgccagcgccagcgccgcgcaggtcgagcagatcacccagacccgtgccgtagatcacagccaggccgaggcgctggccaccatcggagccaagcatgaagaagaccgcaccgcggccacggccgtccctgctgctgttgctgctggtctgcgcgatggcagcctccagctgcgcgacgacctcgccacctgcaacaccgctcgcctgtcccaagccgtcgccggcgccgtcgaacgtgaccaggcagcccaactacgaacagaggtcgcgggcgctcttgttcaaatcggacgcgacgcagacgaccacgtccgcgcctgccaagccgtcattgcagcagaccgtgccgaggtgatgcgatga

SEQ ID NO: 501147 - DNA, 201 bp, Stenotrophomonas maltophilia
atgagcctgcacgaccggctgcgtcggatagaactgcagcaggaagagcagcgccaggccaccgcccggctcgaagagaaggtcgacgccctcttggcggcactggcagctgagggagaggaagggcaggaggagccagcccgcagcctggacggtgaggcggtgcccggcgagcgcgaccagtcgcagagtctcggctga

SEQ ID NO: 501148 - DNA, 1758 bp, Stenotrophomonas maltophilia
atggcgacacggaaaagccgagcaacgcgttcgccgcgctcggaaagccccgcgccgctggaaaatgactacgtcgatgtcgcgatcgggtatgcgaaggcggctgcggcagataggggaggcaggttcggccggctgatcaagctggcggcaaaacggttcctggacgatctgaagcgcgcaaagaagaagggagcgccgttctccttctcgcgcgatcacgccaatcacgcctgcagctggatcgaactgctcccgcacgtagaaggcaagtgggagacgccggagatccggcttcacccgtcgcacgtctggttcgtggttcagctgttcgggttccgcaagcccgatggaacccgtcgcttcacgtccgcactgttcgcggtcgcgcgcaagaacgcgaagtcgacgctgtcggccgcgatcttgctgtactgcgaatgctgtgaagaggaagagggtgcgcaggtcatttccgcggctaccactggcagccaggcgcgcatcatcttcaacgtggccaagcggatggccgagaagaaagccgatcttcgggaggcctacgggctggagtgctgggccaatgcgatcagccgggtcgagaccggcgcgacgttcaagccgatcaacgcgaaggcatcgacgcaggacggtctgaacccatcccacgtcggtctcgacgagatccatgcgcacaagacccccgatctgctgaacgtgttgcagtcggcggccggtgcgcgccggaatcctctgtggttgttcacgaccacagaggggtacgcgaaccccggcccttggtcggaaattcggcagttcgccacgcagctgctggaaggggtgttcggcgacgccgccgaccacttcttggcgatcttcttcgcagtggacaaggacgacggggatttcgacgagaaggcttggcacaaggccaacccgttgatggacgtaaatccccacctgctggcggcaatcaggaaggaatcgatcgaggcgagggcgatgccttcgaagctcgctgaattccagatcaagcggctgaaccggcctgctgcagcggcaaacggcttcatcctgctgccaaagtggaatgcctgccatggcgtagtcgatctggaggcgctgagggacgtcccatgctggggtggccttgacctggccagtacgcgagaccttgcatcgctgcggctggtctggcgcctagacgacaagatcatcacctggggccgccgctgggtgcccgagttcgcagtggcacagcgcacagagcgcggcacggttccgtatgcaggttgggtggcagccggcttgctggagcaaaccgagggcgaggtcaccgactacgcggtgattgagcaggccattctggatgtccacgcgcgattcaacctgcagtccctggccttcgaccgctggaacgcgaccgagatggtcagccggctcgtggcgtcagaggttccgctggtggagttcatccaaggcacgaagtcctaccaccctgcgatggtcgagctggagcgcgcctacatcggcaagcggcttgtgcacgacggcgaccctgttctggcctggtgcgcggccaacctggtcgctcgcaaagacgtgaacttgaacatggcgccggacaagcgccggtccgccgacaagatcgacgacatcaccgcgctgctgatggccataggcgtatctctcacgagcgaggtgacaggcgggatggacgactggttgagcaacccaattttggcgggatccgcatga

SEQ ID NO: 501149 - DNA, 1284 bp, Stenotrophomonas maltophilia
atgaagatgaagcatcagaccgggtttctgggacgggtccgagcagcggttgatgggtgggttcgttcgttcacgacccgcgacgcagaactctatatcgaccgcgagatggctaatgaggccggcgtagccgtcacagcaaaggcggttctccaagtcgacgcagcctgggcgtgtgtccgcttgatctctgagacgatcgccacattgcccctgtcgatgtatgagaggacgaagaccggaaagcgcgtcgcgagccagcacccgctgcatttcgttgtccacgaccagccgaacatcgactcgactgcggcggtgttctgggaggccatggttgtcgcgatgctgcttcgtggcaacgccttcgctgagaagctctatgccggcgaacgcctgatcggcctgcagttccttgatccggccaggctcaccatcaatcgtgacctgaacggcaacaaggtgtatcgctacctgcgcgccaatggtgctcccaggatcatcgcgccggcgaggatctggcgcattcccgggttcacgctggatggcgagaacggcgtgtccgtgatcgcctacggtgccaaggtgttcggcaacgccatcgctgcagaccgagcagcggctcgcacattccgaaacgggctgctccagacgatctactacaaggtccaggcgttcctgaagcctgagcagcggacggagttcaagaagaacctgatgggttccattgagcgcggtgaaaccccgctgctcgaaggtggaacggaggccggtacgctgggcatcaagccatccgacgcgcagctgttggagtcgcgggcgttctccgtggagtcgatctgccgctggttccgcgtgccgccgtggatggttggccatacggagaagtcgacgagctggggaaccggtatcgagcagcagatgatcggcttcctgaccttcacgctggggccgtggctgcggcgcatagagcaggccatcagcaaggacctgctgacgccgggcgagcgcctgcgctactaccctaagttcaccgtggaaggccttctgcgcgcggacagcgccggacgcgctgcgttctacggggtgatggtggacaagggcattctgacccgtgatgaagtgcgcgagttggaagacagggagccgatgggcggtaatgccgccgtgctcaccgtgcaaaccgcgatgaccacgctggattccatcggcgctggttcagatgctgaccaggcccgggccgctatccgcgcgttcctgggcttctccgaagacaagaaggactga

SEQ ID NO: 501150 - DNA, 864 bp, Stenotrophomonas maltophilia
atgacgatcaagacgctgccgggtgtaccggagggacgcccctgcgccgctgtcagcagccagatccagccgcgcgcccttgaccgctgggaggctggcgtcagggcggcttccgacaccgatgcggagcggtccatcagcatctatgacgtgatcggctacgactactggacgggcgaaggcgtgaccgccaagcgcatcgcggcatccctgcgtgggatggggaaaggaccggtcacggtcaacatcaacagccccggcggcgacatgttcgagggcctggccatctacaacctgctgcgcgagcacgacggcgaggtcactgtgaaggtgttgggcttggctgcatcggctgcgtccgtcatcgccatggccggtgacacggtccagatcgcgcgcgccggattcttgatgatccacaacgcttgggtcgttgccgtgggaaatcgccacgacctggccgacgttgctgcgacgctcaagccattcgacgacgcgatggccagcatctacgccgcgcgcaccggtgccgagcagaaggccatgtcaaagctgatggatgccgagacttggatcggcggtgcctccgcagttgaggacggctttgcagatgagctactggcctccgatcaggtggagaagggcgcaagcaaggagaacgcctcagcggtgcgccgcgtggaggccggcttgcgtgctacaggcatgccgaagtcagaagcgatgcgcttgatcagcgaaatcaagtccagtcggggcgatcccactggcagcggtgagggcgatcccaccgatagcggccgaaaggccatccgggtgcaggcagatccgctgccgcgtctttctttcaatctcccgcaatag

SEQ ID NO: 501151 - DNA, 1404 bp, Stenotrophomonas maltophilia
atgaagtccatgaaactctccgcgacgttctacctggtcgtcctcgctatcgcagcggcgattcccctggcggttggcgcattcgcaaaggtcggcccgtccgtccttgccatgagcctgctcggcagtgcaggcgtagtcgccctggcggcgatgttgatcaagcccagcgacaccccccagttccgccgccatgcccagttcggcgacgtgggcgaggacgtcgagaagcagtacaagcaggtcagtgccgacctgaagaccgtaggcgaccagctgaagtcctacgccgaggtggccgcaaagaacactgagctgtctgctgaaacccgggcaaaagtcgatgaagccctcatgaagcagggcgagctgcaggccaacctccaggctgccgagcagcggctggccaagatcgaggccaacggcgcgggcggcgacgtgcagcaccagtcgttcggccagcaattcgtcaacagcgacgagttccaggcatttgccagcaagaccaccccgcgtggtcgcgtcgacatgacgttcagtgctgcgatcacctcggtcacgaccgacaccgacggcgcggccggcgacctggtcacccccacccgtctgccgggtgtcatcgcgccgccggaccgccgcctgactgtccgcgacctgatcacgccgggccgaatggacggcaacacgctggagtacgtgaaggaaactggcttcaccaacaatgccgcaccggtggccgagggtgcgaagaagcccgagtccagcctgaagttcgacctggtgagcaccactgccaaggtggtcgcgcactacatgaaggcatcgcgccagatcctcagcgatgcctcgcagctcgccagctacatcgatggccgcctgcgctacggtctggcgttcaaggaagagcagcagcttctcaatggtgacggcaccggccagaacctgctgggcatcatcccgcaggcgacggcttacgctgcaccgttcgagccggccgatgccacggtaatcgacaagatccgcctggccatgctgcaggcgcagctggctgagttcccggccagcggcatcgtgctcaacccgatcgactgggcacgtgtcgagctcctgaaggacaccacgggccgctacatcatcggcaatccgcagggtgtcatcggcgccacgctgtggaacctgccggtcgttgcaacccaggcgatcgccgaggacaagttcctcactggcgcattcaagctgggggcgcagctgttcgatcgctggcaggcacgtgtcgaggtggccaccgagaacgaagacgacttcgtcaagaacctggtgaccatcctggccgaagagcgcctggcgctggcggtctaccggccgcaggccttcatctacggcgacctgggcaacgtcgcctaa

SEQ ID NO: 501152 - DNA, 243 bp, Stenotrophomonas maltophilia
atgctgatcaagttcaaagagccggatccgcgcgccggcaccaccgttcgaatggacagcagccgcgggcagtacttcatcgacaccggagccgccgacgccgtgagcgaacagcccccggcagagctgccggagccggtgacggaagaaacaactgtcactgaagccgctgcggaggccgccgacgccgtgagcgaacagccagctggcaagaaggcacggcaaggcaaggccagggcctga

SEQ ID NO: 501153 - DNA, 345 bp, Stenotrophomonas maltophilia
atggagctgatcaccctggaacaggcccgagcacattgccgtgtcgatacggacgatgacgcgctgttggagctttacgggaccgcgtcagaaggggctgctcagcagtttctcaatcgccgtgtgttcaaagacactgaatccatggccgccgcagtcctggatggtacggcgggcgtcgatcctatgctggccaacgactcaatcagggcggcaatcctcctgatgttggggcacctgtaccgcacgcgtgaggacgtgcagggcagcgacggcgcgacggtccaagtcccgatgggcgcccatagcctgctatggccttatcgaatcggcctcggggtctga

SEQ ID NO: 501154 - DNA, 489 bp, Stenotrophomonas maltophilia
atgaaggtcgagttcaacatcaccggaatacccgggatcatccggacgctgagcagcctaccggccgaggtcgtgagcaagaagggtgggccggtgaagctggcgctggccaagggggcgcgcttcctgcgcgacaaggagcgccagaacctgcaggcggtgctcgaaccgggcgatgagtccaccggcctgttggcgcagaacatcatcgcgacgcgcggaaaggcgcccagcgacggcagcggcgagcgctacctggtccggatcaagcgcaggatgtacccgggccgcaagggggagcaggtcagcaccctgaagtcggcgcagctgaaggagtacgggtctgtgcaccagcccgctcgctctttcatccgtcgaacggtgaacgagcgtggcgaggaaacgatcaaccttgtggtcggagacctgaccgtgcggattgatcgcctggtgaccaagctggcccagcagaaccggggaggccgctga

SEQ ID NO: 501155 - DNA, 363 bp, Stenotrophomonas maltophilia
atgttcccgaaggtgttccggaccatacacacgccggctgtcgaggcgatcgtcggtgaccgaatcggccggcacgggttcgtcaaacagacggagaagaggccctacatcacttggcagatcatttctggtcagcccttcgacaatctcagcagcgcgccaaccggtgatttcacaacggtgcagatcgactgctactgcggtggcgataacgccgacggtcaagtggaggcgttggcaaccgccgtgagggctgcactggacgcggtcctgatctgcaatcgactggtggtcaacaaccgcgaccctgaaaccgggcttttccgggtcggcatggaggccgacttcatcgaccagcgctga

SEQ ID NO: 501156 - DNA, 504 bp, Stenotrophomonas maltophilia
atgaccgagggcgtcatcaaaacccaggggtccgagctcttcaccgtggacaagctgagttccagcgtcgcctcggtcctgaagttcgagtgcccgactggcatcaccggcctgggcggcgctgccgaccagatcgaatccacctgcctgagcactgtcggtgacaaggagttcgagggcggcctgggcaatccggggcaggtcagcatcccgttcaacttcatcccccgcagccagtcgcaccagatcctgttcgaactgaaggagtcgcgggaggtcgtggattggttgatcggcctgagcgacggcgtggcggttccttcgctcgactccaacgacgacctggtcgcgccggcgtcgcccctccggacctcgatcggcttccgcggctacgtcgctgatctgaacatcgacatcgccaccaacgagatcgtgcgcggcacgctgacgatccagcgcagcggcagcgtcgtcccccactggaacgggccgtactcggcctga

SEQ ID NO: 501157 - DNA, 357 bp, Stenotrophomonas maltophilia
atggacaagagcaagatcctgacgagcaatgcccccgtcgcgcgcgaggtgaagttcagcgacggcacgaccgaaaccgtgcacttccgccaggtcagcgccggccagatgcgccgttggcgcgcggcggaagcctccggcaacgaagacgaaacctgctttgcaatgcagcgcctggtggcggccagcctgtgcgacgccgatgggaagctggtgctgagcgaggccgagtcgcagaacctgaccgcaaacggcctcaccgacctgttcccgcacgtcatggctgtggccgggatcggtgaagacgcaaaaaagtcatcgccgagcgtggacgcgagtacttcagctgcatcctag

SEQ ID NO: 501158 - DNA, 2175 bp, Stenotrophomonas maltophilia
atggcaactgccggctccatcgtcatcgacttgttgatgaaaaccgggtcgttcgtgacggacacccagcgggccgagaagtccatgaagtcgatggagcggaccgcggccggtgtaagcaagggaatcgtggccggattcactgccatcggcagcgtgatcggtggagccatcgctgcattcgcgagcgtggacgcagcgatcaccggcctgagcaatgcgatcaatgctgccgatcgcatcgacgaactgtcggccaggttcagcatctcgacggagacgctgtcggggtggggctacgccgccaagatgactggatcggacctggaaggtctggtcggcatcattcctaagttcagcaagaacatcgcggatgcctcgaaggctggcagcgacgcggacaagacgttcaaggcgcttgggatctcggtcaaggaccaggccggtaaccttcggagcttcgaggaccttctgcccgaggtgcagaatcggttcgctggcatcagcaacgaaaccacgaagaccgcgctggcgatgcagcttttcggcaagtcgggcgcggaattcctggagttcctcagtctcggtgccgacggcatgcggaccatggaggaacgtgcgcgttcgctcggcatcgtcatcgactcggacactgcgggggctgcggccgagttcaacgatcgcctggacgacctgcgcgccgcaacgcagggttggttcacccagctggccagcgagctgttgcccacgctgactgacttgaccacgcagctggtggacgttgccaaggagggcggcggtgtccgggatgtcgctcacgggatcgcctcggcgttccgcgagatcggcaaggcggctgagatcttcggggtggtcgaggactggctggatcgcctgcggggcggtctggtggcggtggagaagcagggcaacgcggtcatcaagctggccaccggccagtacagcggcctgttcggatcgcagggaggcggatgggacgccttcgccaaggactacatggccggcaccgcctatgccgacaaggggtgggctgccatgcagggtggcggagccggcatccccgagggggcaaggagcggcccccgggggcgacgcacccaagccacggcggaagagatccaggccaccaaggaccagaccgagcaactgcgccgggcagcagagtgggaagcaaagctccaggccacttgggcggagggtgagaagaagaagtcggcggctgcgacgcagcaggacaagcaggccaagaagctgcaggactcctatcggtccaccaacgaacagttggagcggcagatcgccctgttcggcgacagctcggagctgagccgggtcaactacgagatccagtccggcggcctgaagggtatcgacgcggcagcgcagtctgcactccgttccagtgcctcgctgctggacatgctcggcaacatcgacgaggccgaatcgatcatgggcgagagcgcccagaagttcgccgacgccttcgacggaatgttcggtatcgacgacgacaccagctcgtcggtggagcagaccttcgggcagtggagcacctacgccgaccaggccgcgcggaatatgcaggatgccttcgcggacttcctgttcgacccgttctccgaaggcttgggcgggatggttcaaagcttcgccaagacgctgcagaagatggctgcccaggcggcagcttcgcagatcttccagatgatcggcagctgggccagcagctacagcgggacggggtcgagctggatcaacgcggtcggtagcgcgatcggtgggatggccggcggccgtgccggcggagggcctgttgccgccggcagcatgtaccgcgtgggcgagggcggccggcctgaactgttcgatcagggcgggaagacctacctgatccccggtgacgccggttcggttcgtccgattaccgcaggcatgcccgcatccgccattggaggcggtggcgggatcaccaacaacttcaacaccacgatgaacatctcgtccgatggcaccagcaccacccaacagggcgatggcagcgaggacgctcgccggctcaatcagttcttcgcttccaagatgaacgagtgggccacccaacagtcgcggccaggcggcctcttccatcagatgagggtgagcaatggctga

SEQ ID NO: 501159 - DNA, 618 bp, Stenotrophomonas maltophilia
atggcaaagcagattatcgacaccacaacggatcacgggacatacaagggcgaccctgcggtaacggcgttcaataaggcgaacgacaacttcaacgagctgtatacactcatgggcggagcggtggttggaaactacagccaaaggccggctgccggcgactctcacggccgtctgtatttttcgttggacacgcaggagctcttcactcccgtaggcgatgtgtggctgcttttgccttgcggcggggtagagttgggctatgcacaacggacaactccttcccagtacacgacaaacgtgtatgcggatataactggcgtgtcgttcacctacgtcgccggggagcggtccggagaggcaaaggttcggttcaccggcaaagtgagttccggcactgcggtagtggcgctcttcttggatgatgtgatttaccagcagattctggtttccaacactggttatcagactatctacagctcccatcgactgccgccgagggagcccggcacatctgtcaacgtaaagctccgggcgatgcactccgacccggggcagacgttcgacatattcggtgctgacgttgatcctgtcgcactcaccgtggtgaatcgctga

SEQ ID NO: 501160 - DNA, 558 bp, Stenotrophomonas maltophilia
atggcggcggcgagctacggcgccccaatgatcagcggcgacatggcaggcaacgccacgtggggcaatgatgcggtgattctgcgggtgcatgcggctgctggtttcatcatgggattgccggacacgactgatggcaaggtgaatctcatggctcagagtatgggagcgctcggtgccctcgcttgggcggctcagaacatgggattggtagcgaaagtcgttctgatcatcccagtgatcaacctgactgacgtgcgcaacaacagcggatatcagggtcaaatcgacagcgcgtatggcggtacatatagcgaggcggcgaacggcgccgcgcacaacccgttgacgattgcggcaacaggtgccttcgccagtattccaatgcagatctggtacggcacttcggacactctttgcaagcctgagttcgcggtgcagttcgcatccttctgcccgctggcggagatgcggccgctcgacggcggacataccgaagagatccaaacgcagatcgacccagccgaaattcgtcgcttccttgggtatccggtatga

SEQ ID NO: 501161 - DNA, 600 bp, Stenotrophomonas maltophilia
atgtctgagcgcctgcgcaccatccgcctgtacggtcagttgggcagccgcttcggccgttccttccggctggccgtgaacagccccgccgaggccgtgcgcgcgctgtgtgcggtcctgccgggcttcgagcgctatctccatggcgcccagcggaatggcacggcctttgctgtcttcatcggcaagcagaacctctccaaggagcagctacaggacccaccgggaaatgaagacatccgcatagcgccggtgctgcttggtagcaagcgaggcggtgtgctgcagaccatcctcggggttgtcctgatcgtcgtcggcatctacgggaacattgctggtggctggggacagccgttcatcaatgccggcgtgggcatggtcattggcggcgttgcccagatgctggggcctcagcctaaaggccttggctcccaagacagtgccgagaaccgaccgaactacagcatgaacggcaccgtcaatacccaagcgcagtgcaatcctgtgccggtcgcctacggcggccacgaccagaagggcatgctggtgggctcggcagtgattagcggcggcatcatggcggaggaccagctttga

SEQ ID NO: 501162 - DNA, 390 bp, Stenotrophomonas maltophilia
atggtcgacattgggctgagggttcggagcgagagcgggtacgtggagacctcggtcaccacaaagctgtcgaagatgatcgggtcgtacacgttcccgctctacaacccggtcaactccaacaacaagtggatcgcgccgcccgaggcaaacggggggctcatcgtcaatgacttttccggcggtgagcccttctactacttcacctgcgagcgccaacgatcggtgtacgggatgctagtcccatcggtgaccatctcggggaacagcatcaactggaactgggaccctgacgtggtgaacttccacgtcaggatggaaatgttcccgagcaagcccacgacggacaccgtcggcggcatcaccctccactacgggatctacagttga

SEQ ID NO: 501163 - DNA, 744 bp, Stenotrophomonas maltophilia
atggccgtcggactgcgcgtgcggaaccagggaaccgggcagatccagatcggcctcggctatcgaaacttgcagctggccaagtccgggacgttggacacagggagcttctcaggtggcgcgacagctggttcaccgccattcgcaagctggtctccgcgtgggttgctggcgtcaactgcaggaacaacgaacctgcatgttatccgctacatcaatgacagtgtcgcgtacatcaccgggttctctatcgtccagtctggtgtgacttgttccgtgtttgcagccagcaatgctccgaacaagaccttggagttttacacgttcgacgctaccgagcgcgccgcgtcagggccggttgggctccgcatgtggggggaggacggatcggtgttctatgactcgcggcggaaggggttgcgcgtgctgcaggttgtgccgcttccgccgccgccggtcaacactccattcgttgaggttggccagttcttccctgggaccaggattggtatcgctattccctccccaagattctattactcgtcggtgtcccaagaccggtgcacggcctcggctgacgctttccacatgacgagcgacaacagaatcttcatgtcaaagcatgagacgttttcgcagattctcatcacgaacacctttccggtcggcggcgtaacgatggggccgcagaacgccacgatcttcatcgtggacctgaccgaagtgcctttgggcttcggctga

SEQ ID NO: 501164 - DNA, 618 bp, Stenotrophomonas maltophilia
atggctgaggtggttcgtgatctgaaaattacttggccgaagaaccagaccatcaatatcgtcgccttcggtcacagcgttccggctggttatgcagtgactcccgaggtgcgcaagaaggacgcctaccctaggctgctcgaagatgccctagccgatcgatatccgcatgcggtgttgaatgtcatcacctccggggtaggaggggagaattcaacgcagggcctggctcgatttcagcgggatgtactagatcaccacccgcgcgtggtgctcatcgatttcgcgctgaatgaccggccgctgggtgttgaggtggccaaaggcaatctgaccaagatcgtcgatggcgcgcgctctgctggggcatgcccagtactgctgacgccgacatgggatgagaaggcatctccgaatcggcccggtgacgcgctgggcgagcaggccgccatgattcgtgggttggcgaacgagctggacgtgccgttggtagacagccttgccgctttcgatgcctacaaaggggatcggcacattttgatggcgcagttcaaccatccgaacagggaggggcacaagatcgtgctttcgcagatcatgcccctgtttgagaagtaa

SEQ ID NO: 501165 - DNA, 906 bp, Stenotrophomonas maltophilia
atggacgcacagaaccgctatcgtggcgcgctactaggcttggctgccggtgacgccgttggcaccacactggagttcaagccgcgcggtcgattcgagccgcttaccgacatggtgggcggcggtccatttaacctcgaggcagggcagtggacggatgacacctccatggctctatgcctagctgagagcctagtccgctgcgaggacttcgacgctcgggaccagatgaaccgatacgcgaactggtatcagcatggctattggagctcgacgggctcctgcttcgatattggcgtggccacgcgccgggctattgaaagctacctggtgacaggggacccgctttccggcagccgacacccgaaaagcgccggcaatggctcgataatgcgcttggcgcccgtggtgcttaggtatgccggcatgcccaagctgcaggccatggcggcactcagctctcgtaccacacacgcagcggtggagtgtctggacgcctgtcgcatcctcgccgtcgcgatagagcgtgctcttacagggcgcagcaaatccgagatattggatcttgcctctatcgacgtcgccactgctcggctgcgcgatgtcgcctgcggcggttatctggatgccacacgggaccagatccacggcaccggctacgtcgtagagagtctggaagctgctctgtggtgcttcaaccggcatgacaccttcgacggtgcggttctcgaggctgccaaccttggtgacgacgcggatactaccgccgctatcgtcgggcagttggccggtgccttctacggggaaactggcattcccacctcatggctcgaccgccttcaccgtggcgacgagatctccgcattggccgatagcctgatgcagcgcaacctcgcccaggcatag

SEQ ID NO: 501166 - DNA, 1209 bp, Stenotrophomonas maltophilia
atgcccccactgaccgatctggccattcgcaaggccaaagcaacggaccgcacccagaagatcttcgatggcggcggtctatacctggagatctcccccaaggacagccgctggtggcggctgaagtaccgcttcgacggaaaggaaaagcggctcgccctgggcgtctatccggacgtgcccctggctctcgcccggcagcggcgagacgacgcgcggcagctgctggcgcgcggggtagacccgtccgagcacaagaaagcggcggccgtggctaaggcggagctgggcgccaacacgttcgaggtcatcgcacgggaatggctggccaagcgcgattgggtgccgaagtaccgcatcaaggtcgaagcatggttcaacaatgacgtgttcccgtggctcgggagccgggcggctgccgagctggaggcaaccgactttctgtccgtcgcccggcgagtcgaggcgcgcggcgcgatcgaatcggcgcataggatcatgcagaattgcagccaggtgatgcggtattccatcgccacgggcagggccaaacgcgaccctgttgccgacctgcgcggcgcattgaccccagcaccggagaatcactacgcggccgtcaccgagcccgtcgagctggcaccactgcttcgagccatgtatggctactccggcacgctgacggttcgcatggccctccgcctcgctcccatgctgtttctgcgccctggtgagctgcggcaggccgagtgggcggaattcgatctcgacgagcgcacatggacgatccccaagggacgcatgaagatgcgccggccacacattgttccgctatcggatcaggctctcgcggtcctggaagaaatcaagccgctcaccggacgtgggaaatatgtgttcccttcggcccgctccaaagcacgcccgatgtcggaaaacgccgtgactgcagctctgcgaaggatgggatttgaagccggaacggtgactgggcacggcttccgcgcgactgcgcgcacaatcctggacgaagtcctgaagtttcgtcccgacatcatcgagcaccagctggcccatgaagtgaaggatctgaacggacgcgcctacaaccgcacgacgcacctggatgaacgcatccggatgatgcaagagtgggcggactacctggaccggctgcgcgatgggaatgtggtacagctgcgggttgcctga

SEQ ID NO: 501167 - DNA, 1281 bp, Stenotrophomonas maltophilia
atgacccgtttgcgccagctcactgccaccgtcctgctcgccctgtccggcgcggccggcgcctcgcccactgcgcactgggtcgccagctggcaggccagcccgcaaccggtctggcgcgcggatttcctgttcccgacgctggttccgaccacgctgcacgaccagaccttccgccagaccgcgcgcatcagcctgggcggtgcacggctgcgggtgcgcctgagcaatgcctacggtacgcagccgctgcggatcggcgccgccagcgtctccgcacgcatggacggcgcccctcggccactcagcttcgatggccaacccggcgtgctgatcggccccggccaggagcggctgagcgacccgctggcgcttgccaccgacgaccgccaggcactgcaggtcagtgtcttcgtgccggggccggcagcggtccagacgttccattgggacggtcgccagacgagctggatcgccgctggcgaccagagccgggcccagtcgctgcgcgctgccagcagcaccaccgcgcgcctgctcctggccggtatcgaggtcgaggccaacgccagcgcgcgcagcgtggtggtgatcggcgactcgatcaccgatggcgccacggccagcctcgaccaggaccagcgctggaccgaccacctggccgcgcggctggccccgcgcggggtggcggtggtcaatgcgggcatttccggcaatcggctgctgagcgacggcatgggtgagtccgccctggcccgcttccagcgcgatgcactggatcaacccggggtagccagcgtcatcgtgctgatcggcatcaacgacatcagctggcccggcaccgcgttcgcccggggccaggcccgaccgacgctggccgaactgcaggcgggctatcgcaccctggccgaacgtgcgcgccaccggggcgtgcgtatcgtcggcgccacgttgccgccgtttgccggcgccctgcccggcacgccactggacgattactaccatccggacaaggatgccctgcgccagcagctcaacgcctggctgcgctcggacagcccgttcgacgcggtgatcgacctggacgcggcgctgcgcgacccggccgacccgtcgcggatggccgccccctacgactccggcgaccacctccacccgggggatgccggcaaccgggcgatggccgaggcggtggacctggagatcctgctgggttgcaaggggtccgcccccgcggagcgcccggggtcggccccctctcctgaagggaaagggctctga

SEQ ID NO: 501168 - DNA, 879 bp, Stenotrophomonas maltophilia
atgtgcttgcccagccggttgcagctgccgcctggcccctgggccaccctgctggagggcctgtgcgcgcgtttcccgcgcatcacgcgcgcgcaatggcaggatcgcttcgcgcgcggccgcgtgctggacgcgcagggcagggtgcttgcgccggatacgccgtggaaggtaggccttgagatccagtacttccgcgaggtggccgacgagccgtcgattcccttcgccgagaccatcgtgcatctggacgcgcacctgctggtggccgacaagacgcacttcctgccggtgacgccggccggcgcgcatgtgcgcgagaccctgctggcgcgactggtggcccgcaccggcaacaccgatctggtgccgctgcatcggctggatcggctgacggccgggctggtgctgttctcgacccagcgggcgtcgcgcgatgcctaccagcggctgttccgcgagcgacgcatcgaaaaggcctatgaggccctggcgccggcgctgccaggggtcgcgtatccgttgcagcgcgacagccggctggtaccgggcgagcccttcttccgcatggccgaagggcccggcgagcccaacgcacgcagccggatcgagctgatcgaggccgacggcccgatctggcggtaccgcctgctgccgcaaaccggccgcaagcatcagttgcgcgtgcacatggcgatgctgggcgccccgatcgtgggcgacgacctataccctcagcttcgtcaacgccctgcggacgcggccgaggcgccgctgcaactgctggcgcagggcctggccttcgatgacccgttggacggggcgcggcgggtcttcagcagcgagcgccgcctgcgcttgccgcccgagggcggctag

SEQ ID NO: 501169 - DNA, 1512 bp, Stenotrophomonas maltophilia
atgtcccgttgtctgtccgttgttgccctgtccctgcttgccgtgttgccgacgctggcgctggcctaccaggccgagccaccgcgcgcgccgctgcaggtgctccgcgtggatcgctacgccgacgacgccaacgccggctcgctgcgttgggcgatcaccaccgccaatgccgatccgggccgctaccgcatcgagatcgacgccgtcggcgttgcgccctacgtcatcaggccggcctcgccgctgccggaggtcaagggtccggtgcagatcatcggtacgtcctgggcgcgcgacggccagtacatcgccatcgatggctcggcctacgtcaccggcagcggtaccgatgcctgccccggcgccgagccagggcagtccggcaccaatgtgcgcacaaccacgctgccgggcctggtcctgcgggatacccaaggcgtggagctggcaggcctggaaatccgcaatttctgcatcggcgtgctggtcaaccgctccagcctgaacgagatccatgacaaccgcatcgtcgccaacaagggcggtgccggcatcatgctcaccggcgatgacggcaagggccagtccaccgcgaccaccacggtgcacaaccgcatcgtgcgcaatgtgttcctcgacaatggcgatggcctggagctgacccgtggcgcggcctggaacctggtggccgacaacctgttccagtccaccccggccaacccggagccctcgcagggcatcgagatcctgtggggcaacgacaacaccgtggttcacaaccgcttcgtggactactccgacggcctgcagatcaactggggcaaccgcaactacatcgcggccaataccttcaccgggaactcgctgggcctgagcatcaccggcagcggcaacgtggttgacggcaacaccatcaccggcaacggcattggaatcggcgtgcgcccacaaccggtcagtgcgccgaaccgcttcaccgccaaccgcatctacggcaacggcctgccgatcgagcgctgcgaagcgggcggtgcctgcatgaagggccagccgcggggggccatcgtgttcggcgtgccgggtctggaacatgccagcttcgtcggttcacgcggtcgcggcgtcgacagcgatcccgcccggcgcgcgcgcatctgcacggctgccggccaggccgactgccagcccttgccgaacctgggacaggccgcgccgacgtgggtcgacgtgcgcggcgagggcgcgcagcgccagttgagcggtcgtttccacggcgtgcccgacacccgctaccaggtggaagtgttcggcaaccgcgccgccggcggcagcgaggccgaatggatgctgggcagcgtggaagcgcgtaccgacgcgcaggggcagggctgcttcaccttcccgctcgctgcagccgtggatgctgccctggccggcagcgtgaccgccacggtcacctcggcgcagggcgccacctcccccctgagcgcgccgctgtcgctgcgctga

SEQ ID NO: 501170 - DNA, 1290 bp, Stenotrophomonas maltophilia
atgacacgtcccacatccgttgccctgggtatcctggccactgcgctgctgccggcgctggcctgcgcgcaatcgagcaaccgttacgaaggcagcaccctgaccggcgattggggcggcacccgcaccgacctgttcgagcgtggcgtcgccttccgcggcgactacgtaggcgaagccatgggcgtggtcgaaggcggctatggcgaaaccggcgcgcgctacgcgcagcaggtgcgcgtgggcatggacctggacatgggcaggttggccggctggagcggtggggcgttccacttcaccctcaacgaccgtcgcggccgcagtacgtcggccgacctcgtcggcaaccgcttcccgatccaggaagcctacggtggccagtacacccggctgaccgaactgagctacgaccagaccttcaacgccggccagtcgtactacaagctcggctactacgcgatgggcaaccagttcggcctgcacagcctgctgacccatttcgtcaacgccgcgttctgtgcgcacccgttggcgatgtccggcaacagtggctggtacaactacccggtggcgcgctggggcggagagtttgcccagcagatcagcccggcagtgaacgttcgcgccggctggttccaggtcaatccgaacctgggcggcaacatcgaacgcaatgccttccgtccgttcgcctcgggcaccaccggttcgctgttcccggtcgaagtgacctggacgcctgccaagggcagccgctacgccggcgtctacaagttcggcggatactacgacacctcgcgcgtggcccagcgtgggctggacacctcgccgaccaccggtcgccatggtgcgtacctcctggccgagcagcgccttacgcaggagtcggccgacccttcccgtggcctgaccgcgttcgcgcagtacatggtgtcggaccggcagacggcgcagatcaagcgctggtatgcgctgggcggcgtctaccagggcatcggtcggcgcgcgcaggacagcatcgccctgggctacgtgggcgccgacatcaacaaccggctggtcgatgcgcgacgggccgcgttggccgacggtggcgtgcccatcgattcgccgctgtaccacctcagccaggccgaggagctgttcgaactgtcctacagcatccaggtgaatccgtggctgatgatccgcccggacgtgcagtacatcgtcaacccgggcacgttcaactacagcggtaccgacaacgcctgggccgtgggcgtccaggccaaggtgaccttctga

SEQ ID NO: 501171 - DNA, 852 bp, Stenotrophomonas maltophilia
atgaagattccgtttgcctcggtcgtcctcgccggtgcgctgtgcgccgggtccgtaccggccctggccgcgcccccgccggcggtactgcaggtgggttcgctgcgcatcggcgaaggcagcccccgcaccatcgtgccgatcaccggtgccaccgcagacctcgccctgcagcaggcggccgccatcgccgccagcaaggccaccgacatcgccgaatggcgcatcgactacctggacatcgccaacgatggccaggcgctggtggcactgggcaagcggatccagcagacgctggcgggcaagccggtcatcgtgaccttccgtaccaaggccgaaggcggcgcaaggccgatcagcgatgccgactacggcgcgctgtacgccacgctgctgcgtgcaggcgtggcccagctgatcgacgtggagatgttccgcgacccgacggtggtaaaggcgctggtagcgcaggcgcacaaggcaggggtgaaggtggtgatgtccagccatgacttccacgccacgccgccgcgcgaggagatcgtcgcgcggctgcagaagcagcaggcactgggtgcggacgtgctgaagatcgcggtgatgccgcgcgatgccggcgacgtgctggccctgctcgacgccacctggcaggtgcgccagcagagcgacaggccgttgctgaccatgtcgatgggcggcaccggggtggtctcgcggctggccggcgagaccttcgggcaggcgctgaccttcggcatgatcggcaccgcctcggcgcctggccaggtcgaggttgatcgcctgcaggacgttctgcaggtcatccacgcctccagccaggccggtcactga

SEQ ID NO: 501172 - DNA, 1320 bp, Stenotrophomonas maltophilia
atgagccatgcccccaccgctgcaccctcgctcatcctggaacggatgagtcctttccagtggaccgccatcgccatctgcgtgctgttgaacatgctcgatggcttcgatgtgatggtcatggccttcaccgcgccacatgtgtcggcgggctgggcgctgtcgggcaaggtgttggggctgatgctcagtgccggactggtcggcatggcgctgggatcgttcctgttggcgccgctggccgaccgctggggccggcggccgatgatcatctgctgcctgctgatcctgaccagcggcatggtgctgtcggcgctggcggccaatgcgtggcagctgggcgcgctgcgcgtgtacaccggcatcggcatcggcggcatgctggccggcgttggcgtgatcaccgccgaatatgccaacgccaagtggcgcagcacggcggtcgcattgcaggccaccggctatccgatcggggccaccgccggtggcctgctggcggcgtggatgctggagcactggtcctggcacagcgtgttcctgatcggtgctgcggcatcgctgctgtgcattccgctggtgctcacgtgcctgcccgaatcgctggacttcctggttgcgcgtcgcccgcccaacgcgctgccgcggctgaatgcactgcgcgcgcgcatgcgcatgccggaactgccggccctgccgcctgccgccgtgcgtacggggcagcggcagggctatgcggcgctgttcgtgggtgatctgcgccgggtcgcgctgctgatcgcactggccttcttcctgcacatgttcgcattctatttcgtgctgagctggaccccgaaactgctggtctcggccggggtgtcggcacagcagggcatcaccggtggcgtgctgctgaacctgggcggcatcgtcggcggcagcctgttcggctggctcgcttcgcgctggtcgctgtcgaagttgaccgcaggcgcgctgctgctggccatggtgtcgatgctgggcttcgctgccttcaacacgcggctgggcgtggccttcccgttggcctttgtgatcggcgcggcgctgttcgcggcgatggctggcctgtatgcggccgcgccggtggtgttcgccgccgacgtgcggacgaccggcctgggctgggcgatcggcatcggccgcgtcggcgcgattctctcgccgctgaccgtaggcgtgctggtcgaccgccactggcagcctgcggcgctgtatgtgctgtgcgcgctgccactgctgctcgcggcctgggcgtgcctgggcctgcgcgtaggcgtgggacagaaaaggcgctga

SEQ ID NO: 501173 - DNA, 681 bp, Stenotrophomonas maltophilia
gtgatcgacaagaccctggccagcgtggaagcagcggtggccgatatccatgatggcgccacggtgatgatcggtggcttcggtaccgccggcatgcccgacgcgctgatcgatgcgttgatcacgcagggcgcgcgcgaactgacgatcatcaacaacaacgctggcaatggcgataccgggctggcggcgttgatcaagcacaagcgcgtgcgccgcatcgtctgctcgttcccgcgccaggcggactcgcagcacttcgacgccgcttaccgcgccggcgagatcgaactggaactggtgccgcagggcaacctggccgcgcgcatccacgccgccggttccggcctgggcgcgatcttcacccccaccggctatggcaccgagctggcccagggcaaggagacgcgcgagatcgatggccgccagtacgtgctggaatacccgctgcacgcggacttcgcgctgatcaaggccgaccgcggtgaccgttggggcaacctggtgtatcgcaagacggcgcgcaacttcggcccgctgatggcgatggccgcacgctgcgccatcgcgcaggtgcgtgatgtggtggcgctgggcgaactggacccggaggcggtggtgacccccggcatcttcgtgcagcgcgtggtgcaggttgcagccgaaggagtgcaggcatga

SEQ ID NO: 501174 - DNA, 648 bp, Stenotrophomonas maltophilia
atgaacaggctcagccgcgaacagatggccgcgcgcgtggcgcgtgacattcccgaaggtgcctacgtcaacctgggcatcggcctgccgaccacggtggccaacttcctgccggccgacaaggagatcttcctgcagtcggagaatggcctgctgggcatggggccggcgccggccccgggccacgaagatccggacctgatcaacgccggcaagcagccggtcaccctgctgaccgggggctgctatttccaccatgccgactcgttcgcgatgatgcgcggtggtcacctggacatctgcgtcctcggtgccttccaggtgtcggcacacggcgatctggccaactggagtaccggtgctgccgacgcgatccccgccgtgggcggtgccatggacctggccatcggtgccaagcaggtcttcgtgatgatggatctgttcaccaagcacggtgaaagcaagctggtgtccgaatgcagttacccgctgaccgggctgcgctgcgtgtcgcgggtgtataccgatgtggcggtgttcgacatcggtaccgatggcgcgaccgtgctggaaatggtggacggcatggacatcgaacagttgcgtgaactgactggcctgccgctggcactggccgagggagcctga

SEQ ID NO: 501175 - DNA, 1215 bp, Stenotrophomonas maltophilia
atgagcctgcacgaaacctacatcgttgatggcatccgcaccccgatcggtcgttacggcggcgcgctgtccggcgtgcgtgccgacgacctcgcggcgatggcgctgaaggcactgctggcacgccatccgcagctggacccggcgctggtcgaggatgtctatctgggctgcgccaaccaggccggtgaagacaatcgcaacgtcgcccgcatgagcctgctgctggccggcctgccggtgacggtaccgggcagcacggtcaaccggctgtgcggttcggggctggatgcgatcggcaccgtggcccgtggcatcgccgcaggcgaactcggcctggccatcgctggcggtgtcgaatcaatgtcgcgcgctccgttcgtgatgggcaaggcgacctccccattcgcccgtgaccagcagatggaagacaccaccatgggctggcgtttcatcaatccgcgcctgcgcgaactgcatggcgtggagactatgggccagaccgccgagaacgtggccgagcggcagggcatcagccgcgaggaccaggatgcgttcgccctgcggagccagcagcggacagcggccgcgcaggcgcgaggcttcttcgacggcgagatcgtggcggtggacgtgccggggcgcaagcgcggcgaaaccgtgaccgtcgaccgcgatgagcacccgcgcggcgataccacgatggaagcgctggccaggcttaaaccgctgttccgtcagccgggcacggtcaccgccggcaacgcttcgggcatcaacgacggcgccgccgcactgctgctggcgtccggtgcgcaggtgaaggcgctgggcctgtccccgcgcgcacgcgtcctcggctttgccagcgccggcgtggagccggccatcatgggcatgggcccggtgccggccagccgcaagctgatggcccgcctgggcctgtccatcaccgatttcgatgccatcgaactgaacgaagcatttgcctcgcagggccttgcctgcatgcgcgagctgggcctggccgatgatgccgcgcacgtgaaccccaatggcggtgccatcgccctgggtcatccgctgggcatgagcggtgcgcgcctggcgctgaccctgctgcgccagctggaatccagcggtggacggcgcggcctggccacgatgtgcattggcgtggggcagggcgtggccctggcccttgaacgcgtgtga

SEQ ID NO: 501176 - DNA, 711 bp, Stenotrophomonas maltophilia
atgagcgatcccaccgaactgcgcggctaccgcaagccgtatcccggcagccagccgccgcgcatccatctgccctatgcctctactgcgctgcgcgggccgggcaccgacccgatcgccatcccggtgacgctctcggaagtgaccggcccgcgcctggaccggatcaccctcggggcgcatgccgccgacctgaccgcaggcttcgccggccagccccagggcgaacgcatcatcgtcagtggccgcgtgctggacgagaacggccgtccagtgcgcaataccgtggtcgaggtgtggcagtgcaacgccgccggccgctacctgcacaagggcgaccagcatgacgcgccgctggacccgaacttcaagggtaccggccaggtcctgaccgacagcgaaggccgctaccggttcaccaccatcaagccgggtgcgtacccgtggcgcaaccactacaacgcctggcggccggcgcacatccatttctccctgcatggcgatggcatcggccagcgcctggtcacgcagatgtatttccccaacgacccgttgctggcgttcgatccgatctacaactgcgtggacgatgccaatgcgcgcgagcgcatggtgtcctcgttcgattgggaaaacaccgccaacgaattcgcgctgggctaccgcttcgacatcgtgttgcgcggtcgcaagatgaccgtctgggagtaa

SEQ ID NO: 501177 - DNA, 564 bp, Stenotrophomonas maltophilia
atgagtttccaatccactccgtggcagaccgtgggcccgtactaccgcctgggcctggagccgctgtaccgcaccgacatcgccccggctgccgcgcgcggtgagcgcgtggaagtgcagggccaggtgttcgatggcaatggcgtgcccgtgtccgatgcagtactggaaatctggcaggcggatgcgcagggcatctatgcccatcccgaggacccgcgtagtgacgaccacgacccggcgttcgatggctggggccgggtgcccaccgacgagcagggccgcttcgccttcagtaccgtcaagccggggcgcgtgccgggcctgcacggcgcgccgcaggcgccgcatctgatcgtgctggtgttcatgcgcggcctgctgcaggccgcccgtggccgtatctacttcagtgacgaggccagcaacggcgaggacggcatcctggcgctggtgcctgcagagcgccgccacaccctggtcgcgcaggcgcagggcggcggcctgtaccgctgggacgtgcacatgcagggcccgcacgagacggtgttcttttcctattga

SEQ ID NO: 501178 - DNA, 1344 bp, Stenotrophomonas maltophilia
atgagtcactccccaacgctgctgggcggtctgttcggcgaccccgccgtcgacgctgcgttcaccgacgaggcgcgcctgcaggcgatgctggatgttgaacgcgcgctggcccgtgcgcaggtgcgatgcggggtgattcccgctgcggcgctcgccccgatcgaagcagcctgcagcgcggacctgtacccgctgccggcgctgtcggcagcgacagccctggccggcaacccggccattcccctggtgaaggcgctcaccgcgcaggtcgcggcgcgcgacgccgaagccgcgcgctgggtgcactggggcgccaccagccaggacatcatcgataccggcgcgatgctgcagctgcgcgcggccgtcggccacgtgcgggcgcgcctgcaggtcctgtgcaccgcgctggcgcggctggcccaggccgagcgcggtaccgggctgcccgggcgtacgctgctgcagcaggcggtgccggtgacgttcgggctgaaggcggcgggttggctggatgccctgcaacgcagccagcgtcgcctggagggacttgccgacgataccctggtgctgcagttcggcggtgcagccggcacgctggcctcgctgcaatcacgaggactggacgtggccgaagcgctggccgataagctgcagttgccgctgccggcgctgccctggcacacctcgcgcgatcgcatggccgagctcggcagcgtgttcgcgctgctggccggcagcctcggcaagatcgccaccgacatcgtgctgctgatgcagtccgaggtggctgaagcgtttgagccggcgggcgagggcaagggcggatcgtcggcgatgccgcacaagcgcaatcctgtcagctgcgtggcggccatcgccgccgccacgcgtgtgccgggcctgctgtccacgctgttcagcgcgatgccacagccgcatgagcgcgcggcggggcaatggcacgcggagtgggacaccgtgccggaaatcgtgcggctgtgtgccggcagcctggcccaggtgtctgtggtggtacagggcctgcagctggaccgcgtgcgcatgcgccagcacttggacagccatggcggactgctctatgccgaggcggtggcggtcaccctgggcgagcgcatcggcaagcaggccgcgcacgccctggtggaacgcgcggccaagcaggcgctggcacaatcgcagcatctgcgcgaggtgctggggcagatgccggacgtgtccgcgcagctgtctgctgcgcaactggatgccctgttcgctgccgacagctggcgtggcatggccgatacctggatcgaccgcgtgctcgcgcgcggctga

SEQ ID NO: 501179 - DNA, 786 bp, Stenotrophomonas maltophilia
atgcccttcctcgatctcccccagcatcgcctgcactaccggaccgaaggccgagccgacgggccatggctgacgttctgcaattcgctgggcaccgacctgggcatgtggcagccgcaggtcgaggcattggccgcccactaccgcatcctgcgctacgaccgccgcggccacggccagtccagtgcaccgccgggcctgtacacggtggccgaactgggcgcggacgtgctggccctgtgggatcacctgggcatcgagcgcagccacttctgcgggctgtcgatcggtggcctgaccgggcagtggctgggcgtgcacgccggcaaccggctgcgcacgctcaccgtggcggccaccgcggcgaagatcggcacgctggacggctggcaggcccgtatcgtccaggtccagcacgatggactgctgccgctggtcgatggcacccgcgagcgttggttcacggctgcctttgcacagacccacgccagccaggttgaagacattctgcagcgcttcctcgctacccgcgttgccggctatgtgggctgctgcaacgcggtcggcacggccgacttccgggaggcgctggggcgcatcagcgtgccgctgctggccattgccggcgacgaggatccggtgtgcgtccccgccgagctgcaggcgatcgcccacggcgtggcccatggccactatgcgcaggtgcctggccgccacctctgcaacgtggaatcgccgcgggccttcaccgatgcactggccgcgcatctttccgtgcagcactga

SEQ ID NO: 501180 - DNA, 387 bp, Stenotrophomonas maltophilia
atggacgaacaggaacgttacgaagctggccttgcggtacgccgccaggtgctgggcgaggcccatgtggagcgatcgctggaagcccgcaccgacttcaccgccgaattccaggaattcatcacccgcaccgcatggggcacggtatggacgcgcgagggcctgccgcggcacacgcgctcgttgctgaccatcgtgatgatggtggcgctgggccatgacgaggagttcaagctgcacatccgcgcggcccgcaacaacggcgtgacgccggagcagatcaaggaagcgctgctgcaggctgcgatctactgcggtgtgcctgcggccaaccacgccttcgcgctggccaggccgatcctggaagagcaggcttcggaacggtag

SEQ ID NO: 501181 - DNA, 870 bp, Stenotrophomonas maltophilia
atgaaagctgctgccatgcctgccgttcctcccagccgtagcaccaagcgcccccctgcgccaccgcgggatcgcggcctggcccatgagctgatgcagcagatccaggaaaaccagggggacccggatttcatgacctcgctcggccgcggcctggccgtgctgagcgttttctcgcagcatccgcgcgaagtcaccatgtcgcagatcagcagtgacaccggcatctcgcgcgcagcggtgcgacgcgtcctgtacacgctggaaaagctcggctatgtgggtgagcagggacgtggctacgtgctgctgccgcgtgtgctgggcatggggggcgcctacgttgcgtcgtcctcgatgaccgctgcggcgcagccggtactcgatgcgctgcgcgatgacgtgcacgaatcgtgctcgctgggcgtgctcgatggcgatgacatcctgtatgtcgcccgcgcggagacagtgcgcatcatgtccatcggcctgcgtgcgggcagccgcctgcccgcgtattgcacttcgatgggccgggtgctgctggccgcactgccgcgcgacacgctcgagggctacctggagcgcactcccttgcggccgcgcaccgaacgcacggtcacgcgcacggaggacttcctcgacctgctggagaaggtgcgacgcgaaggcgtttcgctggtcgaccaggaactggagatcggcctgcgctcgatcgcggtaccggtgcgttcgcgcagcggcgaagtggtcgccgcgctgaacatcggcacccaggccggccgcattggcctgggcgtgatgcagacccagctgctgccccgcctgcgcgaagccgcgcaacgcctcggcacgctgttgaattga

SEQ ID NO: 501182 - DNA, 2412 bp, Stenotrophomonas maltophilia
gtggacgagacgacgaaggttccggccctgtgccgtgtgctggtggtcctgctcggcatcctggtgacgctgttcggcctggctctgctggtcggcggggttcgcctggtacagctggggggcagttggtatttcctgctgatgggcgcggtgtcggcggtggccggcctgctgctggtgctacgccggccgagcggtgtgctgctgtatggcctggccttcctggccacgctgccgtgggcactggtcgatgcgggctggaatttctggccgctggtatcgcggctggtgatgccggcggtgctggcccttctggtcgcgctggcgtggccggtgctgcgtcgcagccgcggccaggtggccggccgcggcgcctatggcgttgccgccgtgctgctcgtcggcctgctgggcacggcgctgtcggcgttccaaccccgaccgctgcagactgcgcagggtgcgacgccgccggtggtaccggtggccaagggtgccgagcagcgcgactggatgcactggggcaacaccacggcaggtacccgctttgccgcgctggaccagatcaccccggccaatgtgaaggagctgcaggtcgcctggaccgcgcgcaccggtgacgtgccggaaagcaacggcttcggcgccgaagaccagaacacgccgctgcagatcggcgacaccctgtacctgtgcaccccgcacaaccaggtgatcgccatcgatgccgactccggcaagcagcgctgggccttcgaccccaaggccactgcaccgaactggcagcgctgccgcggcctgggctatttcgatgcgaccaccgcgccagccgttgccgcgaccccggcatcgctgccggctcctgccacgaccggcaccggcgcggcgctgtgcgaacagcgcatcctgatgacctccatcgatgcgcgcctgttcgcgctggatgcgaagaccggtgcgctgtgcccggacttcggcagcaacggcgtggttgacctgaagaccggcatgggcgagatcaagccgggcttctacacattgaccgctgcgccgctggtcgccggcgagctgatcgtggtcggcggccgggtggctgacaacattgaagtgggcgagccgtccggtgtggtgcgtgcctacaacgtgcgcagcggcgcgctggcctgggtctgggatctgtcgcgggaaaccccggacgtgccgctggatccgtccatccactacacgcgcgccacgcccaacgtatggacctcgatggcctacgacccgcaactgggcctggtctacctgcccaccggcaataccaccccggaccagtgggcgggcgagcgcacgccgcaggatgacaagtacagctcggccgtggtcgcgctggacgtggccaccggcaaggagcgctgggtctatcagaccgtccaccacgacctgtgggactacgatctgcccgcacagccgaccctagtcgacgtgcccgacggcaagggcggcacgttgccggcactgctgcaggtcaccaaggcgggccagatcttcatgctcaaccggcagacgggcgtaccgatcagcgaagtacgcgacattccggcgccgcagggcaacgccgaaggcgagcgctacgccgccacccagccgctgtcggttggcctgccgcagatcggcgccgaaacgctgaccgagtcggacatgtggggggctaccccgatcgaccagatgctgtgccgcatccagttcaagcagttccgctacgacggcatgtacacgccgccgggcgaggatctggcgctgcagtggccgggctcgctgggaggcatgaactggggcagcgcttcggtcgacccgaccacgggctacctgttcgtcaacgacatgcgcctgggcctgtggacccggctgatcccccgcgcgcagatgaccagcggtgccggcggcgtggaaatgggcgcggcctcgcagaccggtacgccgtacggctcgctgcgcgaccgcttcctgtccaagctgggcattccctgccagaagccgccgttcggcacgatgtcggcgatcaacctggctacccggcagctggtctggcaggtgccggtgggcacggtgaaggacaccgggccgatgggcatcaagatgcgcctgccgatcccgatcggcatgccgacgctgggcgggtcgctggctacgcagtcgggcctgctgttcttcgccggcacccaggactactacctgcgcgccttcgacagccgaaccggcgaagaagtgtggaaggcgcgcatgcctgtgggcagccagggcacaccgatgacctacgtctcgccgaagacgggccgccagtacgtggtgatttccgccggcggcgcgcgccagtcgccagaccgtggcgactacgtgatcgcctacgcgctgccgaagcgcacgtag

SEQ ID NO: 501183 - DNA, 1884 bp, Stenotrophomonas maltophilia
atgcctctgattaccctacagaacgtcgacttcagcgtcggcggcccgttgttgctggaaaaggccgaactgtcgatcgagccgggcgaacgcatcgccctgatcggccgcaacggcgccggcaaatccaccctgctcaagctgctctccggcgaccacaagcccgatgacggcgaagtgcgcgtgcagcagggcgtgcgcgtcactcgcctcgagcaggaagtgccacacggcgcggccggctcggtgttcgacgtcgttgccgatggcctgggcgaactgggccagtggctggccgagttccaccacctcagccatgccgaggtgttcgatggcgaagccctgggcaacgtgcaggccaagatcgacgccgccaacggctggggcctggaccagcgcgtcagcgaaacgctgaccaagctcgacctggacggcgaggccgagttcggccgcctgtccggcggcatgaagcgccgcgtgctgctggcccgtgcgctggtctccagcccggacgtgctgctgctggacgaaccgaccaaccacctggacatcgaagccatcgactggctcgaagcgttcctgaagggctggagtggcagtgtagtgttcgtcacccacgaccgccgcttcctgcgtgcactggccacccgcatcgtcgagatcgatcgcgggcaggtcaccagctggcccggcgactgggccaactacgagcgccgccgcgaggaacggctcaatgcgcaggcgcaggaaaacgcgcgcttcgacaagctgctggcgcaggaagaagtctggatccggcagggcatcaaggcgcgccgcacccgcgacgagggccgcgtgcgccgcctgaaggcgatgcgcgtggagcgttcgcagcgccgcgatctcagcggcaacgtcaagatggaagccgcgcagggcatcagctccggcaagaaggtcatcgacgtcaaggacatttcgttcgccttcggcgagcgcaccatggtccgcgacttcaccaccaccatcatgcgcggcgaccgcatcggcctgatcggccccaatggcagcggcaagaccacgctgctgaaactcctgctgggcgaactgcagccggccaagggcgaagtcaacgccggcaccaacctgcagatcgcctatttcgaccagtaccgcgcggtgctgcgcgaagactggagcgcgatcgagaacgtggccgaaggccgcgatttcctcgagttcaacggcaagcgcaagcacgtgcatgcctacctgcaggacttcatgttcacccccgagcgcgcgcgtgcgccgatcacccgcctgtccggtggcgagcgcaaccgcctgctgctggccaagctgttcgcgcagccgtccaacctgctggtgatggacgaaccgaccaacgacctcgacgtggaaaccctggagctgctggaagagctgctgggcgagtacaccggtacgctgctgctggtcagccacgaccgtgacttcatcgacaacgtggtgacctccacgctggtgatggaaggcgacggcgtgatcggcgagtacgtcggtggctacagcgactggcagcgctatgcggccagcgtggcgacgcctgcggcggctacggccgccaagccggcggccgctgcaccggctgctgctgcggctgcgactcccgccgcgcccaagcgcaagctggcctacaaggaagcgcgcgaactggaacagttgccgaagaccatcgagaagctggaaagcgacgtcgaagggctgacctcggcgatgaacgatccggcgttctatacccgcagcagcgccgaagtgacggcgcacacccagcagctggccaaggtgcaggccgagctggatgccgcctacgcgcgctgggaagagctggaaggctga

SEQ ID NO: 501184 - DNA, 846 bp, Stenotrophomonas maltophilia
atggatgcatacgatgcgctgatgcgcgatggtttcgtggtggtgcgccaggcgattgcacccgcactggtccaggacatcaacgagcgcatcgcgcgcttcaagcagcgcaatccaaaggcggtgtcgcgaaacctggacggtcacaagcgcatgtatcgggtcgtcaacctgcacctggcggtggatgcgatgacccgcctgctcactgacaacccggccatcgacgtctgcgatcgcttcctcggcgaaccaaccacgctctacaccagcctctactacgagcgcggatcggagcagtcattgcatcgcgatacgccagtgttctgcacgtccccgggcgagcgctacatgggggtatggaccgcgctggatgcggttgacgaaagcaatggccccctgcgcgtggttccgggcagccacctgttgccgcccatcgatgtgcaggcactgcgacgcgaagtcttcggcgacggcccgatcagcgccatgtcgccggagggctgggccgcctatcaggatgcggtggcgcgccagtgcgaagacgctggcctgaagccgcagtcggtgcacgtgcagccaggcgatgtgatcgtctggcacccgcagctgttccatggcggcgccccgcatccctctgccggaacccgccgcagcgtggtcatgcacgtgaccccgaagtcgatgcctgtgggtcacatggatgttttctacgggcaaacccctccgctggccaaagcgccctggcgctattaccggcgtggccagcgtgagatcgcgcgattcgggcaggtggatttcggtcacgagtacacgcgccggacctggttcctgcgcaaagcctga

SEQ ID NO: 501185 - DNA, 888 bp, Stenotrophomonas maltophilia
atgaactcgcgcagcccccttaccgtcgccctgatccaggagcgcaaccacggtgacgccgccgccaacctggcggtgatcgaagcacgcgtggccgaggcggctgcgcagggtgccaagctggtgctgctgcaggaactgcacaacggtccgtacttctgccagcacgagtcggtggatgagttcgacctggccgagccgattccgggcccgagcaccgagcgcctgggcgcgctggcgaagaagcatggcgtggtgctggtcggctcgctgttcgagcgccgcgctgccggcctgtaccacaacaccgccgtggtgttcgagaaggacggcacgctgctcggcaagtaccgaaagatgcatatcccggacgacccgggcttctacgagaagttctacttcactccgggcgacatcggtttcacgccgatcgacacctcggtgggccgcctgggcgtgctggtgtgctgggaccagtggtacccggaagcggcgcggctgatggcgctggccggcgccgagctgctgctgtacccgaccgcgatcggctgggacccggacgatgtgcaggacgagaagacccgccagcgcgacgcctgggtactgagccaccgcggccatgccgtggccaatggcctgccggtgctgagctgcaaccgcgtcggccatgaggcttcgccgctgggtgcttcgggcatccagttctggggcaacagccacgtgctgggcccgcagggcgaattcctggccgaggccggtaccgaggccaccgtactgctgtgcgacatcgacctgcagcgcagcgagcacgtgcgccgcatctggccgttcctgcgtgatcgccgcatcgatgcctacggcgacctgctcaagcgctacatcgactga

SEQ ID NO: 501186 - DNA, 840 bp, Stenotrophomonas maltophilia
atgcgtgccgcagtcgaaacgggtgccctcgaaacgataggcgtcgacctcttcggtcttcaacagctcggcaatcgcatcggtcagctggatctcgccgccggcaccggtctgggtctgttcaagcagctcgaagatcttcgggctcagtacataacggccgaccaccgccaggtcgctcggcgcgtcctccggtttcggcttctcgacgatctgcgaaatgcggcccttgcggccatcgaacgcctcggtggcgacgatgccgtagctggcggtcttctcgtgcggcacgtcttccaccgcaatcacgctggcaccgctggcctcattgaggtcggccatctgcttcagtgcaccggcaccgcggttccagatcagatcgtcgggcagcagcaccgcgaacggctcgtcgccgatcacggccttggcacacaacaccgcatgccccaggcccagcgcctcggcctgggtcacgaaaatcgcgcgcacgccattgggcagcacgtgccggatcagctccagctgctcctgcttgccggcgcgctcgagcttctgctccagttcgtaggccttgtcgaaatagtcggccaccgcatgcttgtagcggttggtgatgaacaccagggtgtcgcagccggcctcgatggcttcatccacggcgtactggatcagcggccgatcaatgatcggcagcatctccttcggcacagtcttagttgctggcagaaaacgcgtccccagccctgccaccgggaatactgccttgcgaattcgcttgctcattggtgcctgttcgcctcacgtgccggaaagggcacgactttagcggatgaaatgtaa

SEQ ID NO: 501187 - DNA, 180 bp, Stenotrophomonas maltophilia
atgtccagccctgcctgcgccgccctgctggtgatcgccacctgcgccgtactccaggcattggggctgtcagtgcagctgcgcccggaccacggccgcgcctgcctgcagcagcatcgccaggcgctggtctgcctggcctggaccccggcggtcgaatcccctgcacgcgccgggtaa

SEQ ID NO: 501188 - DNA, 342 bp, Stenotrophomonas maltophilia
atgagcatcaacaagctgctggtcgcgatgtccctggctctggccctggccgcctgctcgaagcaggaagctgcccaggacgccgctgcttcggccaacgaagccgccaccgaagcccaggctgctgccgaccaggccgccgctgccggcgcccagaccgccgctgctgcccagcaggccgctgacaccgccgccaccgctgctgacgcttcggtcgacgccgctgcccagaccgccgctgctgccaccgacgccgctgctggcgaagccaaggacgccgccaaggctgccgaagctaccgctgaaaaggccaaggacgctgctgaagaagccaagaagtaa

SEQ ID NO: 501189 - DNA, 2124 bp, Stenotrophomonas maltophilia
atgaactacttgaggaatgtcagggttgcctggcgtcttgggctgggctttggcctgttgctgctgctggttgccgccgtggtcgctaccggggccaccgccagcgtcgtgcagaagcgcgcgatgcagcaggtggtcgatatcagcgtggccaaggtgcgcctgctgtcgcagatgctcgatgccaacaatcagatgatggtggtgcgccgcgagatgctgatccgccaaggtgacgaccgcagcagcgacgagaagcgcattgccgatctggtcaagcgctacgaggccagctggtccgcctaccaggcgcttccgggtgatgccgaaggcaaagccattgcggaaaccatcgccgccaagcgagccatcgcacgcccgctcaacaagcagaccagcgagctgatggagcagggcgactatccgggtgccgtggcgctgaccctgggcccggtgcaggacgcggccaacggctggaacaaggcgctgtcggacggcgtggacttcgaggaaaaggaaagccgcaaggctgctgccgaagcgatccgcctgggcgagcgcagcctgttgcagctgctggtgctgggcggcgtcgcgctgctggcgggcatcactgcctcggtgatgatcggccgcagcctgaccggcccgctggcgcgcgcggtgaacctggccgagcggctgtcaaaggggcagctggaccaggagttccgcctcggtggccgcgacgaactgacccagctgggcgaggccatggccagcgtccgccagagcgtgcatgcggcgatcggcgcgcagctgcagatggccgagcagcacgaggccggtgcgatccgctatcgcatggacgccagcgccttccccggcgatttcggccgcatggtgcaggccaccaacagcctggtcgaatcgcacgtggaggtggaactgctgatggccgaggtgatgcagcgctacgccatcggtgacctcagccgtgatctgcctgactaccccggcgagaagtccacgctgacccgtaccctggctgcagtgaagcagagcctgatggcgattaacgcgcagattgatgaactggcccgcgccgctcgcgccggtgacttcagcatgcgtggtgatgccgctgcgttccagttccagttcaaggcaatggtcgagcacctcaacggcatgatggccagttcgcaggccagcatcgccgatgtctccgacgtgctgcgcgcgatttcgcacggcgacctgaccgcgcgcatggacggcgagtacgacggcgtgttcgcccgcatgcgtgacgacgccaataccaccaccgcgcagctgaccggcatcgtgcagggcatccaggccgccgccgacagcatcaacaatgccgcgcaggaactggcggccggtaacaacgacctctcgcgccgcaccgaacagcaggcggccaacctggaggaggccgccgcgtcgatggaggaactgacctcgaccgtacgccagaacgccgaactggcgcggcaggccgacagtgaagcgcatgccgccggtgccgccgtgcgcgagaccgagcaggcgatggcacagatggcctcggtgatgggcgagatcgatcagtcttcggcacgcatttcggaaatctcgacggtgatcgacggcatcgcgttccagaccaacatcctggcactgaacgctgcagtggaagccgcccgcgcgggcgagcaggggcgtggctttgcggtggtcgccagcgaggtgcgtacgctcgcgcagcgtgccggtgtcgccgccaaggaaatcaaggaactgatcgaagacgccgctgccaaggtgaagagtggcctggcggtgaccgttgaatccgaagctgcaatcgcgcgcgtggcccaagccagttcgcgtaccacccagctgatgagcgacatcgcagcggccagcaaggagcaggccgccggtatcgagcaggtcaaccaggtggtggtgcagatggaccaggtgacccagcagaacgcggccctggtggaagaagccactgccgcgagccgcgcgctggaagaacaggcgcatgcgctgaccacgtcggtggcggtattcaaggtggaaggcgcggtggtctctgctgtgccccgtcacgcagcctga

SEQ ID NO: 501190 - DNA, 1350 bp, Stenotrophomonas maltophilia
atgagccacgattttccccaccagttgattattttcggcccaccgggaaccagcaagagttacaaggcccggcatgagaagacgccgatgctcggcattcgcccggacgaggtcatccctgtgacgttccacgccgagtttggttacggcgatttcgtctcccgcctgttgccactgtccgagggcaacaaggtccattaccaagtgcatgccggccccttcatccgcgcattggcacttgcccttcaccgttcagagcatggcacggccgattcgccgcctcgcaacgttgtcctgctcattgacgaaatcaaccgcggcaactgtgcggaaatcttcggcgacattttccagctgctggaccgggacgatgacggacaatccagctattccgtctgtgcctcgaaactgacggtgcaggcgctgatcaacgagatccgcgaacttgaagctcgcgatgacagagactcctccacgctgatcggtcgtatcgaagatgagcgcatgctgaggcttccggcgaatctctacctgatcgggaccatgaacactggcgacgaatcgatcttcttcatggactctgcattcaagcgccgctggaatttccagttcagtccagccgagttcaatgcagttcccgctgcgcaggccaatgcaacgatcgaaggccacccatcggttacctggaagatgctggtggatgctctcaatgcgatgatcgtcgagaaatgcacctctccgaatctcgacgacaaactgatcggcccctggttcatcaaggcgcgggccatcgctgcaacaacaccacccgcgacgctggaacagacgcacgctgcatcgattgccgaactgcgcaagcttgccccaggggctgcggagtacatgcagggcgcggactacagccagaggttcgacgatgcattctgcaagctccggaaatcctgcaatgccgagaccttgaaggcaatcgacacactctcgggctttgacgagtccgccaagcgcaaattgaagactattgcctttgccatcagtggctcatccccctactacaagtcaaagataaacttccagaagaccaaggacgggatgctcattgaggatttcgtcgaagcgcttgccgtgacacaggaagtccatcccattgcccaccatatcgccgccagtgatatcgagggaaagctattcctctacctgtgggacaacgtcttcgaaagggacaagtccccacttgcagaatggctgcgtattcccccggaatcactgaggaccttcggacagttttccgcccgacgcgatgacttcatccgcagctgcactgtttcggaagatctgcatgcagctgcatga

SEQ ID NO: 501191 - DNA, 1383 bp, Stenotrophomonas maltophilia
atgcagctgcatgacgtcagcgtcgtcgcggctgggtccagcgctgtgggcctgttcgtggaagatggacgcaccgagctgcgcgtgccgcatggcatgccgacctccaccgcgccccgcgacgcattccgtctgctctacctggctttcgccgctttcaggaatgtccaatcagatctcggacatgcaccgcagcaagacggcgttgaggcagacacgcatggacgtggacttgcagcggcccccgcttcgttcgtcgacgccattgccatcgactcgctgttcaaccattccaatccacttcgactgctgtcacttcgctcacagatggcgcggcggcaggatggcaatctgaagtacgctgaccgccagcttcaccatgcattgttcaacgacgacgacgcccccttctttccgaagcttcccacccggcgaagcgtatgcgaacgcggaaccgccgacatcgtcggcctgtatttttttctcgctgacgacttctatcgcaacctgctgcagatcgatcccggcatcatctggggacgcttcaccatggatgccgtacagcgcgcaacggacttccgccatcgccatctgcgcgagggtgactcgctgcatgaaggtgatgcctgggcacaggagctgctgctgcggcgactccagcaactcctgagaacgtgctaccggcaggcaacgctgcgcagcgcggagtttctttcgctgcatgcagcactggaacgctaccttcatcccgcgctcgcaggtagtgtgcagcagggccaggtctggggcatgcgggatttctggcctgtctgggaatccatgtgcctgcatgatgccctgcaacaggcgagcgacacgcacggcacatccgtcgtcacctgtgacagtacttatctcccatcccaccccatcgccatcgagcaacgggacacctggggacagcgacagcattcaatgttcgcccataacggactctgtcgccgtcccgacctgttgctgcaacgcggctccgcgtacaccgtggtcgatttcaagtactaccccatcgcacccgactggcatcagcgaagccgtcgcgacgaagacgagaaggcgccctccttgaaggagaaagcgcagaaggatctggacaacattgagttgtatggacttctgctgcaccgtcaccttgctgcggtggagcaggtatcggcaacgatcaccctggagttctggctccccggaggcgaagcgcagcggattcacatccgcagctcgcctgcctggaacccaccactagaggtagtgactcttcctctgccggacatgatcaggcgctacggagagcgacatgccttcagcatgcgcggcaaccacgcgcatgcagttgccaaagctgcgtga

SEQ ID NO: 501192 - DNA, 1614 bp, Stenotrophomonas maltophilia
atggactcgcatgcctgccaacaagggcccaaacgcctctcgaacttctggcttgctcttaccctattgatagctcctatctgtgcccaggcgcagatccagacgagtgccaaatcttcttccccaatcatcgttgcagacttctccagcatgaccaatgggtcactggcgggaacccagatggatgccccaatgtccacatttaccgtcaatggccagcggctatggataaagtccgaatggaactaccaagctgggggaatcaagcattcacttcatcaaggctccctggatgcgccctatacttcactgaaatggtcgaagaacagttgtaacagaggaacaaacaacttctgcgtcaatggccctggcactgcattcactgcattcaaaaccagcgacaccatcgatgtgtggtttgtgaacacctatcaagcaaacgagcagggagaaatccttgcgttcgtacatgaggagcgcgtaggcggatccggcggtgtggcaggaaaccaggaggggaagaccagaataggactcgcatggtccagtaatggtggagagagctgggcctatctggggcgaatactcagcgcccatggcgagccgcaaccgcacaacatccagggacttccatacgtcacgcgcgatggttacatctacgtctacttcaccgatacgtcaggcatagccatcgcacgcgcgccaatcgccgacgtcattgcagaggcacgacagggcaacgcaggtgcgcagctgtggaaaaagtactatgcaggcgcattcaccgaacctgggctgggtgggaactcaagcaggattgcgccgtggggcatcacgcattcgcaagcaacctacagcacccacacggggaagtactacatggcgttgacgttcatgacctgggggggccgaaacaccaacgttgatctctacgaatcggatgatgcaatcaactggagcccctcactcagcatcgccgacgaaaccgcatccaattctcacccggtcagcggctaccaatactgctcgattgcggacgcggcagggcgcaccaacgccatttccggccaacacatatacatttactgcctcaaggacccaggcgttgtgcctcggaacttcgccatctaccgctggaaagtcaatcttggcgtatccacggatacttttcggcaatcgaccgacttctcatcatcgcaggggccgtactggtggtaccagaagggaagcgatgcaggcatattcgatctgaactggatcagttcgtattggggaagcagcacggactggccgcgcatctggcgggatagcatgcacccggctccggtggagattcccgtactgaaatgggtcgcgcccaaggcgggaaccgtgagaatcgaaggcacattgcgcgacgcggacatcacctgcggggatgggatcaacgcatcggtcgtacacaatggcgagcagatctattcaacggccatcgacaacggagacactgtcggcaagtcattgaacatcgttcggcatgtcgtgcccggcgacggtatattcttcatggtgggagccagagcgaatcacttctgcgacagcagccgttgggatccatctattacttacgaatag

SEQ ID NO: 501193 - DNA, 462 bp, Stenotrophomonas maltophilia
gtgaccggcagcgcggccacgatccgcccggccaaggcggccgatgcggtcgcgtgggcgcagctgcgtctgggcctgtggcccgatgccgatgatccgctggagacgctggtggcggcgctggccgaggacgcaggtgcggttttcctggcgtgtgcagcgggtggccaggcgatcggcttcgccgaagtgcgcctgcgccatgactacgtgaacggcaccgattcctcgccggtgggcttcctggagggctggtacgtgcagccgcagtggcaaggctgcggcgtgggccgcgccctgctggcggcggtgcgggcatggacgcgcgacgcgggctgccgcgaactggcttcggacagtcgcgtggaggacgtgcaggctcacgccgcgcatcgggcctgcggcttcgaagagaccgaacgggtggtctatttccgcatgccgctggagccatcggcgtga

SEQ ID NO: 501194 - DNA, 285 bp, Stenotrophomonas maltophilia
atgaaagcgctgtttctgatccccgccctgctggtcctggccgcatgcgccagcccggacaaggcacccccgcgtgccgacgacggtgcggcatcgacctcgatgccgaccgtaggcggtgttcgcgacgcccacggctgcattggttccgcgggctaccagtggtgcgagcacacccagcgctgcgagcgcccatgggagctggcacaggcgcaaggcctggccaacacggccgaggcgatcgacgcctattgcgccacgccggcgacgccggcacgcaagtga

SEQ ID NO: 501195 - DNA, 246 bp, Stenotrophomonas maltophilia
atggcttggcacacctccgaatccgtcctggggctgggcactgccaccaaccggtggtggaacaccatttatgggcctgccgacaaggttgaggtttcaggcatctatcgatgcctgggctgcaagcgcgaggtcacctgcaacaggaacgatcccttcccgccccaacccaagcacgtgcataccccgcaacaaggcccgatccgttggaagctcaacgtacgcaccaacaccgaaggcacctga

SEQ ID NO: 501196 - DNA, 360 bp, Stenotrophomonas maltophilia
atgtctgagcgcagcgagttcggcgccgtcccctggttcaccgagaagcgcagggtaccggtgcacagcaccggctcgcggctggcggcgcgtttcttttggttacttttcttttcgcgcgaaaagaaaagtgacatcccaccgcgggcgcggaaatggcccgccgcaaccaacgctcacccccaggcgatgaacccgatcgccagcaccgccagcgccagccccgcgcggttccacttcgtggtggcctcgccgaaggcgaacacacctaccagcgcgcccaagaccaccaccccgatgttcatgccggcgaacacggtggccgggctgtccggcatcgcctggtgcgcgtgtacatag

SEQ ID NO: 501197 - DNA, 297 bp, Stenotrophomonas maltophilia
atgagcacccatccccgcctctccgccgcggacgccagcaccctgctggaccatctgatcggcaatgacgacttccgccgccacttcactgctgcgccgggcgaggcgctggcctcgatcggcctggatgcggccgtcggtgaaagcgactgcatgaagatcgacaccctggccccggtcgaggagctgcgccgggtgcgcgatgcactgcaggcccatctgtccggttcggtggcagccatgacggtggtgttctgcttcgaagcgggcagggtcggcgaacgcatcgacggttga

SEQ ID NO: 501198 - DNA, 744 bp, Stenotrophomonas maltophilia
gtgagtaccgaacctgacaccctcgccgcggtcgagactgaaaccgtgcccctgcagctgctgcacctggacgagcgcctggctgtggtcaacaagcccgccgggctgatggtccacgacagcaagctggcccgaggcgaggacgacttcctggccgaccgcctgcgcgagcagctgggccgcccgatcttcctcgtgcaccgcctggaccgggccaccagcggctgcctgctgctggccttcgaccgcgagaccgccagtgcgctgggcaaggcgctgatgggtggcgaagtggccaaggactacctgacggtctgccggggctggccggccgagctgtcgtggcgggtggaccatgacctggatggtgggccgggcaagccggtgaagaagccggcgatcaccgatttccagcgcctggccaccggcgagctgtcggtgccggtgggtgaattcacccgctcgcgctacgcgctgctgcgctgccagccgcagaccgggcgcttccggcagatccgccggcatctcaagcacctgtcgcaccacatgatcggcgataccagccacggcgatggtcgccacaaccgcatcttccgcatgcagggcgtgcatcgcatgctgctgcacgccgagcgcctgcgcttcccgcatcccgacggcggcgccgtggatgtcagtgcgccgctggaccgtgaattccagaaggcgctggacctgttcggctggcaggtggacaccgtttga

SEQ ID NO: 501199 - DNA, 645 bp, Stenotrophomonas maltophilia
gtggagctgggtgtccggtgccgtcggtgcgctggcgctggcgcgcgcgtggtggaagtagacccggtgctgcaggcgctgaaggatgagctggtgcgcttcggcgccgagaacgacgcgcgtgaaagccagcgcggccgtcgcatgctcaatatcacgccggacaccggcgaattcctgtcggtgctggtgcgtttcggcaatgcgcggcgggtgctggaaatcggtacctccaacggctactccacgctgtggctggccgaggccgccgccgccatcgaaggccacgtgaccacgctggaatttgccgaggacaaggtggcgatggcgcgctccacgttcgcgcgcagcgggttggccgcgcacatcacgctggtgcatggcgatgccgggcagtggttggccgaggccgccgaaggcagcatcgacctgctgttcctcgattcggaccgcgcgcagtacgccggctggtggccgcagctgcgccgcgtgctgcggcggggtggcctgctggtggtggacaacgccacgtcgcacgcggtggagatggagccgttgcgggcgctgctggacactgatccggtgttcagcaccagcctggtgccggtgggcaacggcgagctgctggccgtgcgcaacggctga

SEQ ID NO: 501200 - DNA, 363 bp, Stenotrophomonas maltophilia
atgcagatccccatttccgcatatgtgcagcaggccgacggcagcaccgtgcaggtagcggttctggacgctggcgtgcttgcggcgctgcatgccctcggcttccaggggcaggcccccaccttgcgtgctgaagtgggcgacgacatcagcaaagctcgtttgttcgctgccctgcgtgatcttggtgtagcgttcgcggccggtcgcgaatggagtccggtcgaggtatttggctggctctgcgaccatggcttgctcgaaggcccgtatctgcgcctcgcctggaccgatccacaacgctacgtagtctgcagcgtcatggcgctctctcaagcacaagcggcatcgaccgcgaactga

SEQ ID NO: 501201 - DNA, 1791 bp, Stenotrophomonas maltophilia
atgcatataaagaagatcacgctacatcgctttaagcagtttcgggacacagagatagagattgatcaaggcctttcgcttgttgttggaggaaacaactccggcaagtcctcgattctgcaagctctcgctatctggcagttctgcaagactatgctagagatcgagaaagggcgatccagctggctgcaaaccaagaacaaaactggcctgggcatgggtattgcggatttcacgccgatgcaaattccatcgctcagccatctctggaccaatctgaagactagcaaggacgacgagcccgacggctatacactgaagattggcgtctattgggacctgcccgacaaacaggagcggcacttggagataggtctgtcacaggccaatgatcgtctctttgtgcgaaccacttcaacgaatctggtagctgctgagatcgtcaacgcaaagggcgagccgatcgatggcaacgtcccgcgagtgggatatctaccgccattcgctggcatcactgatcgtgaaggcagactgactcctgccatgagagaacgtctgataggccaaggcctatcgggtggagtcattcgcaacgtcctattcgatctgcacgaacacaacaggagggaacgtgaacgcctgcgtggaaacagcagaaagttgaaggattcctcgctgaaatggctgcgctcgaacgacccttgggagatcctgctacgcacgatgcagtccatctttgccactgatttgagggtcgttcctttcaacgagagatttcacagctaccttcgtgtagagagcgccaagggtgaactgaagggtgacacattcaagcgacaccccaaatacactccaagagaccttatggtggagggaagtggcttcctccaatggctgagcgtgtacgccctcgcactctcacccgatgtcgacgtcgttcttctcgatgagccggatgcacatctgaacgcgaccctgcagagggagctgcttatgtccctcgggcacgttgcaagcctccgcaacaagcaagtactgatggccacacactctcctgaactgattcgcttttacgatcatgggaaaattctggctgtcgcagaaagaaaggcaaagtacctccaagaggaagtgggcaaagtcaaggttcttggcgggattgggacgatccagacccctaccctgcactccttgatggagcacagacgtatgctgatcttggaagccgagagcgattggcgcttcctccagctaatcgctaaacaagcaaactttgcgtggcccaagaacgttgtcccttggtactggacgggatctgccggcgagaggcagcaactctacctccagctgttggcggagattcctggtcttcgggcaatcagcattcgggatcgcgacgatgagccacatgcgacggtcggtaatgatcttatcgacaagtctttcacttccaaacaaccccatttcaaagccatgaaatggcggcgtaggcacattgagaaccatctcctctgcacgagcgccatagctcgcgcagctggatcacctcaaggcgatgtcaccgccttcttcgccgagcacgctcttgttatccctgctgatccaacagctagcgatatcgcactaccaatccgtgatgcgcatgggaaagaaatattcataagcggaaactccgttcttaaaaaattccgcgtaagcagagaagacgtcgccaggaatctaacctatggagaggtaccccaagatatgcataccttctttgccgaattgagtcagcttgcacagccctga

SEQ ID NO: 501202 - DNA, 450 bp, Stenotrophomonas maltophilia
atgggcctgcccgaaaccgacgtcgatgatgtcgtgcaggagacattcgttgccgcttggcgaggcctgtcagagtacgatccgacgcgctcggtacttccctggctgatgcgtattggaatcaacaaggttcgtgatacgcaacggtttcgacgcgtccgccatttcctgttccgggccaagcctttggatgacgaggaaggacgcgccctgcattccgagcaggccgggccagagcaggttgccggctctcagcttgagctcgcagaagtaagaagggttctcaacacgatcgacccgagcctgcgtgaagccctggttctgactgccttcgtcggcctttcccaggttgaagcagcttccgccctgggtatcagtctcaaaacaatagagggtcgcgtactgagagcacgggccaagctgacagatgcactgagccgcgggaaataa

SEQ ID NO: 501203 - DNA, 1332 bp, Stenotrophomonas maltophilia
atggaaccaccaagatggacggtacttccacctcttgagcttcgtgatgcaggtactccctggacagagtcgctcaatggatacgcaaatcgcttggctaagctcagcggaatttcgtggtgcaagatgcttcagcttatcgacacccactcgtcggaggtgccgtctagatacattgatcagcgcagactcgatgggctcgggcctgtgtcagtacggcgtgcgcgttcactagagaagctgactgggcagtcacttgtcggtgctactttgtatggactctcagagatcgtctcctcaagggcagcgagctggagtcgacacgccgcttggtgtccgatttgcatcggagctagcgatatggacgagagcgccacagagaggctgatttggagcttcgatgcttattctcactgctcgctgcacgacgccaggattgagaacagctgttccaattgtggactcgggaagttgaagagcattgcattgagaaagtgcccatcctgcggagatcgcctagacaggcgcacacgctttgactcggcgaacccgactcagcgctggatcaatcagtgcatagaggaactgatctcttggtgctcaaatcatccaaatcagaggcttgaactctcgaacttggaggtgtttatagaggcagtcgtggctagaggcgaggggcgaaagttggattaccgacctcctgcacgcttgcctgcaagctattctgactacaagagctggactagagtgaattgcttcagactctttagaaggaatgatccgagtcgattagagttcaatgagctactcaatctatcggcaaatcagtgcgtttctgtcttggacattcttctccagcctatcgaatctgcgtccgaacttctgcctggaattggatcgaatccggagctcccactaggacgcggtcgagtggcagatgagcgaagagagtttgctcgattgattgacgctctgcttggtgatgaccagtgcgtccttccatccttccaggtgcttgcgcagctgagcggaagacgagggtcgttcaagtctggcctaccgcaccaccacgctcactatgcggtccggctaaggcggcaacagatgatgattcgcggtgtttcgcgaagaacgataaacagagcatttcgtcttgcatgtcagttgaaactttcgctacaaggacagctgctgatatccgaagccgtggcaaaacgaatccacatcgagatggatgtcgcatcgaacatcgtgcgatccgcggaacttgcctgtagccttcttctcccagtgggagggatgaagggcgtagctcgtatacccaatctatga

SEQ ID NO: 501204 - DNA, 1056 bp, Stenotrophomonas maltophilia
atggacgctagcatcctgccccattttccagctgatgagatgagcttccctttcataccacatcagcgctttctaactacccagcacagcctactgaaatcagtttcgagagctcggccaggagactttgtttggttgatagcgccctcctggtcaggaaagagcgagttgcgtcggcagctgttgcctgagctcggaggaaatccccaactttggccaacaggccacttgccgctgatctccgtaagggcaatcctgaatcagggcgacaagttcaatccgaaagacttcgctttgcgcctacatcaggaaataactgagcccgacactagctggactaatgctatggaaaccggtggcgatcctgaccaaacgcacgtggccgcagagcggcgagcctcttcagtgttctggcgtgaagtgcgcgcgagaacagcggagagagaccttcgtctttcgtttgagcgcatgtctagaattcgcggattgaggtacatcgtcatagaggaggctgcgaacatctgcagggttccgaagagtcagagttcacgcaactacatgcttggcatcatggcgcttgttgaagaaattggttgtgtggcgatcatgataggaacccatgaagcgtccacgctctatgaggattcccaagaggtgttcaatagatctgacgttctctatatgcgtccgtacggtctgaatgacaatgacgacctgcgatcctacgcctctctgatcaaggcgatcggcaagggatttccactttcaaaaggtagccttctccaggaaaacctagagctcattgctctcaatggaggaggaatttttggcccaactctgcggtacttgatgcgggcgaatgaagagcgttgtcgcaatggttccaataccatcgagctcgggcatctgcgagcagcgtctggaaccgaaaggaatcacaggctgctctggggagagatagacgcgttcaatagacttgccgatggcaagcgttctctacgcctagcggacttcttgaccatcaagggctcattgcctagcgaaggcgatctgtga

SEQ ID NO: 501205 - DNA, 2424 bp, Stenotrophomonas maltophilia
gtgcagccatctcccaccatgagggagatggcaatgaccccagatcagctgagggatcatctaagaacgctagatctatcagtagaagataggtccttcgcactcgagctctttggccaggaaccagggcgcagcgttggcgcctatgcactggacaatgtggtcgtcgacttctattcaagaaagtgtcgcgatgttcgcaggctggaaagccatacagtcgagcaaacatttgcatatgagctagaaattgatcctgacgtcatctcatatgtttgccaggtcacttgtcgtggcataaggcgcggcaatcatgtgtgcaccgcccatgcagacttctttgtggttcgacggtcctccgtggaaatcgtggaatgtaagcccatctccaagctcagcactcttgtggagagaaagcccgaagagtgggtgctggacggtgggaaatatcgcaatctggtgtatgagcgatgggcagcatcccatgggatcgagtacaagatctgggcctcacccagcaacatcagccgataccataggaacttgcagttcatctaccaaaactgggatgaagatctctcaatggtgcgccgagagggctttgctgcggtggaaaagcagctttacatggggccaaaaagcatcgcgtttcttatggaagagatcccttggttcaacgctggggtcgcagcaggactcttggcggataggctagtccacgggcccatagggcacataccgattaccgatacgcgcaactttctcttaagcctaagtcaagagcaggcggaggcgattgcggccgagtgctgtaagaacatcaacaacctgtatgccgaagctagcggcccagttgcgctcgcaagttcagttgatgtggcaaaggcagttgcaaggctgaagaagcttgaatgccttgctcgtgaaggaaagcgagcgacacccaagatgaggaagttggaggagcgggtgagactagcgcgcgcagagggtcgcaatcctctagatgatctcatcaccaactacgcaaagtgcgggaaccgatccagtcgtctcactcacgcgcaatcagaacttgtacgcggagtcattggctcacattggctaaagggtaaggttgcgacgctagccgatctgtatcgtgagctagccctgcagtgcgagtgcgctggcgttcctgtgcctggccggaaggcgctcgtcagaagagttcgatccgtttcaagggggcaacgtgatcttgctgtcggcggtaagcgaaactatcaagcaaataggccgcgttccgacgctcgggttagatcaggccaagcgcttgctgtgcactctgtcctgcacatcgatgcaaccaaggttgacaaccgagtctttacacaagaagacgaagggcagcaagaccactgcccggtactgtactgcggccgtgacgaagcgtcgtctaaggttatggcccatgcctttgtcttcggtcccgctcggcgcgaagggccactaattttgctgaggaactatgtgcgcgagcacgcgaagcttccacacgcaatcgtgatcgatcgaggcactgatctgaagtcagccttaggtgatctctgtcgaacctatggcatctccatactcacagtgccgacaggcgcgagtcgcttcaactcacagtgtgagacggttcaagggcttatcaattccatggtcagccacaaattgattgggagcacaaagccagataaagccggtagaagtgtcgatggaaaattcaaaagcagatcgaccgcgcgcctagatttctcgaccgtagaatccgaaattcaccaccttctgtacagcctgatgcccgagatgcccgtggatggcttcgcaggtgcgcgagagcgatttgagaacagtcagttgactgctccaaactctggaataccaacggttgtagacgatgacttcctatttcaaacttcagtgaaattgaaatcatgctcttatgaaagaacaagggggatcagacactggaggagaagctacacgaacgcggatctcgcgtcgcgcgcgcatgaagagaagatcctcagtgctcggcgtgatcctgaggatatttcattcgtttggattcagaccacgaagagacgctacaaggcatggtgctcgaaggtctcggagattggtcactactccgagcaggatcgtcacttcgaggcaatgtgggagcagttcatcacgccggatgttgagagcaagaaggaggagctgcagcgtaagaactatgagaggacgagcatggccaacgccaggcagcgagccaatgatatggggctagcaagtggaaaggaaacgcaagccccgccaaatgcgagtcgatcgaaggttcaagcgagattggtcgtcaactttgatgagctccccgatctcattgtggaaggggattcgcatggacgctag

SEQ ID NO: 501206 - DNA, 561 bp, Stenotrophomonas maltophilia
gtgctgctgctcgtcatcgtgccgctgcaggcagccagcgcggacgggcgcgttgtggtccggacagacgatgtcacgcgcttcttcagcgtgttggatgccagcgggggatcgccaggtgccgaagacctgcgacgcggctatctggacgtcggcaccgatgcattgcgcagcttcaccgacagccgtatcggttcgatggagcgtcttgcaggcgcgatccaggacaagcctgcgctgtttgcgaaggcacgcacgtgtgaggcggcgttgccgggagtgcgcgcgcgggtagccgaggcactcgaccggttgggcactctgcttcccaccgctcgctttcctccagtcaccgtgctggtcggccgcggcaacagcggcggcgtcaccaccgaagcaggtgtggtgatcggcctggaagcgctgtgcaacgccgactggatgcagcccgatgtgggcgaccgcttcgtgcacctgatcgcccatgagtatgtgcacgtgcaacagcccggcacacgctcggaggtcgagcagcccacgctgctctatgacgttgcttga

SEQ ID NO: 501207 - DNA, 372 bp, Stenotrophomonas maltophilia
atgacgttgcttgaaggcggcgcagagtacgtaggcgagctgatctccgggcaaacggccaacgcgcatctgcatcgttgggcgcagggccgcgaatgcgcactggagcgcgccttcgtgcaggacagcaggggcaccgatctatcgcagtggctgtacaactgtcctggcgatgatgctcggcgcggggatctcggctactggatcggctaccgcatcgcccgcgactatgtctcccgcgcgccagacagatcgaaggcgattggggagctgctggatgtacggcccgcgacggccaacgcgctgcttgaggccagtggatggcggcctgcgtgcacggccgcaacaagcacggacacccagcgcccgtga

SEQ ID NO: 501208 - DNA, 264 bp, Stenotrophomonas maltophilia
ttgaagatcaggctcgacaaggcggaggccttgggaccattggtgagagccgcccgcaagcatcaggggctgcgccaggatgcaaccgccgaaggcatcggggtcagcgagaatttcctggccaaggtcgaacgcggcggtaccacagtgcaatggggcaagttgttcaacgtgcttgacgagctggggctgcatgtcgaaatcgacgtgccggacgaagccatggcccttctgacaaggcgtgccaacgggaaggcgccatga

SEQ ID NO: 501209 - DNA, 1383 bp, Stenotrophomonas maltophilia
atgagcgccccccgtatcgacctcaaggacgtgattacaacgaccgtcctgtctggactgcactatccgcgtccaccccgcgaactgcaggtcagcatcgatgaagcgccggtgggccacctgaccgaggcagcaaacttgtggcgcttcacctatgcgccggagtggctcggcaacgcatatcggtttccgctggcacccgcattgccactgcaggaagccgccatcgccgatggctccagccagcgaccggtgcagtggtatttcgacaacctgctgccggaagagcaacaacgcacgttgatggcaaccgatgccagggtggatggcgccgatgcgttcgccttgctggccgcctacggcgcggaatcggctggctcgttgacgctgctcccgcccgggacgcacctgctccccggtggcagggaaccgctgcccgatagggaactctccacccgtatccagggactgccacgtacatcgctcgccgccggcgccgccaagcgcatgtcactggcaggtgcccagcacaagctggccatcatcgaggtgggggaggaactctaccagcctctgggtgccgagccctcgacccacatcctcaagcctgacagcaccagcagcagttacccgcacagcgtgatcaacgaatggttcgtgatgcgccttgcacagcgcatggggctgcaggtgccgaggatcgagcgccgctacgtacctgagccggtcttcatcatcgagcgctttgatcgcgaaatcaccgccgacgccatccaccgtcggcacgcgatcgacgcctgccagctgctcaacctcgaccgtcagttcaagtacacgctcgggagcatcgacaccctgaaggtcatcgtcgagcaatgcagaagcaagctcaagacgcgcgtccgcctgttcgactggctgatcttcaatgtactcaccggcaacaacgatgcgcacctgaagaacctgagcttcctggtcgacagcagcggtatcgaattggccccccactacgacctgctgtccaccgcatcttacgagacccgcgcgtatgccgacgagggcgcacgttggccagaacgctcggaactatcgtggcccattctcggtgtcgcgcgcttccacgaccttcgtttcgagcatctggtttctgccggtgaagccctgggtttgggaaggccagccgccacccggcagctgcgccatcagatcgaccgcatcgcgagcgaagcccagtcgctttatgcggaggtgctgcaggaaaaccagcaatggctgacccgtttcaccatcggcccaaccctggaaggcgaggtccatttcctgagaacactggtccacgtgatcatcgccgacatggtgaggcagctctcacccgcgtga

SEQ ID NO: 501210 - DNA, 282 bp, Stenotrophomonas maltophilia
atggcgtggatctacctgatgtatcggcggctcaatccacgcatggcgtggatctacggggtgtatcagtggctcaatccacgcatggcgtggaccaaccgggtgtgccggcggctcaatccacgcatggcgtggatctaccgggtgtatcggcggctcaatccacgcatggcgtggatctacccgatgtatcggcggttcaatccacgcatagcgtggaccaaccgggtgtgccggcggctcaattcacgcatggcgtggatctaccgggtgcgccagtag

SEQ ID NO: 501211 - DNA, 3027 bp, Stenotrophomonas maltophilia
atgtcccgtgccgtcccgcgcgcagtgcgtatgcgccgcctcactgtttccgtactgcaggccatggctgttccgtcggtcatgttgttgactgccagcgccgcctgggccggctgtgacagcgtcgcccccgtcgccggccagacggtcacctgcgatgccaacgcgccgaacccgcagaccgtgcccgtcaccgccaatggcgccgccggcatcaccgtcactgtcgccaacacggtacaactgcagcagagcggtggcagcagcgcgatttcgcttgtcggcgccggtgggcacctgctgtccaacctgggcacgatcagttcggtgggcggcgtggcggtccagctcggtggcggcagccgcgtcgaaaatgcgggaagcatcagtaccggcaacaacaccgcgctgcagttcgtcggcgcgggcgacagcgtgctggtcaaccgcggaacgatcagcgggcgcaccggcgtgcagttcggtgccggcaatgaccgcctggacatgcaggccggcagcatcagcggcggcgtcctgcagggcgatggcaacgacgtgctggtgctgggcaacggtacgatcgacagcgtcgaccagggcagtggcgatgaccagatgaccgtcaccggtggcaccgtcaccggcgtggtggcgcagggcagtggccgcgatgatttcgtcatgagtggcggcacgatcggcgcgctgcagcagggcgacaacatcgataccttccgcatgagcggtggccgcatcatcggtgcgttcgaggatggcgaccaggcctggatgaccgcaggccgcatcggccgcgtcaacatgaagctggacaagaacctgtgggaccagtccggcggtaccgtggatggcaacgtggtgaccggcttcgacaccgacaccatcatcatttctggcacggcctatatcggcggcaacatcagcgtcagcggcggcaacgacagcgtgaccatcaccgacggcaccgtgcgcgggcaggtgctgctcagtaccggcgatgacaccttcaactggaatggtggtggcatcgtctacggtgcgatcgacatggggccggacaacgacgtcgccaccctcggcaacctcaaccagggcaaccttggcgcggtgccgctgttcgacggtggcagcggcatcgaccagctcaacctcagcaacgtcaagaccgccggcgtgggccgtttccagaactgggagacggtgcgcctggccaacagcaccgagctgaccttcgatggcgatctggtgctgggcgacagcagtaccggcaccggcacgctcacggtggatgacacgagcaccgtctatgcaggcagtggcggccatgccatccgtccgttcaacagtggtgcactggtggagatggtcaatgccgggcgcatcgacctgaccggcaccggcgcaggcgacgtgttcaccgtgcgcggcaattatcgcggcgacggcggtggcctgtacctgcgcaccgtgctgggcgcagacaattccaccagcgaccgcctggtgatcgatggcggttccgccaccggcaccaccggcatcggcgtgctcaatgcgggcggcagcggtgccgccacgctggccgatggcatcctggtggtgcaggccttgaatggtggccgcaccgcgccgggcgcgttctcgctgtttgcgccggtcgcggccggtgcctacgagtacttcctgttcaagggcggtgtcagcgccggcaccagcgagaactggtacctgcgctcgacgctgttgaccgggccaacgccggcacccaatggtggtggcagcgccgcgccaccgccgctgacgccgccggtcgcaccgccgccggcgatcaccccggcaccgccgccgccaccggaaggcgccaccgatcctgacctgaccgccggcgagaccgcgccgccaccgccgccaccggaaccggcgccggtggcgccgcccagcgacccggcggtgccggacgtgccgatggccggcggtgcgctgcccggtaccggcactccgccaacgccgggtgcacgccctgccgaaggcgcggtggtgccgctgtaccgcgtggagaccgccgcctacgcggtggtgccaccgctgctgcgcgagacctcgctggccagtctcggcacgttccacgagcggcagggcgagcagcgcctgctgtacaaccagggcgcattccgcaccgcctggggccggttggtggggcagagcagcgagatccactggaagggggatgcgcagccgggcttcgatggcgatgtgatgggcctgcaggccggcctcgacgtgtgggctgcggcgtctgacaaccaccgcaaccagatcggcgtattcgttggccgcacccgcgcgcagggcaagaccacgggtctggcactgggctgggagaacgtgcaggtgggccagaaccgcctggatgacaagcacgtgggcctgtactggacgttcaccgacagcagtggcggctatatcgacgccgtggcgatgcagagccgttacgacggccgcgtgcgttcctcgcgtgggctcggcttcggcctgagcggcgacggtaccagcgtgtcggtggaggcgggcaagccgctgctgcacttcgggcagtccgcatggtggctggaaccgcaggtgcaggtgatctggcagcgcacttcgctggatgaccgtcgcgatgaagtatcgagcgtgcgcttcgacaacgacaacgcctggaccggccgcatcggcctgcgcctggccggcgattatcagttggccgacaacggctggcagccgtatttcaagctcaattactggcatagccgttccggcgaagaccgcatccgtttcgacgacgacgtgatcgtcaattcgcagcgctcgcgcgcgctggaagccggcgtgggtgtggtcggtcgcttcaaccgcaccatcagtgcgtacgccgtggccgactacacgcgcgagctgggcggcgaccgcaacgagaagcgccgcatcatcgaaggcaacatcggcctgcgcgcggactggtga

SEQ ID NO: 501212 - DNA, 1041 bp, Stenotrophomonas maltophilia
atgatggtgcgttccctgctgcccgcctgcctggccatggccctggcattccccgcactggccgggcaggcccccactgacgcggcggcccaggtggatctgcagcaatcggcgcgcatccgcctgttcagcgccaatggccagtatctggcgatgcgcaagaaccacacgcgcagcggcgccgaagccgaggtggtcagggtggagagcaaggcgtccaagggtgtgttcagcacgctcgcctcgctggccaccggcaatgaaagcacctcgatcggcatgcccgagtcattcgccaccggtacgctgggcggtatccgcaagcccttctatcgcgaattcgcactggtgccgggccagctggtcaatgtgatggccaacttcgagggcaatcgtcgctgcgttccggcgggcgaaagcgttcgcgacctgcgctttacactgccgccctcgctcctgctgacgccggaacccggcctggactacgaagtatcgttcggtaccgacggcagcagttgcggcatgaacgccaggctgctgctggccgacgggcgctcagtgccactccccaccgagttgcagcggcaacgctcaccaaagacgtacaaggtggaaggaacgcatctgtataccttcctgttccgcccgggcagcgtgtactaccgcccggtcggcgaggcggaggacctgcagctgcgcatcgacgatgccgaacatgccgacgcattcgaaacggcgatgcgcgagatcgcctcgcggcccggcacccagatgtgcatcgtgctgccggacttcttctacaagagcccgctgaaagaccggcttgaccgcgtcctggacgagcaggacaagaattttccggccatcctcgaaccgatcgaaggactgcgcaaagtccgccagcttgaggaccatgtgcccaccaccttcctggatgctgccgcgtactgccagttggcagggatgatggcgttcccgccccgcaacacgctcgatggcgcacccgacgtggcagctccggctcagtcaaacaatccctga

SEQ ID NO: 501213 - DNA, 450 bp, Stenotrophomonas maltophilia
atggccagccccagacttcgctacggtcggtattcccgatccggcaacgtgtactcattgaccacagcaaccctcggccgcgaaccgttgttcgccgatgcggcaaacgtggcgatccttatcgacacactgcgcttcgtagagcgcaagagcttcagccacagcctggcctgggtggtcatgcccgaccatctgcactggctgatggagctgcgcggaggagccctggccgagtgcatggccctgctcaaatcacgcagcaaccgtctgttgaaccggcgattggagcgacaagggccgctgtggcagcacggttaccacgaccacgccgtacgcagcgatgaatcccttcacgagaaggcgatgtacatcctggccaatccggtccgtgcgggcctggccagcacgttgggtgagtacccgcacgcatggtgccgttggccgttgtag

SEQ ID NO: 501214 - DNA, 1002 bp, Stenotrophomonas maltophilia
atgagctgctcactgctttcccccagcctgctggccctgggcctggctgccgcgttgccggcgttcgcgcaatcgcatgccgggcatgacatgggcgcgatggagccaccggcgaagaccgcgggaacgccggccgaacaggtcgatccggtcgatccggtcgatccggtcgatcattcgaaaatggaccattcgacgatggatcattcgaagatggaccattcgacgatggatcactccatgatggaccacgcagcaatgggtcacgcctcgcccgcctcgcccgcatccaccgaaccgcgcgaacccatcccggtgcccaccgatgctgaccgcgctgcggccttcccgccgatcgcccatggcgcgatggagcacgcgccggagatcaacagcctgctgctgatcgaccgcctcgaacactgggacggcaaggacagcacgggccaggcctgggaggccaccggctgggtcggtggcaacatcaaccgcctgtggctgcgcaccgacggcgaacgcagcaaaggccgcaccgagtcatcggcggttgaagccctgtatggccgcagtgtgtcgccgtggtgggacgtgctggtgggcgtgcgccaggacttccggccggccgactcacgcacctgggcagcgctcggcatccagggcctggcgccgtacaagttcgagagctcggccacgctgtacatgggctccggtggccaggtgctggccaaggccgaggtcgagtacgacgtgctgctgaccaaccgcctgatcctgcaaccgctgctggaagccaccgtggcggccaaggatgaaccggagtacggcattggtcgcggcctgaacaaggtcgaagctgggctgcgcctgcgctatgagttcagccgccgctttgcgccgtacatcggcatcagccacgagcgcacgtttggcgacaccgccgactatgccggtgaccacgcgcgcgacacgcgctgggtcgccggcgtgcgcatgtggttctga

SEQ ID NO: 501215 - DNA, 288 bp, Stenotrophomonas maltophilia
atgcttgaggccgtggagcgcgaatcgattctccttggcgatgacgccacgcggatggcctcggtgatgaagcgctgccatgagctggacagcgcgctgcgggtgagcggctctgccattcacttggatggcaggggagtaggctgcctcccggcccggccgggtgcgggcgatgcgaaggagccttcggtacttccggtgctaccgcgcgtgacgcagacgaaggaaggcgcgctttgcccagtagagaagcgtgccccccaggccagagtcctgggcgttgcgtag

SEQ ID NO: 501216 - DNA, 384 bp, Stenotrophomonas maltophilia
gtgcaggagaacctgccgatcaaggtggtggtgttcaacaacggctcgctgaacttcgtcgagctggagcagaaggtggaaggcctgctggacaactacaccgacctgaagaacccggacttcggccgcctggccgaggtgatcggcttccacggccgcacggtgacccgcagcgaggatctggaagaagcggtgctggatttcctgtcccagcgcggcccggcgctgctggacgtgcataccagccgcgccgaactggtgatgccgccgcagatcgaggccaagcaggtggccggtacggcgctgtatgccgccaaggcggtgttgaatggccgcttcgacgacgtgaagcatctgctggtggacaacttcctgaagaagtag

SEQ ID NO: 501217 - DNA, 438 bp, Stenotrophomonas maltophilia
atgaaggctggctcgaaccgcagtgaggccgccgccggggcaggcaacccggtgatcgtgtttgatggcgtatgcgccctgtgcaatcgctgggtgcgcttcctgctgcgtttcgaccgcaagcaacgttatcgctttgcagcgatgcagggcgagcggggcagtgcgctgctgcgcgcgcacgggctggacccgcaggacccggcgtcgttcctgctgctggacgcgcagggcgcgtggaccgataccgatgcgatcctgcgtgtactggccgggctgggcggtgcatggcgcctgagcggcgtaatgcggatggtgccgcgtcgctggcgcgatgcagcctatcgcgcgctcgcacggaaccgctatcgctggttcggccggcatgacgcctgccacctgcctgcaccggagcaggccgcgcgattcctggattga

SEQ ID NO: 501218 - DNA, 849 bp, Stenotrophomonas maltophilia
atgatcggtccggggttgaacttcgacgttgccgcacagttccagagcgctatatccgggctccttccggagataggagcattcctgctattggccgcgatcgtcaatcgcaacgatcttgtgggcgttgtgcgccgtttactgcctgccgggtgccatgtcaacgtcttttcttttctgctagacgcgctgctggttgcgccgcttctggggatggctatggtgttgatgcaacgttcagtcgcatggacctggaccggggcactggacgcgatgtgggctgaatttccaaagtggctgctgctcctagtggtgctctttgttggggatgcaatcggctacttccgacacaggctcgagcactgtaagtggctatggctgtttcacgagatgcaccacagtgatcgaaggatgacttggttctctctctaccgttttcatcccatcaaccgtttgacaacggtattcatcgatatgggagcgcttctgctcttcggtttcccgctgtgggtcatctttatgaacgcgctcctgcgtcattactatggcttgttcattcacgcgaacctgccatggacctatggcgccttgggtcgcttattcgtgtcgcccgcgatgcatagatggcatcacgtgcgcaccggggaaggggtgggtagcaatttcgccacagtgttctcggtgtttgaccagtggtttggtacttggtatgtgccctcttcgtgcggcgcacctctgggtgtgaccggtggcggtcacgattccttcttgcatcagatcttcagtcccttcgctcgcttgtttagattgaggcgtccctccggtgtcgggagcgatgcggttccgtag

SEQ ID NO: 501219 - DNA, 429 bp, Stenotrophomonas maltophilia
atgaagaaccagaagggcttcacccttatcgaactgatgatcgtcgttgcgatcatcgccattttggctgcgattgcgatcccggcctatcaggactacgtcgttcgttcgcaggcggcttccgccctggctgagattacccccggcaaggtcggcttcgaacaggcgaccaacgaaggcaagactccgtcgaccaccgcaaccgatgcgggcttcatcggcgttgctgccagcacctcctactgcaatgtggccgtgactgccacgaccattgcctgcaccactaagaacggcaacgctaccaagttcaacaccaagaacattacgtggacccgcgatgccaacagcggcctgtggtcctgctccaccagcctcgacgcgaagtatcgtccgggccagtgtggtgccgccgccgctccggcgccgtaa

SEQ ID NO: 501220 - DNA, 1260 bp, Stenotrophomonas maltophilia
atgtctgtcagtggcagtgcaatgaagaaggaacccgtggcgcgcagcaccacggaactgcagccgtttgtatgggaggggaccgacaagcggggtgtgaagatgaaaggcgagcagatggcaaagaacgccaatctgttgcgcgcagaattgagacgccagggcatcacacccaaagcggtgaaggcgaagccaaagcctattttcggcagcacaggcagcaggattacgccgaaggacattgccttcttcagtcgccagatggcaaccatgatgaagtcgggcgtgcctatcgtctcttcactcgagatcattggcgaagggcacaagaacctccggatgaagaggatgatcggaacgatccgcgccgatatcgagggcggctcatccttatatgaggcgatcagcagacatccagtgcagttcgacgaactgtatcgcaacctggtccgcgcgggcgaaggcgctggcgtattggagaccgtgcttgacacggtggccaactacaaggagaacatcgaaacactcaagggcaagatcaagaaggcgctgttctatccgatcatggtcatggcagtcgccatcctggtcagtggcatcctacttgtctgggtggtccctcaattcgaagatgtcttcaaaggcttcggagccgaattgcccgctttcacccagctgattgttggcgtttctcgcttcttggtgtcttggtggtggctgatcctgttcacttttgtgggggcgataattggcttcatcgcagcctacaagcgctctccgaagctgcaacacacgatggaccgattgatcctgagggtgccagtgatcggccagatcatgcacaacagctcaattgcccgctttgcacgtaccactgcagtgaccttcaaggccggcgtgcccttggtggaggcgttgggcattgtcgccggcgcgaccggcaacaaggtctacgaagagtccgtactgcggatgcgtgacgacgtgtcggtcggctaccccgtgaacatggccatgaagcagctgaacctatttcctcatatggtcatccagatgaccggcatcggcgaggaggccggtgctctggacgcgatgctgttcaaggtcgccgagtactatgagcaagaagtcaacaatgccgtggacgcattgagcagtctgcttgaacctttcatcatggtcatcattggcggaatcgtcggcagcatcgtgatcggcatgtacctgccgatcttcaagctcgcaggagcggtaggataa

SEQ ID NO: 501221 - DNA, 198 bp, Stenotrophomonas maltophilia
atgaactcccccctggatgtcgccagctctgtactgctggcgctcgactctggaaaggatgacttcttcaccacttacaggagattcaccaacgagaacgacaaccagctcaggtcgcgtcgatggagcactttcctcctccaattccaattcatccgcgccgccgtctccagtcaactcgggatcaaaattcaatga

SEQ ID NO: 501222 - DNA, 381 bp, Stenotrophomonas maltophilia
atggacactctcgtcgtaaaggcgatcgaacggttcggcgattcagcggaggtcacgttgcacagtggcaacggcgagatcgttgccttcagctatccctgcgaactttcggtaggacagcttgtaccgaaccttgtgcgcggcatgaccgagtacgtagctgctgcatacctttcggattggccggaaagcctgaagtccgagcgatcaatcgagcgccttgatcggattgaggggttcgcctatcgcggatgcgggcaagtcgtggatcaaggggccgggctagtagaggttctcggcttcgtactggaactggacgaattgccctgcacaggcttcgtggagttcgagtgcacacgtctcgacatcggggatgcctga

SEQ ID NO: 501223 - DNA, 576 bp, Stenotrophomonas maltophilia
atgaccacccgcatcacacaccggctgcgcatcagcctgctcggcctggccgcgctgctcgccgcctgcgccgacaaggggccgcccccaccgccagagccgctggaactctcgcagcccatcgccgtggacacgccgggccagcaggtgcagttcgagttcgaaaccacggcgcgcaattttgccagctaccgtacctatgcggtggagctggatctacagcacgtttccccatcgccagatgctgcttctccgcgcgacctgcacattcctttacgcgttggacttcagcaatggtccggcggcacgtggcagtcgctggcaagccccgacgcctaccagatcgcacagtcgcaatctggccagccactgccagactggcaccgcgatgcgggactgaactatgcccagacccaacggggcagcgatggcgcataccgattgcatgtcgcgctgctgccgttgcaggcgcatagccgctatcgggtccagatcagcacggttgaagacatcgcaccgcttcgtggcgcaagcgccaggatactgattcacgaatcgcgtccgctcgccaagtag

SEQ ID NO: 501224 - DNA, 1134 bp, Stenotrophomonas maltophilia
atgtcccttgccaaccgcgcgcgtgccgaacagcacgcgacccgcgctgcgttcttcattcccggcttcgccaccgcgctgtgggccacgctggtgccgttcgccaaggcacgcaccgggatcaacgacgccacgctggggctggtgctgctctgcctcggtgccggttcgctgctggccatgccgttgtccggcgtgctggccgcgcgcctcggttgccgacgggtgatggtggccagcagcctgctgatctgcctgaccgtgcccggcctggcgctggccggttcggcctggacgctgggcctggtgctgttcgtgttcggtgccgccgtgggtgcaatggactgcacgatgaacgtacaggccgtcatcgtcgagcgcgacgcacggcgcgtgatgatgtccggcttccatgcgttcttcagcatcggcggcttcctcggcgcggccaccatgaccgtgctgctgtctgctcaactgcctcccttggcgtccgtgctgatcggcgttggcgccatgctgctggtgatgctgctgtcggcgtcgtactggcacagcgaacggatgccgcacgacacaccgatgctggccctgccacacggcatcgtgctgttcatcggcgtgctggcgttcgtcgcgttcctcggcgaaggtgcgatgctcgactggagcgcggtgtttctcagcgacgtgcgccgcgtcgatgcaagtcttgccggcatcggctatgtgaccttcaccctgaccatgaccgtcgcgcgcctgttcggcgatgcactggtggcacgcgtgggccgccagcgcgcgatcgtgttcggcgcgttgctcgccgccgcgggcgtgctggtgctgaccctggtcacgccgtggcaggcatcactgctcggctatgtgctggtcggcctcggctgcgccaacatcgcacccgcactgttctcgctggccggccaccagacgcgcatgcccggcgcgctggccatcactgccgtttccacgctgggctttgccggcatccttgctgggccggcgttgatcggtttcgctgccaatcacttcggcctgatcgccgcgttcatcggcgtggccacggccttgttgctggtggcgatgtccacgcgttggctgcgggtgtag

SEQ ID NO: 501225 - DNA, 678 bp, Stenotrophomonas maltophilia
atgcgtgtgactacgagcgtgatactggccatcgccgtgctgctgcaggccggttgtgcccgtacccccgaaccggctgccgcggccgagggctgcgacgacccgcaggcgcatgcctggtatctgctgccagcgcctgcgacgaagcatggcggcgacctgccaccgttcatcgatttcaccgggtcagcgaggacgatctatgatgcccggttgcgggatctcgatggctttccggagccgtcgttccgctgtggcagcgtaccggcacaggcatatcgcttcgtctgggatcctgcattcttcccgggcgtgctcattcgcgcgcaacgcaatgcagcgggccacgcgtggatcgtcgggcgcagtgcgcgcgacttcgagattcctggatcgttgcccggaagcccagccaccgtcatcaagggtggcgcgtgcgctccaccgcgcgcgctgagtgcgcaggaatggaacgccatcgccgccgcgtttgcgctgttgcagggcgaagattcgagcgctgggcttgacggctcatcgtggatgttcgagtccgtggtggacggcgagcagcgttggttcgcacgatgggtgccgcgggatccggcgttccgcaacaccggcaggatgatggtggaactggcgggttgcactgacaccctgcagggcatggagtga

SEQ ID NO: 501226 - DNA, 243 bp, Stenotrophomonas maltophilia
atgcgcccgcccatgctcttctgcatgagcagcacccgtctcccgccagggcgtcattccagtatcggccagagctacatcctcaccacgaacgtgcatggccgggcggctctgttcgccaatgatgccattgcggttaccgccatgcaggaccagcgtctggatctggaaggtctgacccatgaatcgctgttccggcacgcaatgcatgtgatggcgaatccgatcagggcgggcagatag

SEQ ID NO: 501227 - DNA, 1431 bp, Stenotrophomonas maltophilia
atgagggttgttggaagcctgtttctctgcaatgcgctggcctgtttggtcctggttgccacatcggcgtttccggcagttggcgcagcgtcttccgagcgccaacaaccacgtgcgcaggaggccatcgatgactggcttgcggccttcaatgcaggcagcctcgaggcattgcaagccttcgccgacaggtatgcgaagaaggatggcagcggtcctggggactatctcgaattccgcgggagcacaggcgcgctgcgcgtgctggaagcaatcgagagcgcccccggccaagcgaagctgctggtgatgggcgagctgagcgaacgagcgatgtgggtgacggctgtcatggacccggccaatccgtcgctcctgaagcagttccagatcgagggaactgaaacgccggacaagtacaagccggcacgggttgcagtgcctgccctgatggccgatgccgcgacgaggctggaggcgctgcgggcgcaggacgcgctgtcgggggcattgcgggtcgcacagaacggcagggtccttctggactggcgcggtggtgatgccgatcgtgccgctggaattccagtgggcgtggatacgcaattccgcctcgcgtcctccaacaagatgtttaccgccgtagccatcctgcagctgatgcagaccggcaggctcagtctcgatgaaacgatcggcaagtacctgtcggactatccgaacaaggccgtcgccaacaccgtgaccgtgcgtcaactgctgtcgcacaccagtggcctgggcgatttcttcggcgatgacttcgaacattcttccgcgtcgctgaagacgctagatgactacgtgcagcgcttcgccaaggatgcaccgcagttcacgccgggcagccaggacagctattccaactatggctacatcgtactgggacgcatcatcgaggtggtttcggggcagtcgtactacgcttatgtggaggagcacatcctgcgcccggcgggcatgaccggcaccggcttcgaaccggaaacagcgagcgttccaaagcgtgccatcgcctacacgaagcacgatgggcaatgggtccgtgaaacgaagtcgctgccctggcgcggcatgtcggccggtggtgggtacagcacggtggccgatatgatgaagtttgccgaggcgctgcaaagcgggaagctggtctcacctgcattgctgcagcaggctacgacggcgcagaaccacaagggctggtatggctttggtttcgtggtgcagggcgagggtagagaacatcagtacggccacgaaggcggtgcgcctggatcgaacagcgccatcgtggtgctgcccgcgcagggctatgtggtcgtcggcctggccaatgtcgatccggatgcgatcggcaatgtggtcaactacatcgttcgacggctgccactgtag

SEQ ID NO: 501228 - DNA, 345 bp, Stenotrophomonas maltophilia
atggatgtcagcacgatctcttcacgaatcagattggcccgtgccaactgtggtttgtcacagaccgaaatggcacgccgcctcggcgtgaaccgtgccactgtcgcgcattgggagcgtgaggaaggatttacgcccacgctcgaccacctgcacatgatgagcggggcgctgggtgtggactttgcctggctggcccagggggaaacccctcccgccgaacccgtggtgcgcgggtccagggcaagactggaggagaagatgctcgagctctccaagcacctgccggtatcgttccttgcgagcgttgtcgcgctgatggaaaacgccgaaacctatctctga

SEQ ID NO: 501229 - DNA, 291 bp, Stenotrophomonas maltophilia
atgagcaatcgcatcaaaaccaccgcgctttcctcgcttactctgatcattgccggcgctgcgggcaccgcaggcgcagcagcacttccggcaccggccgagcagggcctgcagtcagccaccgcgatcaacgccgatctggatgcgctgcgtatgtccgagttcgcagaactgcagggcatcgcgctcgccggcgggcaccactccgattccatcggttcccatcatcatcacgacgccgtgcccgaggaacaggcccagggcctgtccaacgcgcgattcgacgtctga

SEQ ID NO: 501230 - DNA, 303 bp, Stenotrophomonas maltophilia
atgaaggacaaccgcaacatgcccaaggcgctgtcggcgctgacgctgctggtgatcggaagcgcttcagccggtgccgtgatggcaagcgaggctccggtggcatccagcgcactggaccaggccaccgcaatcgtgagcctggacgacctggccatggccgagttccaggccaacgcgcgcgccaacaacctggaagcgctggccaccggccaccacgacgattcgattggttcgcaccatcatcacgatatcgtcaaggagccggagttgaacgtggaagccacgcgcttcaacgtctga

SEQ ID NO: 501231 - DNA, 1245 bp, Stenotrophomonas maltophilia
atgaatgcgcagttgaaaccgctggaagccgatgtggcacgcccggcgtgcctgatggagatcacccgcacaggtgcccggatggatgccgtgatggaaggcatcatgtgggcccgcctgcgacgcatgcggacgcgcctgcaggaagcactggggaacgcggagcatggcgtcatcgctcgctccatccatgccatctatgaagcgctgccggccgaccgccaggcgcgcgtactgctcagttccgagttctgcgagagctacatggcgcttgacgccgctcgcaagcagcggccggaagccggccccgatgcaatggcatgggatgctgagagcgcacgcaatctgtgtgccatccatgatctcgtgcagagagaaaaggcgctgctggacctggcctctggctccacttcgcgctacctgcttgagagccgcgattgggtggtcgacagcccggtgggcgatcagctcgcccgcaaggatgtgcaggggcgctggacgctggaaacaccgccaatgctgggtgattgcgttgccgtcgatctgcacagcaaggtcgccaggcaccatgagccccgttccggcgtgctcagtcaaccctgccttgcgctggatgaggcggagcaggcggtcgtgctcgacaagctggcgcgcgcgctggcaggcattgatcgtgcggagccactgtatggcctggtgatccgcaacttcgtccgccgcatcgtggttcgaaaatccgaggaatcgacgcccgatgttgcgcgccgtttcggatcggaacatgtgccgcgccagcctggttccctgcgcctactcaatatccatcaccccgagctgagcgtggaagcctgcatggaaagcatcatgcatgagagcacccacaacttccttgccgcgtgggagctagccaatggcttcttcgttgccaacgactatcagcaccgggtcgtgtcgccgtggtcgggcaatccgattcccaactcgtcctacatccacgccgttttcgtctactacgtctgtcatcggttgctgaagagccaccttacggtggctgacaacatcgacgctgcagcccgtgcgcatgtccatcgtcgcctcgcggtatgcgctgctggattcctcatcgagcaggatctcagcagccggctgatgagtacccagccgctcaatgccgacatcggaagaatgatggatgacatgcaggcggacatgaagcgtgaatatgactatgggaggcagcaatga

SEQ ID NO: 501232 - DNA, 873 bp, Stenotrophomonas maltophilia
atgaaggcccggaccatcgtgttgtacaccgatcatgctgatccagtcgcgcgccgggcggcgcagtcgggggcagagctgctgcacctcgacgagctgctgccgatggttcgcgctggaggctggccagcggttctggatttcgagcccagcgcggcgatgcgcgagcagttcatcggcgcacgggtggtcaatcgcgtgttctcattggccaacacccacatggatggattcctgagggacagtggaatcgatgcacgttggctgcacttccgcctgcagtcattgctcgaatcggcggccagcgtctgccacgacactggcgtgcgtggcgtctcgcgcacactgatgccgctgaacgtacagtggttcgagctcaagcggatacttgccgacatccagacgcccgacttcgtctattcgatcgggtatgaggcgccggatctgcgcggcctggtcgatcctctgcagaagtcggtgtggtcactgttcgattggaagcaggagcgcaacctgctgccggaagagaaacggcgacaccagttcttcgtttcgcggccgcagggtgtcccgctggtgtcctatttctgcggtgagtcggcgcatggcatcttcttccccaggggcgaggcggtgccgatcgatctccagcgcgtgcatgtcatcaaccaggccgcgcgtcgcgccttccgctctgagacgggggagttgctgctcttcgtagagggcggacagctgcggttccatgcattctcgccctatcttctttccgttgcggatgagccggccatggtggagatgctgggcaggtggctggcggcggatgattccagtgcgaggagcgatgatgcccgacatgcacacgtgcattga

SEQ ID NO: 501233 - DNA, 786 bp, Stenotrophomonas maltophilia
atgcccgacatgcacacgtgcattgagcgtctttccgagatccgcgagcgcatgggttggctgtacggcagcgaggatctctgcgtgctgctgtacagcctggtcaagcgtgcccggccacaaagagtggtggaactcggtacgggcttcggcgtatctacggcctggatcgccgccgcactgaaggagaacgagaccggtgtcctgcacagctacgacaatggatcgcactatgccagcgatcccgcgcggcgcttcctggccgagctggaagggcccttgcgcacgctcatcgaaccggggcaggactatccttcgtttatgtgtgcgctgttggcctgggcgggtgtcgcggacttcgcgcaggtgcatgtcgaggacatcgacttcgccaccatcgccaccgccccggctctagacggcggcatcgacatgctgttctcggacttcaaccattcccctgacagcatccaggcccttctgggtcatttcctgcctcacctgtccgccactgcgtcggtgttcatcgacagcgcttcgacccagcgcctgagctacctgacgctggagcggatcgtcgacgacctgaactgcaataagattccggtgggtctggcgcgctgctgggcgccgcaggaggcaagcgctgcgatcgaacgggtgcagcgctcgcggttccgcctgatgcatctcatcgagggccgggcacgcgcgcagaacagcacggcgtggttgagcatcgaaccggtggatgtcgttcccaccgtcgccaagttcttccattga

SEQ ID NO: 501234 - DNA, 1320 bp, Stenotrophomonas maltophilia
atgatgatgatgatgacgtactacctagggcttgcacgaacccgcttgctggaaaccaaaggcatgacgctggcactggtgctggcgttggggctgggcatcggcgccagcgtcaccatgctcaccgttgttcgggcaatgtcctgggacccgctgccggaacgcagcgggcgactgttccaccccttcctggacccgctgccggccgggtaccagatcaagggagggctggacccgcgggtggccatgacctggcccgatgccagcgaattgctgcgcaatgcacctgcgcagcggcagacggtactggccgcaggccggctgctggtggatccgcaaccgggcgcaccgacggcattcttcgttgatggccagtacaccaatgcggacgcagcggcgatgttcgacatggaggtgctgcagggacgctggtggtctgcggacgatgacctgcagcgttcccgggtcgtggtggtcagccgcacgctggcgcagcggctcggccatggaagctccctggttggacggaccctgcagctggatgggcagcccttcagggtggttggcgtgatcgctgactgggtgccccggccgcgcttccacaccgacctgcagcaggaacccttcaaggggcgcgacgatgtgttcattccgctgcagaccgcggtggaactccagcttcgggttgccaacagcatgtacggctggtcgggcaacacgccgacgaaccgcatgctcgacgccagtacggcgtgggtccaactctgggccgagatcccggacccggccggccagcaggcgtacctgcacttcctgcagaactacgtgcaggaccagcatgcgcgcgggcgcttcgatcggcagacgcccccgcacctggacggcctgcgcagttatctggtcgagcgccggatcatcccggatgaagtgcggttgcagctggcgttgtgcttggcattcctggccgtctgcctggtcaacatgggggcactgatcttcgcccgtttcgtccgccggacgcatgagatcgcagtccgccgtgcgttaggggcccgccgcatggacatcatcctgcagctgtgcaccgaagcgctgatgatcgggttgctgggaggaggcgtgggtctactggtcgcacagggtggcctgttactggtgcggatgcagccggaagactatgccagcctcgcagtcatcgacccgaccatggtgatcgcaacgccggtgttagcctgcatcgcaagcctgttcgccgccgtcctgcccgcgctgcgtgcggcatccacccgtgtcgccatgcagatcaaggccgccgaatga

SEQ ID NO: 501235 - DNA, 1248 bp, Stenotrophomonas maltophilia
atgagcgtttcacagattccgctgattgcccgtgcgatgaagaagaacgggctggtggccggcatcctgttgctgcaggtgatcatcgccaccgcctgcgtcaccaatatcgccttcctgcttgcgcagcgcgtggaaacactcgcctaccacaccgggctgcgggagcaggggcttggcatcatcgaaaccgagttcgtcggcagcgccgctgccaatgccgctgccgcggtcaaggcagacatgcaggtgctgcgtaacgtggccggggtccaggctgtggtggcggcggagtcgctgccgttgagccagcacaactggaccgtcggtttcaccaacgtgccggtgcagggccaggacacggcaggcatcgtcgaagcggagcccgcagtgtatgggatgtctgccggcgcagtgcaggcactgggcacgcatcttgtcgccggccgtgatttctccgccgcatcattcgtgcagaccgaggcagcgcaggactacgccggtctctacaaggccagtgaagccatcgtctcggcagcgctggcacgtcatctgtttggctcggccaacgcggtgggccgcgacctgtatacggacggtatccatccattgcgcatcgtcggggtcgtcgacaccctgtccaggccggtgctgcggaccgatggagacaacgacatgagcctgctgctgccactgattcccgatggcacccgggtgatgtatgcagtgcgcagcgagccggacgcgctttctgcggtcctcgactcggccagcactgcgctggccgcgcgtgaagcaaaccggatgctgccccgggtccagcgcttcagcgaactgcgtgcggaatacttccggcgtgaccagaccatggcgatcatcttcctgtgcgccggcatctcgctgttgatcgtgaccggcaccggcgtgtatgggctggccagcttttgggtccgcaagcgctatccgcagatcggcatacgacgtgcgttgggtgcccgcaggcgcgatgtgatcagcttcttcatgatcgagaacctgatactgaccttcgtcggcgcgctcgctggcagtgtgctggcattggcgttgaatgtctgggtttcgcgctactacgaggtacctcgcatcgatcccgggttcctggtgctgggggtcgggctggtattcgtcctggggcagctggctgtctgggtaccggcgcggcgggcggcgcgcgaggcccccgtggcggttctcaacagcacctga

SEQ ID NO: 501236 - DNA, 1437 bp, Stenotrophomonas maltophilia
atgtaccgcacctttgttgctgcattgctctgcgccctcttcgtcgttccgatcgcttcggcgcgtggcctcacccctgacctctccactcagctcgacgcccagctgcaggccaaccgcgaacgctacggcatcgccggccaagcggtactggtcgcacacaacggccaggtgctgtaccagggcgccagcggtgaacgtgatcccgccacccatgcgcccgccaccatcgattccatcttcgccgcgcagtcgatggccaagctgctgaccagcacgctggtgatgcaattggtcgatcagggcaaactgaatctggatgcacccgccagccgctatgtgccggacctgccaaccgcatggcgggcgatccgtgtgcgcgatttcctcaaccacagctccggtatcgccgagtactacgagcgggtggacaaccgctgggtgagcaggggctacaccggtgtggcgccggatcttgccactgcgttgaaggtagccgccgcggcaccgttgcagttcgccaccggcagccgcgtgcagtacacccaggccaactacctggtgctgaccgccttgctggaggcgcattaccgcaggccctacccggccatcgcacgcgaacgcatcctgcaacccctgaagatgaccagcacgtcatggggcatcgccaacgtgccagcccagcgcgcggcagtgccgtacatcggcaaggatggcgcgctgcaaccggccaatgaagatccctggcccaactacggctggggccatgccgatctgcagaccaccgtgggcgacatgaaccgtttcctgcaggcgctggcgaccggcaggctgctgcgcacggcgaccctggaaaaactctggcagccgcagaaactgagcggtggcggcaacaattttttctccactggctgggacaccacccgcagcgacggctacacccaggtcggccacgatgggggcacccgcgtcagggcgcggctggcctacaaggacacgctggccagcggttattgggtgttcgtgtacctgaccaacggcagtgcccgcaacgtatggtacagcacgctggtggagagcacgatggctgtggctgcgccgaagacgtttccgcatgcggtgctgtccgaacgtttgatcgcttacgcgctggatgatgacgcagccgctgcgcaggcgatgcgcgcctggttgcgcgacgacagcggggtgacgggcgacgggttggaacgtgcgatcaacgccggtggttatgccatccgcgagagtctgggggccggcagggcgctgaaggtgttcacgctcaacaccgagctgtatccggattcggccaacgcgtgggacagcctggccgaatgccatgcggcattgggtcagaaggaaaccgccgagcggctgtatgcgaagtcgaagacgcttgcgaagccttcgcgatag

SEQ ID NO: 501237 - DNA, 306 bp, Stenotrophomonas maltophilia
atgccgttgcatgatccgccgcatcccggggaatcgctgcgcgaagatgtcctgccggcgatcagtatgtcgatcagtgcgctggcacagcatctcggctattcgcgcggccagctgtcgacgatcatcaacgggcacgccggcatttccgcagaactcgcattccgccttgagcttgcaggtctgggcaatgctcgcatgtggctcgcgatgcaggcggcatacgatctgtggcaggtcgagcatcgagcgcatccaccgattgcccgcctgtatctggaggattcagtgaggagcggacagtag

SEQ ID NO: 501238 - DNA, 279 bp, Stenotrophomonas maltophilia
atgatcgtcagcttcaggcataaaggcctgaaggcgctctatgagcggggcgacatttccggagtccgtgccgatcatgtggctcgattgcggcgtttgcttctgcagctggatcaggcccgtctgcctggggacatggggctgcccggaaatcgcctgcaccccctgcgcgggagctatagcggctactgggcggtaagtgtctcggcgagttggcgattggtgttccgctttcgtgggctcgacgtcgaactggtcgattaccttgattaccactag

SEQ ID NO: 501239 - DNA, 744 bp, Stenotrophomonas maltophilia
atgtaccgatgggtaagccgattcatcagctatcgcacgttctatctgtggcgggcgcggtattactactacacccgcaacctggatcgctgggtgctgttcaccctgctgtgcctgtcaggcatcgcgctggtgctctggtaccactggcggttgacgagcgtgccgccaccgcgcgtgcatccagaggcggccgcgctgcgcgtggagaacatcacccaggaagcgatccatcgcatcgtgctggtccgccatggtggcccgacgccgggcgagccgttcaccacgccggaagacgtccgcgccggtacgctgcgcacgctgcgggtgcggcagttgctggacagtgcgatggtgtggcagctgaaagcccacatgctggccgacatggcggcgtacatcgatgccacggacagctgcttcccctttccgtgctggctggtcagccatcggctggagctcatgcgtgcggcggaggcggagaacgcggccatcaaccgggcgctcgagccggtgctggagatcccgttggacaggatgcccaacctcgacggcggcgagcgtgcgcggctgcagacggcatggtcggatccgttcggcgatgtctacaatcagacctggctgctgggggacctgcagaacatgcacgcgcggatgatggtggcgtacccgcagcgcgcgggtgcgccgtggctggcgcggctgctgtccggcgacgcggaggaaccgtaccggggctggtag

SEQ ID NO: 501240 - DNA, 1929 bp, Stenotrophomonas maltophilia
atgatcgtcggtaccgccgggcatatcgaccatggcaagacgcgcctggtgcgggcactgaccggcatcgaaaccgatcgcctgcaggaagagcgcacgcgcggcatctccattgaactgggctatgcctatgtcccggtggagggctcagtgggagacgcgtcggcgacgctgggtttcgtcgacgtgccaggccatgaacgcttcgtgcatacgatggtggccggtgctaccggcatcgacatggcgctgctggtgattgccgccgacgacggtgtgatgccacagacccgcgagcacctggcgatcctgcagttgctgggcgtggatcgcggcgcagtggcgctcaccaagatcgaccgggtggacgccgcgcgcatggcccaggtccagaccgagatcgctgcactgctggccggcacgccgctgcaggatgcgccggtgttcgcctgcaacagcaattcccccgatgatgtgggcatcaacgccttgcgcgcccacctgcatgcatgcgccacaggcgagttcaacgcgcgccgggccgcgctgcaccatgaactgttccgcatgccggtggaccgcgtgttctcattggccggccacggcacgctggtgaccggcgcggtgcatggcggcgtcgcctcggttggcgaacatctgcagctgatgccggcggccaccgatgtgcgcgtgcgcagcatccacgcgcagaaccaggccagcgaacgtgcgatggccgggcagcgctgcgcgttgaacctggctgccatcgcgcgcgaagacatccaccgtggcgactggatcgccgatccacgcgccctgctggccaccctccgtgtcgacgttcggctgcggatttccgcgcagaccgcaccgttgcgcgactgggcaccgctgcatatccactggggcacgatgcaccggcaggcccatcttgtgttgctggaggacgctccctccggcgatgggcagctcgtgcagctggtattcgattcgccggtctgtgcgatgtgcggtgatcgcttcatcgcccgtgattcggcggccacccacacgctgggcggcggcatcgtgctcgatccggagcctccgcagcggcgccggcgcagcccgggacggctcgcctggctgcgcgcactggagcaactggccgcaggtgccgggctcggtccgctgttgcagcaggcgcccttcggcattgccatggccgcgctgcaacgctactgccggcgcgcggccgaccgcatcgatcttcctgcagacacacgacgcatcgtcacccgcgaagacacggtggtcatcctcgcctcgcactggcaagtgctgcgcgagcaggtaattgcctcactgcgcagctggcacgagcgacgcccggacgaacccggtgtcgacagcgggcgcctgcaacgcagcaccctgcccgcgcttgcgacggggctctggaatgcgctgctgcaggacctgctggccgacggcacgctgcagcgcgtgggcgcgtggtggcgcctgcccggtcacgaccatgcgccgccggagcgtgaacgcctgctgctggaacgcgtgctcccgcacctgcacgccgggggtttcgatccgccgtgggtgcgtaccctggccaccgacttcggcctgcccgaggacgaggtccgcgccatcctgcggcgtgccgccgcgcgcggcgaactgttccaggtggtaccggacctgttctatgcgccggcccgcatcgccgagctggccgcgatcgtcgcacggctgtcgcaggccagcggtacggtggatgcggccgccttccgcgatgccatcggcctgggccgcaaacgcagcatccagatcttggagttcttcaatcgcgttggctacactcgacgcgtcggtgaccagcatcggcctcgcggcgacctgcagtggaacgcggcccgcgactga

SEQ ID NO: 501241 - DNA, 2919 bp, Stenotrophomonas maltophilia
atgtacaacttccaccgctcgggccgcgtgctgtgcccgtcccgcctgtgcatcgcgctgctcgccgccggcctggccactgctgcgccggccgccttggcccagagtgccggcagtgaccacgctgtcgtgcagcgcttcgacattcccgcgcaaccactggatgaggcgctgcgcagctacatgcgccagtccggcgtgcaggtggtctaccccgctgcgctggcacgtggcgtaacctcccgcgcggtcagtggcagccttccggcgcaccaggcgttgcaacagctgctgcagggcagcggcctggcggtgcgccgggtcggcgcagaggccgtcaccctggaagcgacgacgctggcgcaggcggacagtgaagtgatcgtcaccgacacactgagcgtggccggcgaccgggtcgacagcggcgcgagcagtgatgaagcacgcctgctcgacagctaccgcagcgtgggctccaccaccacgctcagccgcgcgcacctggagcgtttccgtggtacctccaatggcgacatcatcaagggcgtggccggtgtcaccgccggtgatccgcgcgtgggcaacggcttcgacgtcaacatccgcggcatccagggccagggccgtgtgccggtgatcatcgatggcggtcagtccagcatggacacctaccgcggctatgcgggccagtcgcagcgcacctacctcgacccggatctgatctccagcctgaccatcagcaagggcccgagcctgcaggccaacgcctccggtggcatcggcggcgtggtcgagatggagacgttgaagatcggcgacgtgctgcgcgagggccgcgacgtcggcgtgcgcgtgcgcggtggcctggccaatggcagtgccaacaacctgccgtcctacagtgcggcgccccgcaccgatcgcagcgccaccggcagccagttcttcaacgtggctgccgccggtcattgggaccgcttcgatctggtcgctgcctacgcttaccgcgacaatggcaactacttctcgggcaggcatggctacgacgatttcccgcagacccgtcgcaccctggcgccgttgaatccgccgcgtaccgaggtgttcaacacctcctcgcgctcgaagtcggcgctgctcaagggcacctggcacatcgacgacgcgcagacgctggaggccggttaccgccgttatgaaggcaccgccggcgagatcatggcctcgcagatcatccgggtggatcgtgaccgcattccgcagtgggatccgggccacgtcgacatggacagctacagcctgcgctaccgcttcaacccggacagtgagcgggtcgacctgcgcatcaatgccgcctacaccgataccgacagcgtgatgtacaacagcctgaccggcatcacgccgtggtacttcgatcgccgcaccgagtggtacgacgcgcccagcttcagtggcgatcccggctacaaggatgcctaccggaacccgctgcggcagaagcgcttcaacctggatgccagcaacacctcgacgttcgacacccgcgccggtgcgttcacgctcgactacggcctgtcctacagcgacgaagacatcgcgccgggcagctcgggcccgatcaagcacgacgacctggtcaacaaccgcttcctgcgcaacgccgagcgcaaggagtacagcgccgtggcctcgctgaagtggcagcccgatgaacattgggaactgctggccggcggccgctggaaccgcgtggaggtgcacgaccgcaaccgcttggccacgcccgaagcctacgcggtgcagggccagtaccgctacaccgagctgctcaacggcaacccggcactgccgtcgtggcgcgccaagcgcatcgcgttgctgaactggtatccggatgccaacggcaacttcacccaggcctcgctgctggcctcgccgtacaagaagggcacggtggccgacatcgccggctggaacttctacgacgccggcaaggcgcaggacctggaggtgccggtcagctggagctggtcgcagccgatccgccgccgcgactccgcgttctcgcccaccgccagcgtggcctaccgcttcagcgaagacaccctggtctacgtcaagtacgccgaaggcaccaagctgccgagcctgttcgagaccacgctgggcctgttcaccgccgccaaaccggtgggtgagctcaagccggagcgtgcgcgcagctgggaaatcggcgccagcaccctccgctacgacctgttcactgccggcgaccgcctggcgctgaagctggcgtatttcgatacccgcatcgacgacctgatcacccgcgattaccgcacgctgtcggccggcctgatccgcaacgtggaccagttcaaggtctcgggcatggagttccagtccagctatgacagcggcagggtgtttgccgacctgtccgcccattattacttcaaggccaagacctgcgcgccagacatcgccgccgagcgccgggcctatggcgcacagcgcaggaacgatgagctggcccacacgcccgactgcgtggacggcggcttcgaggggtcgtacaccaacacacagaacccgccgcgctacatggtcaacctgaccctgggctcacgcctgttcgacgagcgcctgaccttcggcacccgcgtggtccacaacgccggcccgatcagcgcgctcgacaaggactggaacgtcggcctgtcggcgatccagcagctgtaccggccaaccacgctggtggatctgttcgccagctggcgcttcaacgaccagctgtcgttcgacgccggcgtggacaacctgaccgaccgctactacctggatccgctggcgttgggcgtgatgccggccccgggccgcacagcgcggctggcgctgacctggaagtactga

SEQ ID NO: 501242 - DNA, 933 bp, Stenotrophomonas maltophilia
atgcgcccgccgaacatgccgcctgccgccgatgacaatgccctggccgaacaggcccggggctggatcgcgtggctggcctcgggcgacatcagcgatgtgcgcatgcaggcgtttgaacgctggctgcaacagccgggacaccgccgggtcttcgaatacgagcgtgcgctgtggcgcagtgtcgggccgcgcgcaccggccgcgggcccgggccgtcggcgcccgcgacgattgcgctgggccatggctgcggcggcgatgctggcgatgctggtggcctggcccgacgcctggctgcgcctgcagtccgatcatcggagcacgtatcaggtacggagcgtgctgctacccgacggcagccatgcggtgctggatgccgacagtgcgattgcggtgcactttgatgcgaacgcccgcgaggtcgagctgctgcgcgggcgcgcctggttcgaggtcggcccggatccgcagcggcgtttccgcgtgcgcgccggcaatggcctggtcgaggacatctccaccgcgttcaccgtcgcgcgtggcgaccacggggtggaaacccaggtcgggcagggcagggtgcgcgtggccagcccggtcgacggcggctggacctacctgcagcaggggcaacgtgcggtctacgctgagcacggcggcgtcatgcggctggccgacgtgaccaccgacagcgtcggcgcctggcgccggggcgagctgctgctggaacaggccaacgtggccgatgccgtgcagtgggtggggcgctatcgcacgggcccgaccttcgtgcgcggtgatctgtcacgactgcctgcagtcagtgccgcattgcgcatcgatcgtccggaacaggcgctggatgcgctggccgcgacggctggattgcaggtcacacgcctgccactgggcgtcgccatcgtgcagtag

SEQ ID NO: 501243 - DNA, 474 bp, Stenotrophomonas maltophilia
atgagaatgtccgcactgccgctctgcctgtcctgcgcgctgcttgttgcgcccgcggcccaggccgtcccctacgtggatctgatcgactatccgcagcaggaagccaactgggaccgcttctttgcattggagggcaggctgcagcagggtttcgacaccatctgcggggacaccttctgcgaaggggaatacagcgatattcaccccctgcgactgcgctgctcggtggatgccgcgcggggaacggttcgcgagtgcctgtgggcatttgccgccagcgatctggcggtgtccgcgaacgatggcgcgatcgaggcccggcaaccgacctggttgtgccgcctgccgctggtggcgggtaccccggtggagtccttccatgccgcgctggccgcgcgtgatcccttgcatgacccgctgccgggcagctcgcagagcgtctatgacgcgctgaccgagtgcatccattga

SEQ ID NO: 501244 - DNA, 2847 bp, Stenotrophomonas maltophilia
atgaacgttcgtaatcccgcagtgcggttcggcctgctgccggccggcattgcgctggcgctggcgccggcctttgcttccgcccaggaagcaaagggcaccaccgacctggaccgcatttcggtcaccggctcgcgcatccgcggcgcttcggtggagacccagcagccgatcctgacgatgacccgcgaatccctggaaaagcagggcttctcgagcgtcgccgacgtgctgaacaacctgacctcggccggctctccggccatttcgcgttcggagtcgctggcttcgggcgagaacgtgggcggctactacgtcgacatccgcaatctgggcgcccagcgaaccctggtgctgatgaacggcaagcgcctgggcgcaaccaccgccggttaccaggatctgagccagatcccgatgtcggccgttgagcgcatcgaaatcctgaaggacggcgcctcgtcgatctacggttccgatgccatcgccggcgtggtcaacgtgatcacccgcaagaacttcgacggcggcgaagccaacgtctacgtcggccagtacggcaagggcgacggcgacaccgaaacctattcgatgaccctcggtgcccgcggcgagcgcggcagcctgaccctgtcggccgagtactcgaagcaggacccggtgtgggccaaggaccgctggtacagccgtgacggctcgctgggtccgaactcgacctcggccacctggagcccgatcagccagaacggcagctggtgcaacccgacccaggtcaactgcggcgactccaagcaggctgtctggaagaccctgaacgccggcggcaacccgaagaacccgaatgactaccacgtcatcacggcagacgaattcgccaactccaacgagcagatgaccctgctgaccggtgtgaagcgcaagtcggtctacatcaacggtacctacgacttcaccgattcgatcagcctgaacaccgacgtgctctacaacgagcgccagacgttccagcagatcgccggctatccgttccagtccaactccttcggcaccccgctggaaggttcgagcgccttcaacccggtcggccaggacgtcagcttccgtcgtcgcctgtgggaagtgccgcgtaccactgacagccagctgaagaccctgcgcttcgctccgaccctgaccggcttcttcgagctgggcggcaagaccttcgactgggatgtcggcgcgctgtggaaccgcaacgagtcgatcaagagcaaccgcggcgacatgagcctgatcgctgcaggccaggcgctgggcccgtcgttcatcgacgccggcggcattgcccgctgcggcacctcggccaagccgatcctgggcgactgccgcccgtggaacccgctgctgccgtacggtgttgatggccagggttcgctggcgaaccaggaactgcaggacttcctgttcccgaccttcaccacccgcggcgtcaccaagaccaccagcttcaccgctaacctgtcgggcgccatcgtgaccctgccggccggcgacctgggcttcgccctgggtgtcgagcaccgcaaggaagaaggcaactacgtgccggacgccttcgcgcagtcgggccagtccaccggcctgggccagaagccgacccgcggccagtacgatctgaacgaggtctacctcgagctgaacgtgccgctgctggccgacatggccttcgccaaggaactgaccctgaacgttgccagccgttactcggactacagcaacttcggcggcaccaccaacagcaagttcggcctgacctggcgtccgctggatgagctgctggtccgcggcacctacgccgagggcttccgcgctccgaccatcagcgacctgtacggtggcctgagctcgagcttcgagtcgtacatcgatccgtgcggcgtgaaggccccgggcagcgttgccggcaatgccgcatgcaccgccgccggcgctccggccaactacgtgcagctgggccagggcaacctgccgtgctcgaccctgccgtgccagtcgggtgaccagttcgtctcgggtgccaacccgaacctgaagccggaaacctccaagagcaccaccttcggcctggtgtggagcccgcgttgggtgcagggcctggacgtctcgctggattggtacaagtacgaaatcagcgacatgatcatcgctgacagcgtcgaccgcatcctgcgtgactgctacgtgctgggcaacgccgagcgctgctcgagcgtgacccgtgcggctgacggccacgtcagtgcgatcacctacggcaccgccaacctcggcaagatgaagaccgaaggttacgacctgggcatcaagtaccgcctgccggaactggccatcggtcagttcagcatcgactggcagaccagctacaccgccaagtacgacgagcagggccagaacagcgcgggtgacaacatcatgatcggccgcgtcggcgagccgggcctgttccgcgtgcgttcgaacctgggcgtcaactggcagtacggcgatttcggtgtgaactacaccgcgcgctactactccggcatgaaggaaagctgcatctcgctggctgatggctggtgcgatgcgccgaaccacatggccaacggcgagaccgatccgctgcgtcacaccggttccaacaccttccacgacctgcaggtcagctggaaggcaccgtgggatgcgacgatcgccctgggcgcgaacaacgtgttcgaccacaaggggccgctccagtactcggctccgaactcggcgttcgcctactacggcggcttcgacgtgggtcgcttcctgtacatgaagtacacccagcgcttctga

SEQ ID NO: 501245 - DNA, 1422 bp, Stenotrophomonas maltophilia
gtggccgcgacgctgctgccgtcactgctgtgcgcgtacggggctggcgtcgctggcgcggtgctgcgggtggcacgggtggcgcggcgcaacctgctgggcctgtgcagtggtctcggtcgcgatgcacgcaagccggcattgaccgagtggctgcatgcgtgcctgcagcagttgtccggcaagccgctggatgcaccgttgaccttcgccgacctgcacgatgcgccgcgctatgccggtgagccggacagcccgcatgcgatcagcctgcagatgatcaccacctgcatctcgcacaacgagccgcgcacgttgccgctgggcggcgcacagttctggttcctgcgcgaggagttcgaacagctgttccccgccagcgtcgtgcagtggctggtgagccaggccggcccgccgctggaggtggatgggcggcagtattaccacctgccgcagggcccgaagctgccggtgctggtggccacgcgcatgagcctgagcttcccgctgctgatcagcgcggtgccgctgcatgaaccctcacgccgcgaacgacgctgcgaaccgaccgcccctgcggccgacccggagcacaacgtggccgacagcatggaggggctgaccagtgccgggcaggcctgcggtccggtgatcaccgccttccgcatctgctggttctccgatggcggcatcagcagcaacttcccgatccatctgttcgacgccgccctgccgcgttggccgaccttcgccatcaacctggtctatccgcagcacgccgaagcagtgagccagggcagcggcagccggcaggcgctggagcatgcggtgttcctgcccaccgaaaaccgccacggctggcaacggcattaccagtccattgccacgccgctggccgcagccgaactggggcgcttcctgttcgccgtcgtggcgaccatgcagaactggcgcgacctgctgcaggcgcgcgcaccgggttatcgcgaccgcatcgtgcacgtcagcctgcagggcgacgagggtggcatgaacctggacatgccgcaggaggtgctgacccgcatcgccgacaagggcagcctggccggtgcgcgtttctgttcgttctcgttcgagaaccactactggatccgctggcgcaacctggcctcggcctaccagcgctacacgctggaggtggcgcgcaccgatgatccggcgcagcaggtgctggcttaccgcgcggcgtattcgatggtcgcccgcggtgaaccgtcaccgccctcgtacaagctgggctcggaagacaagcggctggcctcgcagcaactgtgggggctgatggtcgagcagggccgcagctgggacgacctcggccctgaccttaccgatggggcgccgcgaccgctgccgcagatgaaggtcacgccgatctactga

SEQ ID NO: 501246 - DNA, 954 bp, Stenotrophomonas maltophilia
atgcccctgttgcgctcttgcctggccctgctgctcgctgccaccgccacaccggcgtgggcgacgttctccattgccgcctgcaacgaggccggcgactgtggggtggcggtggccacgcataacctggcggtcggcggcgtgggcgtgccgtgggcgcaggcgaaagtgggtgcggtcgccagccagttcgaaaccaacccgacctatgggtcgaagggtctggagttgatggccaaaggccgcacgcctgcgcaggtgctgaagcagctgttggatgaagatggcaacttcgatggcaccacgctggccgagcgccaggtggggctggtcagcgcacgcggcggcaatgcgcagtacaccggcgctaccgcgcagcaggcggattgggccggtgcgcagggcgagggcatgctgagcgtgcagggcaatggtctggccgggtgggaggtgctggcatcgatgcaacgcgtcttcgccacctcacgtgggccgctagccgcgcgcctgctggcggcgctggaagcaggtcaggcagcgggtggtcaacgcagcggacagtggtcggcggcgctgctggtgcgtacgcccggcggcgactggcaggacaccgacctgcgcgtggacgctgacccacgcgcggtcgcaaggctgcgcgagctgtacgacatgcgcctgtccaacgaggcgatcatccgcgccgagcagcgctgggagaaaggcgatgtggcaggggcgcgtgcggcactggcgacctcgttgtcgctggcccatggctgggaccgcacctgggcgcgcgctgcgcgcctggcgatgcggcagggggatatcgcgctggcccgcgaatacctggccggcctgcgtgcgctcaatccgggctgggtgaagcaggagctggcgctgccgttgtatgtacccatgcagggtgatgcggtggtggcgtcgtggcgatga

SEQ ID NO: 501247 - DNA, 915 bp, Stenotrophomonas maltophilia
atggaaaggatcttcacggatttgaagttcgcgccagtgtggagctggctgtcgcttgtcgttagccttgtaacgctcactttggcatgcagtggcgcttaccaagctaaggcagtggtccttttggcggtcgtatcacagcttggcctgggtgccttcttggctcccaccgtatttcgagcggctaagaaaggacacaaacacgttcccactgtctgcgcatggacagtggtctggcttgctactgcagtagcaacgttcctttactggttcttcaactggccgggcttcaatgcgaacgaccagaatgaccgcatcttgaacgtagttccggttctgactgcaatcgtctttggtggtctgggctggtatgtgcactatcagttctctgctcgcactcagcgcatgaacagcagttttgcgctggtcatggagatgatgaagagttcggagtacctcgcccgcaacgctttggtaagcgatcacttcccgtccagtgtcgaagacatccccgatgagtacattccgtactttgctcctggcgcggaaaagcgcctaaaggatgctgccactgcagacgaacctctttgccccatcaagcttgagcaagcgcgtgcaatcgccgctttgcgctacatcctcaactacttcgaatttatggctgtaggcgtcagagcgaatgacattgattgtgatctgcttctagataccgtgggtcagatcgttgtgagccgatttaagagatcgcaaaagctggtgaagtggattcgtgatcctaagccgctcggtgccggtcaagacctcgcatttgaacaccttgaatggatgtgccgcgattgggagccacgtcttgaggaacaaacctccaaggcaaagcagcgactacttgagcgacagcgagtagagcagcgctaa

SEQ ID NO: 501248 - DNA, 240 bp, Stenotrophomonas maltophilia
atggcagcgccgggaacggcaggtggaggtgggttcggcacgttctggatgctgtttggacagtttggggcaactctgaccgtcgcacagttgcgtgacgccttcttcccgccatcaaccatgaagaccatggccaacaagcacagcgcgggtcttttgccaccccgtatcggggaggtctacgacacccgcgacgtagcagactggtgggacgaacaacggacgaataggacgcactga

SEQ ID NO: 501249 - DNA, 456 bp, Stenotrophomonas maltophilia
atgaccaccgacaacaagaccctggcggacgtgcagcccggtgggagggtaaagctggtggatcttgccgagcgggcgcggtttgaggggtgggcgcgtgcgcagagctaccgaggcggcaacatcctcacggaccgcgatgcagaccatccgaacatgtacgccgacccgctcggccagctgacgtggaagtgctggcgagccgccctctccgcccagccctccccgggtggtccgggggatgcgctggtaaccgacgcgatggtcatggccgcactgcaggcaaccacgcgtgaaacactggcaggcgttagcgattgcgaaagcaaggtgatcagcgttctgacggcctacgggatcgatggcgccgtgcatatcccgaccatggtgcgcgccatgctggaagccgccctcgccgcccgccagccaaggcacggcagttcattcgagaattga

SEQ ID NO: 501250 - DNA, 186 bp, Stenotrophomonas maltophilia
atggctgatttcgtcgcattgctggccatgtgcgtgctgctgccggtcgctggcgccaccatgctcaagatgtggcagacccgccccccccgccgccggcacaccggcctggccgtgggtcagatcccgcaggcgctgcgtcgccgcgccccaatggccgtgcgccgcgccggaggtgcagcatga

SEQ ID NO: 501251 - DNA, 426 bp, Stenotrophomonas maltophilia
atgcacgacatgatcggcagtaccgaccacaccaaggcatttccgcaggattccgacaccggaccagtggcaaaggctagcacggctgggggaatgtgtggatttgacatggcgcaaggccgcgattgcagcgccaccatcacactgcggatcacccacaaccaggtgatcgccaccgcccaactggacatgggcgggcagaaggtcgcccagcgcgtgttcgagcggcggaaaggcagctcagcaggatggattctggccaggggaaatgaacacttttctgacgaggcggattggatctcggccgagctggccgcattcgctgaccggcttccctttccgttcgcggtagccaacatgcttccgggtgcgaaggccagctccaaggtggttgcccaagctgcgcaggaggtggccaatggctga

SEQ ID NO: 501252 - DNA, 2697 bp, Stenotrophomonas maltophilia
atgcaggaagagatccgccagcaggtcctgtcgcgcatcgagcgcgactacggactcaaacaccgcgtcggcacgccatacatgcgcgggggcaagtgccctcattgcggcaagaaggagctgtacaccagccacctcacgccgtgggtattgcgttgcggccgtcaggcaaagtgcggacaggaggtgcgcgtgcgcgacctctacgacgacctgttcgacgactattccaagcacaatccgcagacgccgcaggcaccgcacgccgccgctgacgcctacttggcgaccggccgcggcttcaacatcaaaccgctgcagggcctctacacgcaggaggactactacgaccgcgccaagcgccaaggtacggccacagtgcgcttcccgctggtgaagggcggctggtgggagcgtctcatcgaccgcccgcaccggttcgggaagatgaaagcccgttttgccccaggcgaaagctacgccggggtgtggtggggcgcggctgcccgcgaccagctgcgcacggcccgcgaagtgtggatcgtggagggaatcttcgacgcaatcgccctgctgcaacgcgggatctgcgccgtggccgccatgtcgagcaacgcctatcccgaactgtctctcaaggaactgcgggatgcacgccccaacgacctaccggtgctggtgtgggccttggacaacgagcccggggcacgtggctacaccgccaagcatgtgcgccgcgccgaaaggctggggtatcgctgcaaggcggcacagatcgagcagaccggcgagaggaagaccgactggaacgacctgcatttgcgtgcccaggctgcagaagacggcgacagccagtggcaagccgatatcgagttggcactgcacaatggcgcgctgctcctggcgcgcaccgccatggacaagggcctcatcatgtacgagcgcgagaagaacaccgagtttcaccttgaacacaactcgcgcctgtactggttcgagttcgacgcgctgcgctacgagaagctgtgccgcgagcgcgccggggaccgcgacctggccagcgaagatgagctggaagatgaggagctggccaagatccaacgcgcaagcgcgtccgttcgacagatcgccaactgctatccagaggcgctgtacttccagaagcacgaagccaccgacgagagctggtacttcttccgcgtggacttcccacacgatgcgccctcggtaaagggcacctttaccggcgctcagatcgccagcgccaccgagtttaagaagcgcttgctaagtcttgcgcagggcgcgctgttcagcggcacggggaaacaactggaccgcgtgatggacgcgcagacgtttggcatcaaggacgtggccacggtcgatttcgtcggctacagcccggaccacaaggcgtacatcttcggcgacctggccgtgcgcaatggtgaagtcaccctggccaacgccgaggactacttcgagttccccaaactgcgtatcaagaccacgcagcgttcgatccgcatggacattcagcgcgatcatgaagcctaccgaaccgactggctgcagtggctgtggatctgcttcggcacgaacggcatggtggcgctcacgttctggtttggctcgcttttcgccaaccagatccgcagcgcgcacaagtctttcccgttcttggaggctaccggcgaggccggtgccggtaagaccacgctcctgacgttcctctggaagctgctcgcccgcagcgattacgagggtttcgatcccgccaaatcatccaaggccggccgcgcccgcgccatgggacaaacctcgggcatgccggtggtgctgcttgaagccgaccgcgatgccccggacaaggcgcacgcgaagtcgtttgaatgggacgaattgaaggactactacggtggcggcacgctggccacgcgtggcgtgcgcaacggtggcaatgaaacctacgagccacccttccgaggcacgatcgtcatcagccagaacgccgccgtggatgccagtgaggcgatcatgacgcgcatcgtcaagctgcacttccgcaagcccaacgcgacgacggagagccggcaggcagcggacaacctaaatgccctgcaggtcgaagatctgagccactttctcatcaaggccgtacgtgccgaggcacaggtgatggagaagttcggcgagcgagtgcgcttctatgaggccaagctgcgcgacaacaaggatctgcggatggagcgcatcatcaagaaccactcgcagatgcttgccatgctcgatgggttgcgcctggtcatcgacatccccgaagagctggtaacagctacacgccaagcgctggttgccatggcgatggagcgccaatcggccgtcagcgcagaccatcccctggtcaatgaattctgggaagcctacgagtatctggaaagcctcggcaatggtgagcggccagtggtcaatcactcccgcgacccgcagcgcattgccatcaatctgaacgatttcatcgccaaggctgcgcaccacagccaaccggtggcggatctaaagctgctgcgggcgtacctgcgagactcgcgccgctacaagctggtcgacgcgaatctgacggtgaacagcgccatcaaaaccaatagcaccggcggtggcgtggccgttcgctgctgggtattcaaaaaatga

SEQ ID NO: 501253 - DNA, 258 bp, Stenotrophomonas maltophilia
atggccagtcacaacgggcacacgccaccgcaccggaacccctcgcgggccgttaccgaggcgcatggccatctcatcagcgccgacgacgtgacgcgcctgtggcgcatctcctacgccgtcgagctgatcgccgtactccctgctgaggccgccaaggtgctgggcatcactgccgaccacacttcggccgtggccgagtacatcagggacgacctgcggggaattctcacccggtccaagccagcagacgaatag

SEQ ID NO: 501254 - DNA, 306 bp, Stenotrophomonas maltophilia
atgtcccccgcaaatgtcgtgatgccgaccgaggcgctgcgcccggtcattgttctggaaacgcagatccccggcttcggccttcgcgcctccttcgaccagcggcgagtgctgtacttggccctgatacacatcgattccgacaccgccgcaaccgtctccgcgcacaactcgcggaatgtgcagcgcgccgctaacgaaggcatccagaccgggaccgttgtgtacttcctcgccaaaggcgaggccgaccgtttcttcgactggctgcgcaccggtgacagctatccgggcggggtgaattga

SEQ ID NO: 501255 - DNA, 243 bp, Stenotrophomonas maltophilia
atgccccatggcgccccttccacgcccggcaatgcttccgcgcgtcaactctcgcttaccctcggcctgatcgccgacaccctcgcatggccctctgaggactatcaggcgttcatcgcccgactggtcggcgtaggcatgtccccgctcgccatcaccctgggcgacgtgctgatggcctacacggcacagtgcgatgcccgcaggggcgcgcaccaggacgacagcaagggggcgcactga

SEQ ID NO: 501256 - DNA, 207 bp, Stenotrophomonas maltophilia
atgatgcgacataaaactcagcgtgacggttggtccaccgccacacaaccgaacttcgtcaccagcccgagcggtgttgagtacgtgccgtacgcggaaaaatcccgcaatgcggccgaactgcgcgccttggtcgaggcccacattgccgccggtggcgactaccagcaactgccctcaactgtcgatgcgcgggtgtccgcatga

SEQ ID NO: 501257 - DNA, 333 bp, Stenotrophomonas maltophilia
atgactgccacacgccgcacgaatcgccagaaactgcgtacgccggaggaagctcgccagcacctgcgcaacatgggaatcaccgtcgtcgcctttgctcggcagaacaacctcgaccggcacgcggttaacgatgcgctgcgcggtgtcggcaaaggcaacttcggcaagtcgcatgaagcggctatcgcgcttggcatcaagcgcgatcccaattcttgcacagttcccgccaaatcccgtcagttgaccgcagggcgtggcaagacaaacgaggcctcccccaagcgcacggccgccaagcgggcatccaaggttcggggcaaggtatga

SEQ ID NO: 501258 - DNA, 432 bp, Stenotrophomonas maltophilia
gtgagtgtgggtcttaggctgaaggaagaaaggaagcgtctgggccttacccaagaggccatgggtgtcgcgtgtggagtcaccaagcgcacacagattttttatgagatggatagtgtgggagccagcgcggcttacctcaccgccgcctatgaactcggcgtcgacgtggtctatttgctgaccggcacccgcgagcgcctggccgcagccgatgccgatctgctcgatgcctggcgcagtgcgtcgccttcggcacgtgccgccgtgatggccgcgttgcgtggcgtagcgccggcgtcggccacaagcgcgcctcgaacctctttcgagaacaccagcatcggccagcagatcagcggcgatgttgatctgcgcggacaaaagatcgttgtcaaggctccgaaaggttcgaagaaagccgcccgctga

SEQ ID NO: 501259 - DNA, 372 bp, Stenotrophomonas maltophilia
atgggttgcagcagtgatgtgaagcgtggcgaggtggtgtgcgtgtgcggcgggcccaccgtgttcgagggggccgtgattggccaggtgtttaccggcgatgtgcagatgcagtgtccccatgcgcaccagcacagcgcggaaggcgacgaacgcgaacgggcgcccacggagacggggcgcccgttgtcgacagcattgatcgcgctggcgatctggcaggccacttacccggcggcagcggttgcggatgactgcggatcttcgctcgcgcatgccgccatgttcttcgccgcaggcgcgctcacgcgttacttcaagccgagacttctgcgctggattcgccgccgcgctcaagctccagcgcggtaa

SEQ ID NO: 501260 - DNA, 1020 bp, Stenotrophomonas maltophilia
atgagggcgacaccgtacccgatccccgcatggcgagtggtgctggacgggcaggatctgaccgaccgcctcgcgccgcgcctgctggacctgtcgctgacggagagccggggcgacgaagccgacgaactgaatctgcggttgcacgaccatgatgggcgcgtggcgctaccgcgacgcggcgtcacgctgcaggtggccatcggctggcgcgaaagcggattgttcgataagggcacgttcgtggtcgatgacgtggagcacagcggcgctcccgatatcgtctccatccgcgctcgctcggcggatctgaccggtgctgtccgcagccgccgcgagcgcagctggcatgacgccaccctgggcgacattctcggcacaatcgccgccgagcattcgttgcgcccgtccattgccgcaaaccttgcgtccgtccgcatcccgcatcttgaccaggccaacgagagcgatatcaatctcctgacgcgcttggggaagcgttttgatgcggtggccacggtgaaagccggcgcgctgatcttcgcgcctatcggcgccggcactaccgccagcggccagccgctgcccggtgtccagatcactcgtgcatccggcgatcaacaccgctacaccgtggctgaccgcgagaagtacacaggcgtgcgcgcgtactggggcgaccgcaaggcagcgcgtcgcaccggtgtgctggtgggcacgtcagagaacgagaagaagctgcagcccacgtatgccactgccgaggaagcgcgccagcatgccgaggcggagttcaaacggctggatcgcggcacggcccagctcagctaccgcctggcgctcggccgcgccgatatctatccggaacagacggtgacggtgagcggcttcaaaccggaaatcgatggcaccgattggctggtgtccaaggctacgcacaccgtcgacggcggcggaggctttgttaccgcgctggagcttgagcgcggcggcgaatccagcgcagaagtctcggcttga

SEQ ID NO: 501261 - DNA, 399 bp, Stenotrophomonas maltophilia
atgatgatgacctacggcacgtttgtgttttccctctccacagcggcctatgagcagctgcagcggcagatgacgtggcgccacgccagcagcgaccggctgggcgcacgcccggcccgtcagtacgttggcccaggcgacgacaccatcaccctgcagggcaccatcgccgccgagctggtgggcgatctgcaggtgctcgacacgctgcgggagctgggcgaccagggcaagccacaggcgctggtggagggcagtgggcgggtatatggcgcctatctgctggtcagcctgagcgagacgcgcaaggagttctttcccgacggcacgccgcgcctgatcgaatttcagatgcagttggagcgcgacgacgacggcgccaccgaggcggtcgcatga

SEQ ID NO: 501262 - DNA, 330 bp, Stenotrophomonas maltophilia
atgactgacaagacgaactccgccgccggcgcaaccgacaccgtcgatcagaacacgatcaccctcgactacccaatccagcgcggcgagcaggtcatcgccgccatcaagctgcgcaagcccaacgctggcgagctgcgcggcatcaagctggtggaactgctgcagatcgacgtgagcgcggtggccgcgctgctgccgcgcatcaccgagccgactctgacggctgctgacgtgaacaagctggacccggccgacctggtcgccatcggcaccctcgccgctggtttttttgtgccgaaggcgcagcgggaattcctcagcgcgtag

SEQ ID NO: 501263 - DNA, 1170 bp, Stenotrophomonas maltophilia
atggccaccgactaccaccacggcgtacgcgtcatcgaaatcaacggcggcgtgcgtccgatccgcactgttgccaccgctgttgtcggcgtcgtctgcaccgcgcaggacgccgacgccacgctgttccccctcgaccgtcccgtgctgctgaccgacgtgctgggcgccgtcggcaaggccggcaccagcggcacgctgcgcgccacgctgcaggccattgccgaccaagccaacgccattaccgtggttgtgcgcgtcgccgaaggttccgacgacagcgccaccaccgccaacgtgatcggcaagaaggacggcgccaccttcaccggcatgcaggcgctgctggtggctgaggcgcaggtaggcgtgcgtccgcgcatcctgggcgcacccggtctggacacccagccggtttcggccgcgctggcggtcatcgccaagaagctgcgcgcgatggcctacgtgagctgtgccgccagtgcctcggtcagcgaagccatcgcctatcgcgagcagttcagccagcgcgagctgatgctgatctatcccgacttcgtcgcgttcaacactgccgacgccaccaccagcatggcgttcgcgaccgcccgcgccctgggcctgcgcgcgatgatcgatgagcagcagggttggcacaaatcgatctccaatgtggccgtcgccggcgtgaccggcatcagccgcgacgtgcactgggacctgcaggatccggcgaccgacgctggcctgctgaacgccgccgacatcaccaccctcatcaactccaacggctacaagttctggggttcgcggacctgcagcgacgacccgctgttcgccttcgagccggccacgcgcaccgcgcagatcctggcagacaccattgccgaggcgcagatgatctacatcgacaagccgatgcacccttccctcatcagcgacatgctcgaaagcgtcaacgcgaagttccgcgagctggtgaacgcaggttatgtgctgggcgcctcggcctggtacgacgaaggcgcgaacctgcccagccagctgaaggacggcaggctggcgatcgactacgactacacgccggtgccgccgctggagaacctgctgctgaaccagcgcatcaccgaccgctacttcgccgacttcccggcccgtatcaacggctga

SEQ ID NO: 501264 - DNA, 360 bp, Stenotrophomonas maltophilia
atgatcggcatggacggtcaggcaggcagtttcaaggacgacaccgcgcatctgcggcagtccattgccgacattctcactactcccatcggctcgcgcatccagcgccgcgactacggctcgctgctgccggagctgatcgaccagccgttcaacgaagccacgcggttgcgcctgtttggcgctactgcaacggcgctgatgcgttgggagccgcgcctgcgcctcagtcgcatcaccctctcgcgtggtcaggagccaggcacgttcgtgctggatctggatggccagcgcacggtgcccgccggcgcctccagcaccacccgtctctctgtcccgcttcgcttccgcaccccataa

SEQ ID NO: 501265 - DNA, 567 bp, Stenotrophomonas maltophilia
atggatagcgcccagccccaacagatcaacaacctgctgcgccatggcgtggtgacgacggtcgatcatgcgcgggcgctgtgtcgtgtccgcacgggcgaggcccataccgactacatcccatggctggcatccgccgccggcacgctcgcggtgtgggcgccgccgagcatcggcgagcaggtgacgctggtgtgcagcgacggcgacctggccaatgcggtcgccctgcgcggcctgtactgcgatcagtaccccgccccgtccgacaatgcggatctggtcacggtcacgttcagtgatggcgctgtcatcagctacgacagcgcgtcacatgcgctcgcagccatcctgcccagcggtggcattgccacgatcaccgcagatggtggcgtgacgatcaacgggccggtcaccatcaacggcgataccagcatcaccggccaggtcaccatcaacggcaaggctgaggcttccgaggacgttgtgggcggcggcatcagcctcaagcagcataagcacggcgcggtgcagccgggcagcggcacgtcgggaccgccggcatga

SEQ ID NO: 501266 - DNA, 651 bp, Stenotrophomonas maltophilia
atggcgagcgggtaccgcatcaatggctatgacttcgacgacctgttcgaccccgacgtgatgggcgatggcccaaccgccagcggataccggcggagcgggcagccgctccggtatgcccacatccagtacggtcagaagcgtggcgacgtgggatatcgctccggcggcgtcgacgtgtcgaacctgtgggctgcaaagggcacagcaacctacgttctgccctttcacggcaagggcttctccgcacacaaccaatccgacaccaacgcgcagggcaacacctcggcgcaggtggagctgcgcattaacgctgatggcgcctacgaggtctgggtgtcgaccatcggcggcggcaacaactccagccgcgtggcagagcgcgggatgtggctgcgcaacggcggcgtgggcgagtacgacgtgcgcttcgagttcgccaacgtcggcgcagcgaacgttggcagtacggcgccggactggcgcaatgccagcgcttcgcagtcatgctcggcccaggtcagcgtgcccagcgcttcgggccagaatgtgcgcgcggatgtggagttccactgcctcatgcgaagggccggcgggaacgtcagccgttccatcatggtggccagcgtaggcgcggccggctggtggtaa

SEQ ID NO: 501267 - DNA, 2019 bp, Stenotrophomonas maltophilia
atgcccatcccccagatcaccattacgccggcaggctttgccgccatcgtcaacgcagagaacaccggtaccgcgccggtcaaggtcacgcaggtcggcctgaccgctcagcacttcgatgtgggcaccgtgggcgcatccgtgccggcggagttcaagcgcctgaccaccttcggtggcaaggccgttgccgacgacacgctgcacctgaacgtgcgcgacgacggcaccgatacctatacgctgcgcggctttggtctgtacctccaggacggcacgctgtttgccgtctactcgcagtccacgcccatcatggaaaaggcagcggccgcgaccctgctgctggccacggacattcggttcgccaagatcaacgccaccagcatcgaggtcggcgatatcgacttcatcaatccaccggcgacgaccacgcagatgggggtggtgcggctggccaccgagcaggaggcagacgccggcagcgatcctgccacggcgatcaccccgcgcggcctggcccgttacatcaacaaccgcttcggcaccggcgcgccttccaccttcgtcaagacgctgctcggcctggccaccgctgccatgttccgcgtcgagctgggcctgaagtccgctgcgctgcgcgatgaaggccatgggaacggcctcaacgccgatctgctcgacggtgcgcacggtgattactacctggagtggaagaatttcactggcttgccgaacaggtttccgtctgctccccacacgcaccccatcggcgaggtagatggcctgcagccagcgctcgacggcaaagccaaccgtgccggagacaccttcaccgggccgctggcggtgaacggggccatgctgcgttcctacggatggagtggggtggccagcaacggcatcctggtgctgggcgataccggctcctccattgtaaaaaacggcgcctacttcgacttcaacaactcggcgggcgggtataccgccacgctttctgccggcggcacgatctggacaagcgggaacttcgaccccgccagcagggtcaagaaatcgggcgatgtgatgaccggctcattgaccatgccggagctgtggctcaagaacggcggtaacgcgaatggatggattggaacggctgccagctccgtctacttcgatgctcgacagaatggctccgacacacccaatgcgagcatgcgactccgcgcaagcgacttcacctgggccaatagcactggcgtcaccgtcgcgagcctgagcggctcgggggccttcgttgcgagctacggtgtcaagggcagcggcgcgttcgatccaaacgcaccacaggcggcggggctcatctcctccgggtcatatggcggcggcatcgccatgcaggacggaaaccactgggcgtggctctacactgcggccggcgacacgatcttcgcacgcgtgcggaacgggtccaccggggccacaaaggagctgttcaacgcaaacaccagctcgttccgcacggaaactaatcacgtcattcagaagaacattccggaaatccagttctattcgcctgccggcagcgttggctataaggtcttcgccaacatcagcgattcagttgccgatggcatccacttcttcaacatcggcgccaatctcactctcgcaaagatcaaaaatagcagcgcggaattcgtcggctccgtcatcgctgccgggggcttcgacttcggctcgtcgcgcaagctgaaggacatcgacggcccagtgtcctatggcctggcagcagtcgagcgcatggaactggccgcaggccgctacaagccggagtacaacggcgacgggcgccggcggctgttcttcgtcgccgaacagctggcgcatctggtgcccgaggctgtggatatggatggcgtcgagttcgacggagagcgcgttccgtccatcaagctcgaccaactgctgccggtactggcccgggcgattcaggagcttgctggccaggtccgcgagctgcgggagagggtctga

SEQ ID NO: 501268 - DNA, 558 bp, Stenotrophomonas maltophilia
atgactgaggtgcgcaccctgctgccccccaatgccaccacgctggaacgggccgtggagggcgccgatgcgcagctgatgggcatcccgatggttcaccacctcctgtggaacccgtggacgtgcccggcggagtttctgccgttcctggcgtggacggtgtcggttgacacctgggacagcgagtggccggaacagatcaagcgcgcccgcatcgccagctcgttccagatccagcggcacaagggcaccgcgcagagcattgccgacgtggtggccagcttcggcggacaggtgcagctgcgggagtggtggcagatggacccgcccggccagccccacaccttcgagctgctgctgaccctcagcggtcaaggtgggcaagacgctaccgccgactttatcgaccaggtgatggctgcggtggaccgcgccaagcccgtgcgttcgcactactccttcactcagggcatcaacgccgagggcgccatcggcgtcctgggcgtggcccgcgtgcttacctctacccgcctgcagctggccgccagcgaaccgtag

SEQ ID NO: 501269 - DNA, 891 bp, Stenotrophomonas maltophilia
gtgtccacatttaccgccatcgaagtcgacaagctgccggcgcccgacatcttcgagcagcgctcgttcgagtcgatctacgccgagcgtctggctgagttccgccgcctttgcccggagtacaccgccgtggtcgaatccgacccggtggtgaagatcctgcaggccagtgcgtaccgagaggtgctgctgcgcgagcagttcaaccagcgcgctcgcggcctccttcttccgtactcccagggcggcgacctcgacaacctggcggtaccgtacggggttcagcgaaagctactgacccccgcagatcccgagacgggcacaccggcggtctacgaaagcgattccgatttccggcgccgcatccagctggcgcctgagggcctgtcagttgctggccccgaaggggcctacatcttccacaccctgtcggccgacgtggccgtactcgacgccagcgtggccagcccttcgcccggcgaagtcgtggtgaccgtgctttcactggagggcgatgggacgccctctgcgcagctgctggctgcggtggaatcggccctgctcaacgggaacgtgcgccccctcaccgaccatgtgactgtggcggcagccaccattgagccgtacgaggtgcgcgcgcagctgaccaccttcaacggacctgacagcgccctggtcattgccgaggccaaccgccgcatgcggcttttcctgagccagtcgcagcggctgggccgtgacgttcctctctcggcgctgtattcggccctgcatgtcgagggcgtgcagcgcgtgcagctggacagtcccgccgcagatatcacggtcagtccgcagagcgcggcgtactgcaccgctgtggtgatcgaacacgtgggcaccaatgactga

SEQ ID NO: 501270 - DNA, 525 bp, Stenotrophomonas maltophilia
atgctctaccgcgccctcgcactggccgccctggtgctggccaccgccggtctcttcagctgccagcagtcgcgcgtcagccgcgccaccatcgcgctggacaaggccaacgcggccttggccaaggccgtcgccgacaacgccgccctagccagcagcctcaagctggccgaaggcaccacccgcgtcgtgaccgagtacgtggaccgcgtacagctggtgcacgagcgcggcgacaccatcgtcaaagaggttcccatctatgtcactgcgaacgctgatgctgcctgtgttgttcctgctggcttcgtgcagctccacgacaccgccgcgagcggcagccccaccgccggccctgccggaaatcctgatgcgcccgccgccgccactccgctctctgcggtcgccgaaaccgtcgccagcaactacgccacctgccacgcaaccgccgagcaggtagtggccttgcaggaactggcccgcgagctgcacgctgagcttgaacggcaggcaggtacgccatga

SEQ ID NO: 501271 - DNA, 276 bp, Stenotrophomonas maltophilia
atggctgaactactgaccaccgccacgctgctgtgctgcgtggccatctgcgtgcgcctgctgacctaccggccggcgcccaacgccaaccatcgccacggcatcgcctggtgcgcctggctgctgattgccagcaccggcgggcaggccctgcagatcatcctgcagggcgccggcgcccgcgtcaccgcttggcagctggcactgttggtggtgctgctggtggccgtctatcgggcgcgtgggaacgtggcccacctgttcgggagcaactga

SEQ ID NO: 501272 - DNA, 354 bp, Stenotrophomonas maltophilia
atgaccgaaccaacttccaccggcagcatggccgcactggccaccggcgtcggcctcgcctcgctgctgccgggcatcgagacggacgcattcatcggcgcgttcgccggtgccacactgttcgtcgtatcggccaaggatctgtcgctctggaagcggctgatctacctggccatcagcgtggtggccggctacatgggcggcacggaggtcatgcgccggtttgacgtggcgtccagcggcctggccgcgttcctgtgtgcggccaccatcatcaccctcaccctggccctgatcgagcgcagccgcagcgccgatccgagccgcctgccgcgcggaggctccgatggctga

SEQ ID NO: 501273 - DNA, 216 bp, Stenotrophomonas maltophilia
atgcgcgtccgctcgctacagggcgacaccatcgacgcgctgtgtcatcggcaccttggaaccaccgccggcatggtcgagagggtgatggcgctgaactatggaatcagcctgcatggccctgtcctgcccatgggcaccgtggtggaactgccggacgtaccgacaccctcaaccggcgcagtgatgcgtccccttgtccagctatgggattga

SEQ ID NO: 501274 - DNA, 1011 bp, Stenotrophomonas maltophilia
atgaccgacactgaccacggcgcacccagcgcgccgccggcgagtatcgaggcgttcacctttggcgaggccagcccggtgctggaatcgcgtggcttccttgactacctcgaatgctggcgaaatggccgctacttcgagccgccggtggatctgcaagggctgtcgcgcaccacgcgctccaacccgtacctgcacagtggcctgacgttcaaacgcaacatgctggtgcgcacgttccggccgcaccggctgctgacccgcgaggtgttctcgcagctggcgctggattacaccaccttcggcatggggtatgtcgagcggcgccgcgccatgtctggtgcggcacacagcctggccgtgccgctggcgcagtacgtgcgccgtggcgtgcagcccggtgagttctttcaggtgcgcgccgggcgggtagagcatgagtttccagccggtgaggtgttccagctgcgggaggcggatgccgatcaggaaatctacggactgccggaatggatgccggccgtgcaggccgccctgctcaacgaatcggccacgctgttccggcggaagtattacaacaacggctcgcacgccggctacatcctctacatgaccgacccccagcccgagggcatggacgtggatgcgcttcgtgatgcactgcggcagtcgcgcgggccgggcaatttcaagaacctgttcgtgcactctcccaacgggaagaaggacggcctgcaggtgattccggtcagcgaggtcgctgccagggacgaattcaccggcatcaagagcgtgacccgtgacgacatgctggccgcgctgcgggtaccgcctcagctactcggtatcgtcccgcagaacagcggcggctttggctcgatccgggacgcagcggcggtgtgggcggcaatggaactcgcccctctgcagacgcgcatgaccgcgatcaacgagtggctggggcaggaggtgatccgcttcgatccgttcgagctgggcaccacagtctga

SEQ ID NO: 501275 - DNA, 798 bp, Stenotrophomonas maltophilia
atggacccactgcagcaagcgatcaggcaggagatagaccgtgcgcaggcactcgccgcagaagcggctacgcggcaagccaccccgccattgcgaagggcccatggcaaggaaacggtggcccgaatcgcggaagaggcattggccttcatagaggcggcacgcgatggactccccagcggcgactacgcaagggtcgagcgggttgccgttacaggcgcgctacttgcctacggactcgatatcgcctggtcgatctgccacctgctgcgaacggagccggagcgtacgcatattgtcgcgctcacgctctggcgccctctggtggagacgtggctgcgcgctgtgttctttgccattgaagccacggacgacgagctttcagcattccgagcgcgggatgaactgccgaaacgggcgtggcccagccagccacagaagctccacgacattaaaacgagcctgattgccaaactcgtggcatctgccatctgccccgacgcccccgagctgatccaaggcctcgcggacgaactgacggaatggcacggcttcgtgcacggcggcgagatagtcgtaactctcttcgacaacaacggcacattccgatcccaggtcggccctgaccacatgggcctcaaagtccagcgcgtggccgtcatgggcttcctgatcggcctgacagggttggtggtgtcggcccagcaccgcccaagggaagaactggaaccaacagctgccagactccatgcactgattacggcattccaagagcggtggcagccgtacaccgactaa

SEQ ID NO: 501276 - DNA, 666 bp, Stenotrophomonas maltophilia
atgtgcggccgcttcgtccaacgccccgtcctcgacttcggcctgccgtcgctggtcgacctcgcgccggcgttggccgagatcccgcccagcttcaacctggcgcccacacaacgggcgtcggtcatcctcgatcgaggaacgggcaggcagctgtctcggctcgcgtggggcctgttgccgttctgggccaaggccaagagcctgcagggctccaccatcaacgcccgcatcgagacggtggccaccaagaacagcttccgggacgcgttcaagaagcgcagatgcctagtgccaatggcgggctactacgagtggtcgatcagcgacgtggacggcaagaaagatccctggttcatccacgccgacggtccactttgggctgcaggtctgtgggaggacacaagcccgctgttgcctgacggcaacctgggcaccttcaccatcatcaccggcgacagcagcggggtgtcggccgatatccacgaccggatgcctgtctggatcgaccctggccagctcgacgcgtggctcacggctgggccggaggaagcgatggcgatgcttctggcgtccaagccgcccgctatgcaggcttaccgcgtgagccgggctgtgaacaccccacgcaacaacaccgagcagctcctgcagcccgtagcctga

SEQ ID NO: 501277 - DNA, 552 bp, Stenotrophomonas maltophilia
atgcttcaaggcgaggcggccattctcggcgcctgcgctgcgttgtggggtgtgaaccagtggcgcaaggaacttcgctataagcgcaattccgatcttgccgtaaaggccctcactgccgcaatcgggttggagcagagccttaaaattgcccgacgtcctacgatggaatgggaaattgatcgagcattcgaacgggggcgcgtgctaaagctgttctcctacgaatcccgccttaaagcgctcaaggatccagatcatagttctgagcttggcgcgcttctcaatcaagttgcagccatcttcggccctagccaccgggatgccatcaatgcgctcctgctgacccacacgctcgtgatatccgcgttggagcagtcgattgtgcttcgtaggagcattgacacgccgaacccgatgggtaatgcctctgagaccattgaggcgctttcctataacttgttcccgaaagacagcggggaggatcacctcggagaaggcattgaggttgccgctgagcgcataagagagctgtttcagaaatccatgtag

SEQ ID NO: 501278 - DNA, 1083 bp, Stenotrophomonas maltophilia
atggcaacgctgcagaatcggaacggccgctggcgcgctatggtgcgccgcaagggccacaaagaacaaacccgcacattccccaccaagaccgccgctaagacgtgggctgaccgcgtagagcgcgagatggccgaccttgaagcgcgaggcggcaccgccggcgatgacaccacgatcaacgaactcatcgcctggcgcacggacaccctggccagcgtaaaggcggtgtcgaagacacagtccggcaacatgacccgcctgcaggagagcctggggcacatcgcggccagacaacttaccgccggcgacgtgatcgagcatgctcggcgccgggtcaccggaaaccacatgaccggcaagggggtcattatcccagcttgctcgccggcaaccatgaacgtagagctgggctacctttccgagcttctgaagctggcggcgcccctgaaaggcgtaaagctgctggtggacccggtcgctgaggcccgccccgccctgcggctgcttgggctggttgggaagtccaagcggcgcgaccgaagaccgaccgatgctgagctggggcagctgcgcgaccatttcacacaggcggcctggcgctcgcagatcccgatggtggacatcatcgatttcgcgattctgtcggccaagcgcgaaggcgagattacccgcctgctgtggtcagacatcgatgtggccacgcggaccatcctcctgcgtgacgccaagcatccaaggaagaaggccggcaaccataagcggtttgcgctgctgggggatgcctggtcaatcgtgcagcggcagccgcggatcgatggggaggaccggatcttcccctacaacacgaaatcgatcagcacgtcatttacgcgggcctgcatccgtctaggcatcgtggatctgtgcttccacgatctccgacacgaagctacgtcgcggctgttcgagcagggctacgatatccccgaggttgcgtcggttacgcttcacgaatcgtggaacgagctgaaacgctacacccagctccgaccggaaacgctgcatcgcccgttgctacccggaaaagaccttctcaaatga

SEQ ID NO: 501279 - DNA, 270 bp, Stenotrophomonas maltophilia
gtgccggcgatcaccatcggtgcgggcctggacaagctggacggtggggttgaagccggccgcgcgctgcgcgagaagtacttcgccgactgctaccaccaggcctgcgatgcctggacgccgagctgggacccgagcggccacgccgccgacaccctgctggtctacgacctgggtgcggagctggccaacagccgccgctggcccacgtgggaaaaggaatcggagttccgcagcgcgcgtgacaagagcgaagcggcccgccgctga

SEQ ID NO: 501280 - DNA, 1557 bp, Stenotrophomonas maltophilia
atgtatggacttcgagaaatttaccggagcagtttcaaggctcgacccgaaagcgctctccgttcgccgccagatgttttcgcggtatgtggttatttcgccaaggtcagcggctgctacaggatctatgcgcagccaggcgctattgattcagggttcgtaaaagatgccgaactctccgggaagcggtggcgtgaactgctcgataccgggcgatatcgaatgcgggcaatgccagaaggtgtggttgacgcctgggcctctattggaagtgaaattgacgctcttccagagggtggacagcttagttccaagtttgaaaggaattgtctctatctgattattgcctgcgatgcagcatctgcgggcgtgggattaccgggaaatagtctcgggttgtttgagcttgtttcggagctagggctttcttcaggaactctttgccaaaatgtccccgttgacgcgcttcgagtactgccgaagcagcatacgccccgatctgggtttaatgttcgatcgcttactcaccatctcgcactgtgctccgcgagcgaagtcaagccggtttggacgcagcttccaactctgcctacagaaaagcgaagctcttacaacgtactggtagccccttggccgcttgtgatgaacgcttcagatctgaaaatctccgaaggtaggccttcaaaccttgatcggacctttgggtacttcgactatcttccgtctcaaccaacggcaaaggcagccgccttgcattggcttaaaaagatcattggtaaggttacatcaattggccagaaggttgaccttgttgtattcccagaatgttctctcagtgagaaagactggaaggaaatatctacagaagcatcgatcagcggcatggcggtagtagctggggtaagaggaaagtcccgagagtcggggtcctttacgaattctgttaggttcagcgcaccatactcttggcagcaatcagatccccagtacaagcatcatcgatggaggatcgatgagtctcagatatccgcatatggtctcggttcaactctcggggcctcatgtgattggtgggagaacatcgaagttcagccaagaagtttgaacttttttgcgatgagcgagaatatggtcatctgccctttgatctgtgaagatctggcaaggcaggaccccgtcgccgaactggttcgctgcgttgggccaaatatggtggttgcattgttaatggatggccctcagctcgccgagcgctggtccgcacgctatgcttcggttcttgctgatgacccaggtagctctgttttgacagtaacaagcctgggcatggttaagctctctaagcccaatggtatgcctgtccggcgcattatcgcctcatggcgagacgcatttggtcaatttgtgccattagagctgggtgatgcagatgaagcggttgtattgaatcttcagtttcggaaaaaggccgaggctaccatcgacggacgggttgatggtggtgtcgcctcatatccagttctgtgtggcattcatccagtatccactagggagtaa

SEQ ID NO: 501281 - DNA, 630 bp, Stenotrophomonas maltophilia
atgaagagctcctgttttgcagaggagcagattgcctacgcgctctggcaggtcgagccgaggacagcggttggtgaaaagggcgttgcggaggcgacgttctatatgtggcgcaagaagtacagcgggctgagtccgttcgagctcaagcagctgcgattgctggagaaggagaactgcgagctcaagcagttggtggccgatctgagcctagacaaggcgatactgcaggaagttgttacaaaaagctctgaggcaagcccagtagcgtgtctgggggggggcgggctgcagaagcgatttggtagcagcgagcggcgtgcgctgcggatcgtgtcgatgtcgcgctcggctttttcctacgcgcccaaggtgcatgacggtagtgccatccgctggcggatgcatgaggtgacttgggcgcggattcactacggcggtgagcgcgtgctggtgatgctgcgctgggaaggctggcgggataatcacaagcgcgtgcatcgcatctacaaggaagaggcctgtctttgcggtaagccggtcgcgcagcagtcggagcagtcggcgccggcagccgatcaagatggccacggctccctatgccctgttgggcatggactctgtcagtga

SEQ ID NO: 501282 - DNA, 867 bp, Stenotrophomonas maltophilia
atgaagaaagtgaaagcaaaattcgcagctgagcgattggccttccatgcagcaatccttaacaagattcttaccctagatgaggatggcaatccttctaattctgatagcgccagcggcccgagcaagaaaatcagtaaacatatcgctaaacagctaagggttgagacaaaagcgaaacgggccccaggacagatctcgggagcaagttttgagagcgcttgtactgacttcattcgctccactttcgtatcgctgaatcatattcgccccgggaactggctgatcaaacaggtcgggggacgcaatcgtcgaacaatcgcgagcttccaacagtatgcgcacttggtcgcgctcgacaaggccacgaaagggaacaaagaacttgcggccgcactggggagtgattacaccatcacgccggacatcatcatttaccaaagcccaattggggatgacgtcataaatgcagcagatgaattggtagataacagcatagcgaatcgcgcctctatccgaaaggcgaatggaggtttggacttgctgcatgccagcatttcatgcaagtggacgatacgcagcgatcgcgctcagaatgctcgctctgaagcgctcaatctaattagaaaccggaagggccgcctgccgcacgcagtagtggtaaccgcggagccactgcccagccgactcgcctccatcgctctgggcacaggtgatatcgactgtacctaccattttgccctatatgagttgcagagagcagtcgatgaacttggcctggaagaggccaaagagatgctggccattctcgtcgatggccagcggctcaaagatattagcgacttaccattggacctggcgatctaa

SEQ ID NO: 501283 - DNA, 957 bp, Stenotrophomonas maltophilia
atgagtcaattcacctcccttgagatgtgcgctggtgctggcggacaaggccttggcctggagatggccggcttcgaccactcagcgctcgtggaatgggagtcggctgcatgccaaacgctacgcttgaaccgcccgaactggaacgtgattgagggtgacctccgcgaattcgatgcatctccgtacaagggcgtagatctcgtagcgggtggcgtgccctgccctcctttctctaaggcaggaaagcaacttggtgccgacgacgagcgcgaccttttccctgaagccattcggattgttgatcaggttaggccccaggcaatcatgcttgaaaatgtccgaggactactcgaccctaaattcgatgattataggaagggcgtcgagaacgaacttaagaagctgggatactggggtgactggcgacttcttcacgcgtcggattacggcgtctctcagcttcggccccgtgtcatatttgttggtctgaagaaggagcttgctccttcattttcatggccagaagcactgaaagagcccccgaagacggtaggtcagctcctgcacgacttgatgggcgcgcgaggctgggatcaagttgatgcatggagggaaggcgccaacgcgattgcgccgactctcgtcggtggatccaagaagcatggcggccctgaccttgggccaacccgcgccaagaaagcatgggcagctctaggtgtcgatggtatggggctttgggaccaagctcccgaggcagacttcgttggtatgccccgcttgacacccaggatggcggcaaggatccaaggatttcctgatagttggggatttgcaggtcgaaagacggccgcgtaccggcagatcggcaacgcattccccccccctgttgcagcatcggtagcaatccagattaagaaggcgcttctgcgcgagcgctcctcgaaggcggcatga

SEQ ID NO: 501284 - DNA, 867 bp, Stenotrophomonas maltophilia
atgaatggccttttttcacaagttcctcagctggatgaccccgctctagagcaggttgccgctgcgctctcacgcgaccctgctctgctgagcaaagtggggcaagcgctccgcacagcgttcgacgaagtgattgatgcgccccggacggggcgattttgcattgatcagctagagaagactgaaaagacctacatcggtacaaaggtcgagatcctgcttcgcaaagccttggccctggagcggggagtcttattggacaatctaattgccggccacgaggttgataccaaattcacagtcaagaacgattggatgatcccgcaggaggcggttgggcagctttgcatgcttgtccgtgcggacgatgtgaaggggctttgctggctcggcctgttgagaatgaccccggcagtactgaccaatggccagaacagagacgggaagaagtccatctccgctgccggtaaggcgcagattcgatggcttgtagaaggtccgatgcccaggaacttcatgctggatctccctgaagtggtgcgctcggcaatcttggcccagcctagtgggcggcagcgagtgcgcgcgctcttcaccatggccacgggccttctcatcccacgggacgtcatcgaacagttggcacaacagagggatgcggtgaagcgggctcgcgagatgaaggaaactctgggaagagagggctaccaggtcctttgtgccacctatctcgcagaccgcgaggtcatgattgcccgtggattcaaacccgtaggcagagatgaatggctgagtctcagatcctctgatgaccagcagggctctaccttcgcggctcccatccagcaacttccaggaatcggctga

SEQ ID NO: 501285 - DNA, 804 bp, Stenotrophomonas maltophilia
atgaacgccacgcgcggtcgaggacaggggaaggctgtgagcaggtggactgatgacgaattggctgctgccgtcgaggcgtatcgccaaatggaggcgcgtcttgccgatggattgatccctgaaaaggccaggatctatcgagacctggcaacccgccacggacgcacgcccaaggcgtgggagtaccgcatgcagaacatctcccatgttctagatcagacaggcaaaccttggctacccgggcttctcccagcatcgaacgtgggtgcgagggttgagccgaaacttgcaaagctcctcgggctttcttgtgagacgctcacatcgatctctggtcctacaaggggactgttggagcaggaggccagagcggcggaggcatctggtagtttctccccagcagatgaggtggacgagaggcaacgcgtgttggcagctatcgttcggcgccgcgggcagcccgcgttccgtaaggcactgctggacgcgtacggcagttgctgtgctatgacggggtgcgatgtggtcgatgcgcttgaggcggcccacatccagccctactcaggcctaaagagcaacgatgtcaggaacggtcttttgctccgtgccgatgtgcacactctgttcgatctgtatctgataaccatcaaccccggctctctgaggatcgccgtggcgcctgctctccagcactccacctacgtcgaattggatggccgtcagctaagcactcccatgccgtctgagctgtccgcctaccaggaatcactcacttggcatcgttcgcagtgccagtggtag

SEQ ID NO: 501286 - DNA, 600 bp, Stenotrophomonas maltophilia
atggtactgctgcccctgcttatgggcggctgtggtacgcaggcaccccagatgtatggcgatggtttccccgtcgccaagccgatggacctggtccatgcgggtgcgacggtagaggcgcgttttgaattgccgccgccttgggagaaagatcccaaacctcgcacgttcctgatcggattccgtaccggtgggcctgccaagcgcccggacatgaaaccgggcgatgtcgacttccttgaagacgcccggattcccctgaaggtgcagctgtggaagctggatggggacaccgaaacgcccatagcactacaggtattgaatcgcgatctgcctgctgtctggcagggcagccgatatcaaccggccaagggcgatgtgtacgaatacaggagcgccgtcggcgcggattcgaacagtctggtcaacgcaggaaagtacgacatttccctggcctacagggaatacgaggtggcccgtgccgattccggggatctgacggccggtaagtaccggctgaaagtgaccaatcttcaggccaacccggacgttgcgcatctcaacttcgagcttctcgtcgccaactacaacgtgaaatag

SEQ ID NO: 501287 - DNA, 975 bp, Stenotrophomonas maltophilia
atggacagtcaatcgaatagtgcagccgcatcccaggaaggcaagaaagggccttacaccgtcacggtctaccttgctgccccggggacacctgttgcaggcaaggatggcacgacccactcatcttcggcgggccatgcctacttcatggttgccgatggtgacaagaaagacggatatgggttttcaccgataaaaacggggatcaccgggcctgggcacgtggtcaagggggaattcgagacctatcagaaccctcggttctcctacacgctcgagatcgccaaggatcagtacgaaaaactgaaggcgtacggcgaggcgagcgtcaatcgcgatcaggaccgtttcaatctcaactacaacggtttgtcgaacagctgtgtcgactacgtgtggacaggccttggtcaggccggtctgcgacccaagctggagaagcccaatcccggcttcgaagggacgatgaaggtgcttccgaacatcgatgcgctgaagagcattcccaagccgttccctgatagcaagctcaattcgacgcacgagaatccccttcccaagaagcaaactacgttgcagaagctgttgactgaggtggagggcgaactgccgccgcacgaacgggtagccgcactgtctccggaatcgcagcagctgtttgatcgcatgcgatcggacctgcctgagaaggtgagcgatgcgcaggtgatgtcagcgatgattgctgcgcgggagaacggcattcaccagccgcaacagctgcgcgatgtggtgctgcaggaagagaagatcttcgtgatgggcacgacgcctggcttcagggccatggtggatctgaaccagccccagcaaagccttgaggaggggctggcccgcagtcagcagatcgacacgcgagtgactgagcagacccgtcaggaagcgcagcagcgcgaggcggcggcccagacgtccggcggcatgcagatgggctaa

SEQ ID NO: 501288 - DNA, 576 bp, Stenotrophomonas maltophilia
atgctgggtaatcaccgctggctgcgcgccggcctgttgatcatgttgagcgctgtgctgggcgcctgctccggccgtgatcctgtcccacccgagccactggacctggcccagccgatcgcggtggatcagccaggtcaaggggtgagtttcgagttcgagatgaacgcgcgaaattacatcccacaccgcacctacgccgtggagctggagttgcagcgccaagcgacgcgcaagcccgacgagcctgacgtgggcacaatgaggattccgttcgaggtgaccctgcagcaatggggcgctgatgcctggaaagatgttcccacctacgacagctaccaggcgggggcactcaacgcgggagagccgcttccggaatggcatgcatccagcgaatggcggtatacgtcgccgcacatgggcagtgacggccagtacacgctgagcctggttgctctgccagtggagcctgatacccgctatcgcgtacaggttcgcacggtaaaggccacgccggaattgcagcattactcggcccagttgcgggtacacgccgcccgaccgccaggaaagtaa

SEQ ID NO: 501289 - DNA, 1071 bp, Stenotrophomonas maltophilia
atggacaagccacgctacaccgtagagatcgttatcgctgcacctggcacgccgctgatcgaccccaggacgcacaagcaggccgtcgacgcggagggcattccgcagacgtccgcccccggccacatgttctacgtcctgcatgcacccggcgtgcctgcgaagagcttcggatttgctcccaaggagcacggaagcatgaatggtcctggcgccatcatggaggatgatgcaacggtctataaagacccgcgctacacgcgcaccctggagatcagtgaagatcagtacaggaagctccagcagttcggctcggacccggagaaattcggcttcagcaagcattatcaggacgtgcgcaacaactgcgtggacttcacctgggaagccttgaaccacgcaggcatcgagcggaaaagaagtatcgacgtgaacgcgctgggaggtcctgctgggcagcttcttccggatgtccgcattcccctggacatcaagggggcaggcaaggatggattccgaccgctgcgcaacatccatggcgtggacagcattgatccgccgtttccggacagcgagctcaatcagaggaaaaccaatcccatgccggagcgtagtttcaagcaacacatgttgagtgacgctgagggcatgggcgaacgaagcggtgatcgtctggcccggcacggtaacgatccgctgctctcgcagatccaccgaggcgtggcgctgctggatgcagagcggggccgcgacttcgacgccaccagcgagaacatcagcgccagcctgtacgtcctggccaaggcgaacggcctgacccaggtcgaccatgtgttgctgagcgatcgcaccgcgcaggccgacgctgcgcagaacatcttcatcgtgcagggcgagcgcaacgatccggcacagctgcgcgccagcatgccaacagcggcggctgcgcagacaccggcagaaacttcgttcgagcgtgccgagcagctgtcgcagtctgcacaggtgcgcacgcaggatgaactgcagcagcgccaggtgcaggagcagtccggtccgcgcatggcctag

SEQ ID NO: 501290 - DNA, 681 bp, Stenotrophomonas maltophilia
atggtgatgctgtacctggtcgtacgagcgctgctgccactgctggcgttcgtgctcgcgtggtggtggctggcacgcctgatcaatgcgcgcgccgctcggctgccacgtgtcccgttgaatctgccggcgcacagcagcagcccgcgcaggaaggatcggcgcatctacgcgcgcacgctgcggcgcaggccgggcctgcgtacggcaacccgcgccgccaccgcaccccgcagctggcacgtcgctgcggccatcctctcgctgctggtgctgatcgccaccgtgctggccatccccgacggcgcgcgcttccaggtgatgatggggaacctgatcggctacccgagtgccctcatcgaggtgcgggctcccgtggccgcacagccggtggtgctgcaggcatggcggcccacactcgcaaaactggggcaacccacagtgatgcgctacccgatcgcccgcaccggtggcgagcatgaagcccatgcggtcgtgcccgtgcaggtccgccagcagcccgaccggctgcaggtggccatcgccctgccggtggacaccgaaatgctgcgtgcggaactggcacggctggccgggttgccgatcgagacgatcaacgtgcagcaacgcgacgttgcaccgtggtgggagtcgggctggcagccactgcccggcccgtag

SEQ ID NO: 501291 - DNA, 645 bp, Stenotrophomonas maltophilia
atgagccctgccacgtcccgaatccgccgcatctgtgggcaggggccgatcctgctgatgctgcagctggtcgcactgttgtccgtggcactggcgtccgggttcttccattgtcgcgtcgatctgctgctggaaccgatcaccgaggcctgtggtggtccggatgcgcacgcgcggctgcagatggccgaacaggtgatggcacgcgccggtgcgttggacgactggcagccgctgagctggatcccggtcgcgggcattgcattggcgctgctgggtgcgatggccgtgtgtgccagccgcgcgctgtggctgcgtgaccggctgcgcacggcgaacgtggcactgctggtgctgcatggcgcagcgctgggcctggccggatggacgctgtatctgtacgagactgcatggaacagcgtggcacggctgtcacccacggcgtgcctgatggacctggtggcggagggcgataccccgctggcgcaggcgcaacacgtggtgttccatatcctggcgcgcgagaacgcgacgttgatgcgcaatccggatgacctggcgctggtgctggcgatgttgctgttggcgacgatgatggggggcatcggcctgtggcgggggatcgcgcgagcccgggcgggctga

SEQ ID NO: 501292 - DNA, 2049 bp, Stenotrophomonas maltophilia
atgagcctgcgccagtcgttgttcccgttgctgcgcgcggtattccgggtcttgccgctgtcgcaggcgcagcgcgaccgcctgcgtacccgctggctggcccggcacggcgactgggtgccatcgccgccgaagggacggcaggacgcgggtaggccgcgggccagcgcgcagctccgctggcgcgcggacgaggccgcgatcggccaccgcccgcaccagaagggcgcgctgccggacccgatgcccgccacgctggtcgcgttctacctgccgcaattccacaccttccccgaaaatgacgcctggtggggcaagggcttcaccgaatggcgcaacgtcacccgtgcgctaccgcagttcgaaggccacatccaaccgcggcttccggctgatctgggtttctatgacctgcgcaacccgcaggtgatgcgcgaccaggcgcagcttgccgccgagtacggcatcggcgcgttctgcttctattactactggttcagcggccgcacgttgatggaggacccgctgcggcaatggctggccgatgacagcatcgacctgccgttctgcctgtgctgggccaatgaaaactgggcgcgacgctgggacggccgcgacgacgatatcctgatcggccagcagcacagcgctgaggacgatctggccttcatcgcacatgtcgcgctctacctgcgcgaccgccgtgcattgaaggtcgaggggcggccgatgctgctggtctatcgcccgaacctgctgcccgacgcccgtgcgactgccgagcgctggcgccgctggtgccgcgacaacggcgtgggcgaaatccatctggcctacgtccagggcttcgagcgccccgatccacgcgacatcggctttgacgctgcggtcgagtttccgccgaacatgagcaatccctcttcgctgtcggcacagcagtggctgctcaatcccgatttcaatggcgatgtccgcgattggcgcgaattggccggcgaaatcgccgcccgtgccctgcccgattatccgctctatcccggggtcaaccccggttgggacaacgaggcccgacgttccggtcgcggccgcgtgtacctgcacgcctcaccacgtggttaccgtgactggttgcgcaccacgatccatgaacgcctctccgcagcaccgcaggcgcagcgactggtgttcataaacgcttggaacgagtgggctgaaggtgccgtgctggaaccggatgcccgcctcggccatgcctggctgcaggccacccgtgatgcgttgttgccggcgccggcgccgcgccccgcaccggcagtgcatctccacgcctggtatctggagacgctgccggaagtgctgcgagctctgcgcgaggcaacactggactgggcaatcgtagtgaccaccccggctgcgcagatcgatcaggttcggcaggccctggcgacacatgggcttgagggcgaggtggtggccgtggacaaccacggtcgcgacatcctgccgttcctggaggtcgccgaacggctgctgcaggccgggcacgaagtggtgcttaagctgcatacgaaacgctcaacccatcgcgcagatggcgaccaatggcggcaggaactactgcaacggctggtacagggcgggcgtgccgcacgcatccttgccgccttcgaggccgaccctgggctgggcatggtggtggccgaagggcatctgttgcccgtcgctgatttcgtgggcggcaatggtctcgcattggctcgactgcaggcgcggcttgggttggaagtacccgtggacaccagtcggtttggcgccggcagcatgggctggtggcggctgcaggccctgcgtccattgttggacgcgcatctgtatcgcagcgctttcgacatcgagcagggccagatcgatggaacgctggcccacgccattgaacgtgtactgggtgcctgctgcgaacacgctggactgcgcgtcgcgacagccgcagcctgcctcggcgaggccgatgccagcagcgacgagtacgcctacgcccgacgcggctga

SEQ ID NO: 501293 - DNA, 984 bp, Stenotrophomonas maltophilia
atgagtggaagcgcgtccccggcaccggcgttgccggaccgccgggggcgggcggcccgctgggtcatcatcatcgcagcggtctatatcgccgctctgtactacgtcgatcgggaccggaatattctgtcccgcctcaccgacatggcggcgcctctcggtgcctgcgccctgctggtacttctgagctatctcttgcgctacctgcgatggcgcagcattctgcgcgtccagggctacccgctgccgcaatggagacaggggttcctggcctatctggcaggctttgccttcacggcctcacccggcaaggcaggcgaactgctgcgaatccgctacttcggatggctgcatattcccgccaggaccaccctcggcactttcatcttcgagcgcgccatcgacctgctggtcatcaccctgctggcgatcggggcggccactctggtgcccgtattcggtctgctgaccgtgatcattctgttgatcctgtttgcgctggttgcatttgcctgctggtcgcctctggcgcgcgcctcacgccatgcgattgacctggtgccgggaaggctgctgcgccaactgggtcacttcctggtggacggtgctggcgctctcggtccattgatgcgtcccggcctgctggccagcagctccagctggggcgccggtgcctgggggctcaccgcaattgccttcgcatggctgtgccatgcctccggcattgacctgccgtggcaactcgcgcttggcatctacccgttggcaatgctggtcggcgcgctgtccttcgtacccggcggggtaggcaccaccgaagcgtccatcgtgatgatgctgaatgcgagtggtgtcgacaccgacgcggcgctggcaatcgccatcggcattcgcctggtcagtctatggctggcagtgctggttggcgtgctggcaatggtcgcgctggagtctgccggttcgtcgccccggcaaggccactga

SEQ ID NO: 501294 - DNA, 1419 bp, Stenotrophomonas maltophilia
gtgacggtttccaatcgcccgctctgcgttgatctcgacggcaccctactgcgctcggacatcctgtacgagtcactgctggccttgcttgcccacaatccgctttacgtcttcctccttcccttctggctgctgaagggcaaggcgcatgtgaagcgacagctggcctcgcgcgtgcagctgccggctgagacgctgccctacgacgagcgcgtgctggaaatcctgcgcaccaccacgcaacgcccgcgcgtgctgtgtaccgcctcggaccgactgctggtgcaacccatcgccgatcacctggggttgttcgaagaagtcatggccagtgacggccataccaacctgtccggcagcaacaagggccaggccctggcggcgcgctttggcgagcgcggtttcgactacatgggcaacggccgggtcgacgtcaaggtctgggcacatgccggtggcgcgatcgtggtcaacaacaacgcgtctctggcccgcgatgctgcccgtcagaccgaggtcctggcccatctgcccgcgcagaatggcaacctgctgacctggatcaaggcgctgcgtgtctaccagtggctgaagaacctgctggtgctggtaccgctgctgaccgcgcaccgcttcctcgacccggcagcggtcatcgacgccggcgtagccttcctgtccttcggcctgtgcgcgtccggcgtgtacctgctcaacgacctgctggacctgaccccggaccgcatgcatccgcgcaagcgcaagcgtcccttcgccgccggcacgcttccgttgctgcatggcctgctggtcgcgccgttgatcaccctggccggctttgcgctggcgctggcctgcagcccggcatttgccgcagtactgctctgctactacgtgatgaccctgagctactcgctcaagctcaagcgcgtggtgatgatcgacgtggtgatgctggcggcgctgtacacggtccgcatcatcggcggcgcggtggcgatcaactctgaactgtcgttctggctgctggcgttctcgatgttcgtgttcctcagcctggccatgctcaagcgctataccgaactggcctcggcactggccagcggcaaggaaatggcgatcggccgaggctactcggtggccgacctgccgctggtgcagtcgctgggcgcggccgccggctacatcggcgtcgcggtcttcgcgctgtacatcaacagcccggaaagcctggagctgtataccagtcccaagctgctgtggctgctgtgcccgatcctgctgtactggatcagccggatgtggatcgtctcgcaccggggcgacatgcatgacgacccgatcgtgttcgcggcgacggaccgcggcagccagatcgtcattgcactgtgcgtgctgatcgtactgatcgccatatga

SEQ ID NO: 501295 - DNA, 945 bp, Stenotrophomonas maltophilia
atgaccgacaagcacgccaagatcgtcatcaccggtgctgccggcctggtggggcagaacctgatcgtcgagctcaagcagcagggttacacccagctggttgccatcgacaagcatgcccacaacctggatatcctgcacggcctgcatccggatgtgcgcgtggtgaaagctgacctggctgaacctggcgcgtgggccggtgaattcaacggtgccgcctgcgtggtgcagctgcacgcgcagatcaccggcaagaccaccgacctgttcgtccgcaacaacatcacggccaccggccatgtgttgaaggcgacccaggatgccgctgtgccctacatggtgcacatcagctcgtcggtggtgaattcggtcgccaaggacgattacaccaatacgaagcgcgaacaggaggagatggtggttgccagcggccagcgccactgcgtgctgcgcccgacactgatgttcggctggttcgaccccaagcacctcggttggctgtcccgcttcatggcacgcacgccggtattccccatccccggcgacggcaggttcatgcgccaaccgctgtatgaacgcgacttctgccgctgcatcgccaagtgcatcgagaccgaaccggacggcgaggtcttcgacatcgtcggcgatacgcgcgtggattacgtggacatcatccgcaccatcaagcgggtaaagaagctgcatacggtgatcgtgcacattccgatcggcttcttcggcttcctgttgaaggtctacagcctgttcagcagcaagccgccttttactgcggaccagctaaaggctctgagtgccggcgatgacttcaagggaattgatactgaagccatttttggggtgaggcagacgccgtttgaagaagccatccgtgagagctataccgacccgcgctacagccacatcgtgctgcagcgctga

SEQ ID NO: 501296 - DNA, 399 bp, Stenotrophomonas maltophilia
gtgatttcccgccagttcctgctgttcctgatcgcaggcggtcttgccgcttgcgtcaacttcggctccaggattgccctcagccagtggctccactacgcgccagcgatcatcatcgcctactgcctgggcatgaccaccgcgttccttctaaaccgtgcgtttgttttccgatcggcagcgaaccgcatgcgcagtcaggcgttctggttcatcgtagtcaatcttgcggcagtgcttcagacgctggccatcagcctgttgctggcacgctggctattgcctcagctgggtatcgatttccacaacgaaaccctcgcgcacgcggtcggcgtcgccgttccggtgctgaccagctactttggccacaagtacctttcgtttcgtcaaaaaaactga

SEQ ID NO: 501297 - DNA, 1314 bp, Stenotrophomonas maltophilia
atggctgttggttggctccttgcctacgggactgcggcggttgtttgcgttcagcggctaaggacggtgaacgtttgtctgctttctgcgctttgcttcgtggtgctgttgggaatattgccaactacttcggagactcttttcactgtaaccaacgcacagtggtacttggctatagggttggcggcgtgtgcgctgctcccccccccagaaagagacagttggccacatctggcatttgctgcgattgcctctttgactggacctttctgcattattgttcttcctgtggcgctcctgcaggccatctttacgaggcaactggaacgtcggcagtggatgctgctcatcctgctagtcgcctctcttgttcaactttctttctttgttgattcggacaggctcgccgcatctgcgagcaatgatgcgagcgcttggctgcatggtctgaagtcgttctttgtattcggctcgctgtctccgacagcaggtgttgctgctcttgtcttctggctttgcctagtggtggcgctgtcaactgtcggacgccaacgaggatggctggagcgtgattttctgaccacgctctcgctgcttggcggtgccggcatgtttgcgctggccggcttctatgcaatgcgtgatcagccaggcaatgcgtccccactgggttttggtgctcgctacttcgtaattccgtacggcgttgtgctgatggcattggttaccacggttccatacgcgcgcagggccgcttgggcggcaattgccgcctatctggtcattgcttgcatgaactatcgcacctttgaccgtcccgatcttggttaccaacgttatctcaggttttctgagtcctatgagaatgtgtttgttccgatcaatccacagtttgagaatttccgtggcggcttctggctgaacgcgaatgtccattctgggcaggccgtttcacccaaagagattgatctgacgggtgcgctgaatacatccagaaccccggcgggtgtcctggtcaagtcttacgtcatagaagcaaaggcgtcgcactgcgggccaggagtcgatgttctcggggtcaaccttatgctggacgggaacacaggccctgcacaggttgctgcagcatggggtggtgaagagagcgggccctcgccgcctgcaggtcaataccttgccgtctatcccggtgagaagcaattgcagttggctttgccggcttctactgccacaaacgatcgactgcgcatttcccttcaatccgccgagcaggcggaagtgaagaggatatcgctttactgcatcggtagctga

SEQ ID NO: 501298 - DNA, 129 bp, Stenotrophomonas maltophilia
atgaccgtcctccgcccacagcattcgtcctgcaacaccattccactccgtgattcggaaaagagcgacagcaatcgcagcaaagaacgcaagagcggccaggccaatgccgctgcgtgcatggtatga

SEQ ID NO: 501299 - DNA, 384 bp, Stenotrophomonas maltophilia
atgaaccacgtcaggaatggagctgttattctgattgctgcgctgggtcttgctgcgtgcggcaagtcgccggacgaacgcgcggctgatgcgagccagcaggcttcggcaaccgaagctccgactgctgcgcctgctccggccgcgtccgtagccaaaaagtatgacggcaaggttgtgcgccgtcctgcaagcgacggcggcaaggaagatggatggttctatgtcgagcaaggtcagcgccactggattgtcgacgccaactggctgcagaccaagaacatgaaggctgaggacgtcatcgagattcctgctgaggaacttagccagattccggaatcaccggaagtgctgggtgctgccgcgggtaatccgtcgaactga

SEQ ID NO: 501300 - DNA, 1302 bp, Stenotrophomonas maltophilia
atgaagaaaaggattctttcggccgttcgcgcactgcgtggtgatcgagtcgttcctgtaaatacgtccatctgggcgggatataccagcgatgcgttggctctggcacagatcatcgatctggacgttgccagcctgtcccagcagcagcagcacccggaacgcgtacatgcggacccgtccaggcgtgtgtgtgcttggtatctgccctacttcgataatccgttctatggcggggtgatgaccattctacgccttgccgagagccttagccggcgctcgggaatgaagcagcgcttcctcatctgtggtcaggccgatcctttggaaatgcaggagagccttggcaaggcgttccctggcttggcggactgtgaagttatcgtgctggacagtgccgagaagatccggcagattccgccgtcggattattcggttgctacgctctggaccacagcctatgtgttggtcggggtgcaaaacacgggtctgaagttctacatgatgcaggacttcgagcccgcgttctatccagccggaagtacctacgcgcaggcagaattcacctacagctttgggttcctggggatctgcaatacgcaaacgctcaaggaaatctacgagcagcagtacggcggatctgcagtgctgctgcagcccagcgttgacaccacggtgttctaccctggcagcggcgagcgtgacgaccaggcgccggtcaagcgcttgttctactacgctcggccgggtacgccgcgtaatgcgttcgagctggctgcagccgcactgcgcaaggtcaaggctcggatgggcgatcgcgtggagattatctgcgccggaactggctgggatccggcggaattcgacctggacggagtggtcgaaagcgtagggctgttgccgtatcgagagacgggcaacctctaccggagctgccatgctggctttgtcatgatgatgacgaagcacccctcgtacctgccgttcgagctgatggcgtgtggcaccacggtggtgaccaaccacaatgaagcaaatacctggctgctgcgcgatggtagcaactgcctgctttcgccgcctacggccaattgtctggcgcagacgctggtctatgcgctcgagaaccacgtcgggctggagggtgtgcgccagactgcggcggaggaaatgaaacagcgttcgggctgggaagagagcctttcccgcgtcgccgccttcatggatgctccggtgttcgcgccaccgaccgcctcgattggtgcccgtttccatgctttggccaatcgcgaagtcggttga

SEQ ID NO: 501301 - DNA, 3132 bp, Stenotrophomonas maltophilia
atgatcgaactgaacaattctgccttcatcaggccgttgaagctgccgccgagcgcttggcacggccatattccatttgccggctggattaccgaggcgctgcgcccggcgatgctcgttgagctgggcacccactacggcgcgtcctatctcagtttctgtcagacgatccaggaactgggcctcggcacacgcgcctatgccgtggatacgtgggagggcgatgaacatgctgccttctacggaaattcggtccatgccggactgagtgagtatcatgatggaaagtacgacgatttttccaagctgttgcgctgtacgtttgatcaggcgctggggaagttcgaagatggcagtatcgatcttctgcatatcgacggcctgcacacctatgaagcggtgcgtcacgactttgaaagctggaagccgaagctctcggaccgcgcagtggtcctgttccatgacacgcaggagcgtcagggggatttcggagtctggcgtttgtgggccgaggtttcttcccagtacccgtcctttgaattcagccactcccatggtcttggtgttctggtggtgggtgagaatgctccggatgcggtgaaggcgctcggaacgcttgatggtgatcagagcaaccttgttgcccatctgttcgctgcgctgggccacgcggtcgcgctggcctacgcacgggactggtggcagaacgaagtgcatgcgctcggcggcaaggtcgccagccttgagggtgagctggcctatgtgcgcgcggaacacgagcgcagcatcgccaccgtaaacgaaacagctcagcagctgcgacacgccagtgagcagttggtggcatttcagagcgcctcagaggactctcacggacggcatgagctggcaacggccatagccgcgctggaagcggaactggagggcgccgaatcagagcgggatgcgctgcggctgaaggtggatgagatttcgcacagactggccgaggagcaggagcggactatcgccgtccaggtcgagtgccgcgcggcggcggcggcattggccgctatggaagcagagattgttgtcgagcgcgaggcgcgcgctgctgccgtcgccggccttgaggcagagcaggctgcgcatcagcgtttgatagccgctcacgagagggagtccgcgttgcgcttgcaggagcgcgaacagggactgcatgaggtgggcattcgtagccagcgactgctcagcgatatcaaggaccgtgatgatctcatcgcgtcgctcacgcgggatcttcaccaggcacaacagcggtccgagacgattggcgccaaagtggggcgttccttcgagcgcctccatcagcgttggaacgctcagggcggcttgcgcgcacgcgcgctgaactggggcatccgcatggcagaggcacgtcatgcccgtgcgttgggtcgccagcggcactccgcagaaggcgttgcattgaccaggccacaggcaggattcaaccctgcattgcgtgcggattgtcaggatcttgccgattatatcgcggctacagaactgtctccgcaggcgttggccgagcaggtctctgccgcgcaggcgttcacctatcgcccgcgggtatcgcttatcattccgatctacaaggtgccgcgccaggtactggaggagacactgaagagtgtcgaactgcagacttacggcgagtgggaaacctgcttggcttgggccgatgttgacgacctggaaggctgggagtggttgaagcagcgctgcgcctccgaccagcggcacagagtgatattgttggccgcgaacggcggcatctcagagaactccaatgctgctctcgaacacgcagaaggtgagtttgtagcgttgctcgatcatgacgacacgatcgcgccctgggcactgttcgacatgatagcggcgatgcaggagggcggcgctgacgtcgatttcctgtactcggacaaggactccatcaatgctgatggtacgtgccgcatgaatgcactgtacaagccgcagtggagtccggagatgctgcattcagtcaattatctgacccacctgaatctgatgcgtacctccgtggtccgtcaggtaggtgcctggaacaaggaaactgatggtgcccaggattgggacatcttcttccgcgtcacctctgcagcgcgcaggatcgtgcatgtcccgtccatccattaccattggcgcatcctgccgacgtccaccgcgactgggctgcagactaaaccgtacgcgatcatgggccagttgcgcacgcagaagaactatttcgccagccgcggcctgcccgcgcaggtgaagcggaccgatcaagggttgttccacatctcctggccgcggcttgcatcagtctccgaagtagtcgtcatccagaccggcagcatgcagcagcttgtgcatacgctgaatcttcttctggtttccgacctttccagcatcaagcgcattcacgctgttcacgtgggtgaggccagtgccgaactgcaggcatttgctgatctagccgaccgtcgcttcgtacttcgtcgacaggatgtgtttgcgtggtcggccgtagccgattggctggacgctggatcggcgggggttgtgctgattgatggtagggctctgggcctgtcggaaggattgctgaacgaactgctgggttgggtccaccatcacccggatatcgtctggacctccgcgttggcagtcagcgagaacgggagagtagaagaagcagggcgcgttgttgctgctgacggcaccagtgcgccgttgttccatggcgcacatccacacgaatatggctggtttggcggagcgcagtggtaccggaatgtgcgagccgcgtcgccgtttgcgattgcgtttaagatgacgaagttccaaactgtgtcacgttttccgtacgcagacgtggagatgcagcaagcattcacgcggatctgcaccgggagtatcgaatcgggcggcggaagaggcttgatcgatccctttgctgtcgtctatatgccttcgggcacgcaggctacctggtccaacgacggcgaaaagtatcgagatgacccctatttcaacccggcgttccgacaagtcagtccgctgaggctcaataaatga

SEQ ID NO: 501302 - DNA, 579 bp, Stenotrophomonas maltophilia
atgaccggttccctgattccagaaacagtggtaaacgacccgcgcatccaggtcggtcggttcacttatggcaacccgaatttccgtatatgggccgagcatgaatcgatcatcatcggtgcgttctgctcaatcgctgacgaggtcgcgatcttcggcggcggcgagcacaacgcgcaatgggtcaccacgttccccttgcggatcgcgctggggcatcccgacgcacacgccgacggccatcccgccacgcgcggcccgacccgcatcggaaacgacgtatggataggccatggtgccacgatcatgtcaggggtcaccgtgggaaacggagccatcattggcgcgagggccgttgtggccaaggacgttccaccatttgcagttgtggtgggaaatcctgcgcggatcgttcgctatcgattcaccgatgcgcagatccaagccctgcagcagatccagtggtggaactggccgcttgagaaaatctccgagatgaccccattgctttgcggtggatcggtagagcagttcattgccagcgcgcagaccaaagaacaacaggaaaacggacgatga

SEQ ID NO: 501303 - DNA, 1407 bp, Stenotrophomonas maltophilia
atgtcctctgacgccactgtaaacgtcgcaattaatgaggccgcagtgaaagaacgacctgttgctatccaggtcgagtcgctgtccaagctttaccagatctacgagcagccgcgcgaccgcctcaagcagtttgtcctgccacgcctgtctacgctgctaggtcggccgcgacgcgattacttccgcgagtactgggcgctgcaggatgtcagctttgatgtgcggagaggcgaggccgtcggtatcgtcgggcgcaatggtgccggcaagtcaacgcttctgcagctcatatgcggtacgctgacgccgacgacgggcagtgcgcacatccatggcagggtagcggccctgctcgagcttggcgccggtttcaatccagagttcaccggccgagaaaatgtctacatgagtgccacgttactgggcctcacgcgccaggaaatcgatgagcgttacgatgacatcgtcgcgttcgccgatatcggtgattttgtcaatcagccggtaaaggtctattccagcggcatgtatgttcggctggcattcgccgtgattgctcatgtcgacgcggacatcatgattgttgatgaggcactggcggttggtgacagtgtttttgtgcagaagtgcatgcgtttccttcgaggcttccgggagcgtggaacactgctgttcgtaagtcatgacaccggatctgtcttgaacttctgcgacagggcaatctggctggacaatgggcatgtccgcaagcacgcgtctgcgcaggaggtggtcaccgattacattgagtattgtgctcaggaagtgtacggcgaggcggtaaggctcaagaccatcaagggtgagcgacgcagcgatgcggtgccgaagaaattggagctggcaaaggttgaagaagagaccaagcttacgctcttctcaaacattcataattctgatggttggacatccgaagcggcacatatcgattcggtcgagttgttggatcgagggctgaatcccttgagcgtattccggggtggggaacaggttacgctgcgtattcgagcgtcggctgcgcgcgccctcaagagcacgatcattggtttcttcgtcaaggatcgccttggccagtctctgttcggcgagcacacctatacctacgtcccccagccgtgctcgatggcagcgggggaaacgctggaggctgagtttgatttcaccatcccgcttctgcccgatggcgactactcgatgacggtatcgattgccgaaggcactccctgggacaacgtccagcaccactggctgcatgacgctgtgcttatcaaggtggcgtccacaaagctgcgttatgggctggttggcgttccattcgagcgcgtcgcagtcaagtcggtgggtaccagcggagagtccgcatga

SEQ ID NO: 501304 - DNA, 564 bp, Stenotrophomonas maltophilia
atgatccacgggttttttgccgattgcatcaatcgcgccccgggcttgatcctgtccaacgtcagctacgtcaagaaggtcgtattcccgttggaaatccttccatgggtttccgtcgcatctgcacttttccacctttccatcagtgtcatcgtgctgctggttgtgcagtttgccatggtccaatacctgccttggaccgcgatgctgctgccgctgctgctgctgccgcttatgctgatgacagtggcattcacgtatctctttgctgccatcggcgtctatcttcgggatatcggccaaatgacggtgatgatcaccacagtgctgttcttcctgtcgcccattgtctaccccacgtccagcttgccggaacagtttcgtggctggatccggttcagtcccatcacctacccggtggagcaggcccgcaagatactgatcttcggcgaaatgccggaactctccggatggttcgtgtccatggcggtcgcgctggtgctgctcagcctgactttctatttctatcagaaaacccgccgaggattcgccgatgtcctctga

SEQ ID NO: 501305 - DNA, 651 bp, Stenotrophomonas maltophilia
atgaccgatgtgtttgccgccctgcgcgtgaccaacgtcgccttcgacgacgacgtcatcctgctgaccctggccgatggccggcgcacccgccagccgctgcgctgggtacctgcgttgtttgaagccgatgcagggcaacgcgcgcagtgggtcgccaccgccgatggcctgggtgtgaactggccggccctgctgccggcgcgcgaggcgggcgtggtcgatatcctcaaccaggtctgggaagaccgctacgatgcggcgatggcacggctgaaggacgccggatggacgctggaggcgctgtccgacgaggaccagcaactggtggcgctgtggcgtatggaagcggacatcaacaacggcggcttcatgcagttcctgtgcaactggggcgacccgacctgccagctggcgctgcgcgcgctgcaggcgatgggcgcagtgcagacgcacgcgctcctggccggcatgcgcgggctgctggaccggctggagcacgacccggcgatcaaggaaatgaccgacctgtacgacgcgatgagcgaagacgaacagcaggcgctggaagcgttcgaggacgcctatttcgagcgcccggaagaccttgcgcggttcgggctgaagcacttcggcgccgagcggctgtag

SEQ ID NO: 501306 - DNA, 1098 bp, Stenotrophomonas maltophilia
atgcgcaccctgttgctgctgttgctgctgtcttgcaccaccgcacaggcggcgccggtgcgggtattcatcgccggtgactccactgcggccgcatacggccccgagcgcgcgccccaggccggctggggacaggcactgcagagctacctcgacccggcacgcttcgaggtgcacaaccatgccaagggcggtcgcagcacgcgcagtttcatcgacgaagggcgcctggatgccatcgccgccgagctgcgcggtggcgatgtgctgctgatccagttcggccacaacgatgcgaagtttgaggattccacgcgctacaccgatccggaccgggactacccccgcctgctgatgcgctacgtacaggtggctcgcgggaaaggcgccacgccggtgctggtcacgccggtggcgcggctgctgtacgacttcggttcactgctggacacgcatggccgctacacgcaatcgatgaaggccctggccgcgcgcgagcggattgccctgattgatctgaacgaccgcagcacgcgctggatccgcgcgctgggtgagcagggcgcgcgaccgtacttcctgttcgtgcccgaacagaacaaggccgacggcacccatttcagcgtggccggcgcccatgcggtggcctgcctggtactgcgcgaagcagtgccgctgctgcccgcgctgcagccggcgctggtgcgggacatcgactgcgacgtgatgggtgcagggcagggcgccggtgcgacgggagattcgcaggtcgtgcacgaaggcacgattgcgcgcatgcagcccggcccgcacggcggcggcgggcccaccaccgcgtatccattctttgccggcgcggcggacctgcccttcgtgctgcgcaagcgcgtgctacacaagggcgcgggtatcggcctgcatccgcagcacaaggatgagatctattacatcgtcagtgggcagggcagctacgtgctggacggcaggcagtacgacgtgcacgccgggcacgcgctgctgacccgcaagggcagccgccatgcgctgcagcaggtgggtgaggaggacctggtggtgctgctggcgtacccgcgctga

SEQ ID NO: 501307 - DNA, 756 bp, Stenotrophomonas maltophilia
atggctaatcccttcagcctggaaggcaaggtcgctctggtaaccggtggcaataccggtctgggacagggcatcgccgtggcactggctgccgccggcgctgacgtggccgtggccggcatcgccccgcccaccgacaccatcgaaaagatcactgcgctgggccgccgctgcctggccatcgaagccaacctgatcagcatcgaaccggtggcgcgcgtggtgcgcgaaaccattgacggcctgggtggcctggacatcctggtcaacaatgccggcctgatccgccgcgccgatgcggtggacttcagtgagcaggactgggacgacgtgatgaacgtcaacctcaagtccgccttcttcatctcacaggccgccggccgccacttcatcgaacagggccacggcaagatcatcaacattgcttcgatgctgtccttccagggcggtatccgcgtgccgtcgtacaccgccagcaagagcggcatcgccggcatcacccggctgctggccaacgagtgggcgggcaagggcatcaacatcaatgccatcgccccgggctacatggccaccgacaacaccgcccagctgcgcgccgacgaagcgcgcaacaaggcgatcctggagcgcatcccggccggtcgctggggcacgccggatgatctggccggtgcggcggtgttcttggcgtcgtcggcgtcggattacatcaacggcgccgtgctgccggtcgacggtggctggctggcgcgctga

SEQ ID NO: 501308 - DNA, 849 bp, Stenotrophomonas maltophilia
atgtacagcaagacccattacgccacccatcccgatgccatccacggtgccagcaacgaccagctgcgtgacctgtacctgctcgatggcctgttcaacgccggtgcggtgaccctcaagtacacccactacgagcgcttcgtgatcggcggcgctgccccggtggacgcaccgctggccctgccgacccagaccgaacccgcttcggccgcaggccatccgttcctggagcgtcgagagctgggcgtgatcaacgtcggcagcggaaccggcagcgtcaccgtcgatggcacggtctacacgctgggcccgaaggatggtctgtacgtggccatgggcagcaaggacgtcgtgttcgcctcgcaggacgccgccaatcccgcccagttctacctggcctcgaccccggcccatgcccgcttcgagacccggcagctgtccattaaggatgccgtcgccctggatcgcggcgcgctggaaaccagcaacgagcgcaccatctaccagtacatcgtgccggccacctgccagtcctcgcagctgctgctggggctgaccgtgctcaagccgggcagcgtgtggaacaccatgccgccgcacctgcacgaccgtcgcagcgaggtgtacttctacttcgacctgggcgacagcgaccgcgtctaccacttcatgggcgagccggccgcgcagcgccacatcgtcatccagaacaacgaagccgtggtgtcgccgccgtggtcgatccacatgggcgccggtaccagcaactacgccttcatctgggcgatggggggcgagaacctggattacaccgacatgcacgtgctggacatctgccagctcaagtag

SEQ ID NO: 501309 - DNA, 1059 bp, Stenotrophomonas maltophilia
atgtcagtgcgcaacaagaacgatgccgcgacgccggcattggcgaagggcaaggcagccaccatcaacgacatcgcgcgactgtcgggcgtatccaagaaaacggtttcaagaatcatcaacaactcgccgctggtgcgcaaggacacgcgcgacaaggtggaggcgctgatgcgtgaggtgggctatacgcccgatccgctggcccgtggactggcgttccgccgctccttcctgatcggcatggtctacgacaaccccaccgcgcagtacatcgtggacatgcagtacggtgcgctggatgcactgcgtggttccagcttcgagctggtggtgcacccgtgtgacagccgcagccccggctacatcgagggcgtgcggcgcttcgtgcagcagcagaagctgcacggggtgatcctggtgccgcgtgcctcggaagaccaggcgctggcggacatgcttgatgagatcggctgccggttcacccgcgtggcagcgctgccgctggacgaaagctcacagatggtggtcacccatgaccgcgacggtgcggccgaagccgccgactacctgctctcgctcggccaccgtgacattgccctggtgaccggtcccagcgcctaccgttcggcccatgaacgtaccgccggattcatcgacgcactgtcccagcgcggcatcgagctgcccaaggaccgcatcatcgaggctggctacaccttcgaatccggcgtggccgctgccgagaaactgctgttgggcaagcgccgcccgaccgccatcttcaccggcaatgacgaaatggccgccggcatctacaaggtcgcgctgcgcgccggcatcaacattccgcgccagctgtccatcgtcggctatgacgacagcccgctggcctcgcgcctgtggccctcgctgacctcggtgcgccggcatacccgcgataccgggcgcaccgccgcggcgatgctgatccagcccgaaggccaggccgcgctgcccatcgccagcgtgcggccgcacctgatcgtccgcgattcctgccagccgccggaggattga

SEQ ID NO: 501310 - DNA, 714 bp, Stenotrophomonas maltophilia
atgatgtaccacgggtacgagaacggcttctggacgctgggccgccaggccctgctggagcctatcgaatggaccgccgacggctggttccgcgcgaccgggggcgacctcggccagccactgcgcaagccggccggacaggcactgtcgccgcatggcatggcgctgtcggatgatttccgcggcagcacgctcggcccgcagtgggcgttcttcaatccggcgcaggacgagtaccggcggctgggtttcagcggcaacggcctggtcctgcagggcaagggcagcacgccgcgcgatgcgtcaccgctgaccaccatcgccggcgaccgggcctaccagttcgaggtggagatggagatcgcccccggtgccgtgggcggcgcgctgctgttctacagcgaccgcctgtacgtgggcgtgggcagcaatggcgagtcgttcatcatgcatcgctacggcgaggagcgccctgcccggccggcgccggggcgcggcggccggctgtggctgcgggtgaccaacagccgccacatcgtcaccttccactccagcaccgacgggcacacttggcagaagtatccggttcagatggaagtgtccggttaccatcacaatgtagcgggcaggttcctggcgctgaagccggcgctgtatgcggccggcgacggtgcggtaaccttccgcaacttccgctaccgcgcgctggactga

SEQ ID NO: 501311 - DNA, 828 bp, Stenotrophomonas maltophilia
atgcgtgcactgcgtatcgtcgccgccgccaccctgttcgccgtgttgctgccggcatggcctgcacccgcggcggagaccgcgcgcgccccggcgcagtgggcgcgggggctggaacaccagcgccaggcggaccgtggcgatggcacgttcctcaatccggtgctggccggcgaccatccggatccctcggtgctcaaggacggagacgattactacctcacgctgtcgtcgttcgacgcctatcccggcctgccgatctggcactcgcgcgacctggtgaactggcagccgctgggccatgcgatcacccgcaacgtgggctcgatctgggcgccggacatcgttaagcaccgggggcgctacttcatctacttcccggcgcggaccggcgagcgccgcagcaacttcgtggtctgggccgatgacatcaagggcccatggagcgcaccgatcgacatcggcctgggcggctacatcgatcccggccatgcggtgggtgaagacggcaagcgctacctgttcctcagcggtggtgattacgtgcaactggccgacgatgggctgagcgtggccggcacgccgaagcacgtctacgacggctggcgctatccgcaggactgggacgtcgaggcctatgcgcaggaaggcccgaagatccacctccgcaacggctggtactacatgaccacggcggtgggcggcacggccgggccgcccaccggccacatggtgatcaccgcgcgctcgcgttcgatccacggaccgtgggagaacgcgcccaacaacccgatcacgcgcacgcagtcggcagccgagccctggtag

SEQ ID NO: 501312 - DNA, 1284 bp, Stenotrophomonas maltophilia
atgggcatcaccctcctgttctccgtattcgccgtgctgctgctgctcggcgtgccggtcgcctacgcgctggccgctgcggcgctggccaccctgctgtacctggatatccccagcatcgtgctggtgcagcagatctcggccggtaccggctccgcttcgctcatcgccattccactgttcatctttgccggcgagatcatgatgcgcggcggcatctccgagcgcctgatcgcactggcctcgtcgctggtcgggcgcctgcgcggtggcctgggccaggtgtcgatcctgtcctcgctgttcttcggcggcgtgtccggctcggccatcgccgatgtctcggcggtcggcggcacgatgatcccgcagatggtcaagcgcggctacgaccgcgatttcgccgtcaacgtcagcatcaccgccgcgctggtggccctactggtgcctccgtcgcacaacctgatcctgttctccgctgccgccggcgggggcctgtccatcgccgacctgttcgccgccggcattgtccctgcgctgctgatgacgctggcgctgatggtcaccggctatgtggtcgcacgtcgccgcggctatggcgtagaggtctttcccggctggcgtgccgtggccctgcgcatcgtctccgccctgcccggcctgggcctggtcgcgctgatcttcgtcggtatccgcgccggcatcttcactgccgtggaaagcgcggcgatcgccgtggtctacgccctgctggtgaccaccgtgctgtaccggcagctgcgctggcgcgagttcttcgacactgtcatccatgccgcgcgcagtaccggcgtgatcctgttcgtgatcgccaccgcggcggtgttcggctggctgctggcgtacctgcaggtgccggctgccgccgtcgagttcctgcagtcgttcgcgcacagccgcttcatggtgctgctgatgatcgtggtgatgctgctgttgctgggcaccttcatggatcttgcgccgatgatcctgatctgcacgccgatcttcctgccggtggcgcgcgcctacggcatcgatccgatccacttcggcctggtgctggtgctcaccggcggcctcggcctggtcaccccgccggtcggctcggtgctgttcatcggcacctccatcggcaagatcagcgtcggccagagcatgcgcaccatctggccattctggttcgccgcgctgggcgtgctgctggtggtcaccttcttccccgccctgtcgctgtggctgccggccgcgctgcgcggctga

SEQ ID NO: 501313 - DNA, 531 bp, Stenotrophomonas maltophilia
atgaccgaaacgacgacgtccaccaccggacccggccagcgcctgctggaccgcattgccgacatcgccatctacggcgccgtcgccgccctgctggggctggtggtggtgcagggctggcaggtgttcgcgcgctacgtgatcaacgattcgcccagctggaccgagccggtcaccctgctgctgctggccacggcgatgagcctgggcgcggcctgcggcgtgcacaccaaccgccacttcggcttcttcctgctgcatgcctacatgggcgccggcctgcgccgcgcggtggacgtgctggtgcagctggtggtggcggtgctgggcggcttcatcgcgttctggtcggccgacctgctggtcgacggactggacatcaagaccgccggtgccaacctgccgcagagcatcaactacctgccgctggcggtggggggcgcgctgatgctgatgtttgcactgaaccgcgcgtggaacgcgctgcaggcccgcgccaccggcgccgaagacgctgaaggagatcgttga

SEQ ID NO: 501314 - DNA, 1002 bp, Stenotrophomonas maltophilia
atgatcacacgacgtaatttcctggccggcggcgccgctgcgctggcgacgccgatgctcgctgcctgcgggcgtggggccgccggcgacgtggacggcagcaccctgctgaccgcgaccgacgtgcacgtggccgactaccccaccgtcactgcggtgaagtggatcggcgagaccctgcagcgtgagaccaacggccgcctgcggctgcggcagtaccactcgggccagctgggccgcgagtcggaagcgatcgacatggcgcgctttggcgccatcgacatcacccgcgtgtatgccggtgcactcaacaacgcatttccgctgacccaggcactgtgcctgccgtacgtcttcaggtcggtcgcacagcagcgcgccgcactcgatggcggcgtggccgacgcggtgctgcgtggctttgaaggccgcgatctggtcggcctggcgatctacgactccggtgcacgctgcttctacaacaccaagcaccccatcgtttcgcccagcgacctgcacggcctgaaactgcgggtggcctcgtcggacatcttcatccagctgatgcgcctgctcggcgccaacccgacgccgatgtcgctgggcgacacgttctccggcatggagacccacatgatcgacggcgccgagaacaacatgcgcagcttccattccagccgccatttcgaagccgcgcactactggtcgcagagcgaccattcgtatgcgccggacgtgctgctgatgtcgcgcgcccgttttgaacgcctcagcccggatgaccgccagctgctgctgcacaccgcccgcgcatcggtggcggtgatgcgtgagcagtgggacgcatcggaggatgccgcgcgccgggcggtgctggcctacggggtgaaagccaacgaggtcgacatggcggccttccgcgatgcggcccagccgctgctgaagcactacctgcagcagcctggcatcgccgcgctggttgaccgcatccgtgccgcctga

SEQ ID NO: 501315 - DNA, 828 bp, Stenotrophomonas maltophilia
ttgagcaacgaacacggcacacaggggcacaggccgacgccggacgatgcagccgcgatcgcccgcgccttcaccgacgcccgccgcgccggccaggccctgacagggtttcccgggaccattccggctgatctggtgcacgcctaccgggtccaggaccgcgccatcgaggcctgggacgatcaggtgatcggctggaaagtggggtacatcgccgccgagcgccgcgatggctccggcgacgaacgcctgctggggccgatcttcaaacgtcagctctggaatgataccggtggaacaaccgacattccggtattcgtcgggggctttggcgcagtcgaagcagagtacgtgctggagctgctggaggacgccccggccggacagttgcactggtccccggaacaggccgaagccctgcccgcgcgcctgtacatcggcgtggaagtggccagcagtccgctggccaccatcaacgaactgggtccgcgcgtggtggtgtccgacttcggcaacaacaatggcctggtgctggggccggagatcaccggctggacggcccgcgacgagactgcgctgcgtgcggagaccgtcatcgacggcgaggtggtcggcaccggtggcgccacccgcctgcccggcggcctgcgtgcggcctatgccttcgcgctgtcccgttcggcgcagcgtggccggccgctgcgcaagggcgacctgatcgccaccggcaacgctaccggcatccacgatatcgaggcaggacaaacggcgctggtgcgctttgccggcttcggtgacattgcctgccgggccgtgccggcgggatga

SEQ ID NO: 501316 - DNA, 993 bp, Stenotrophomonas maltophilia
atgcgtctgcccacccttgtgctgtgcctgtccgttctgttgacgcttgcaccggcgcgcgccaccgacgtcccgctgcgcgacggccagcggcccgggcgcgaggtgacgggcgaacgcctgccgctctggcccgccgggcaggtacccggcgaaagcgctgcgtcgcggccggcgcgcgtcgttgagcgcagccccgacccggcccatccggaccggttcgtggacgggatcgatgcgccgtacatgatcgtgcacgcgccgccacgtccgaacgggcaggcggtgctggtcattccgggcggcggctaccagcgcgtggtgatcgacaaggaaggcagcgcgctggtaccggactgggtgcagcgggcaggcttcaccctgttcgtgcttcgctaccgcctgccgcagccgggcagggaccgccaggcggcgctggccgatgcgcagcgcgcgctgcgggtcgtacgcgaccaggccgcacgccgcggcctggaggccggcagcgtggcggtcatgggtttctccgccggcggccacgtggctgcgcggctggccaccggcttcgatgctccggtctatcccgcacgcgatgcgatcgatcagctgagcgcgcgcccggcacgggcggtgctggtctacccggtcatcgacatgggtgcgcatgcgcacagcggttcgcgcgggcgattgctgggcgagcaccctgaccccgcattggcggcccagtactcggtgcagcagcacgtgcgcgcggacatgccaccgaccctgctgatccatgccgctgacgatcgcgtggtcagcgtgcgcaacagtgaagtgatggcgcgggcgctggccgaagcgggcgtggagcacgaactgcacgtgttcgcccacggcggccacggcttcggcatgcacctgcagggtggttcgtcgctggcgctgtggccggcgctggcgcaggcgtggctgacggcaggaaagggcgcggagggcggccgatga

SEQ ID NO: 501317 - DNA, 1623 bp, Stenotrophomonas maltophilia
atgacggcagcaccggacgacctgcagcgccgccgcttcctgcgcgacagcgcgcgctgggcgttggccacggcgacgctggcgacactgccggcagcggcgatgcccggtgcacgcgacgaccgcctgccgatcgtccgcgtgcgcggggggcgcctgcgcggccagcatgagcaaggcgtgctggtgttccgcggcgtgcgctacggtgccgacaccggcccccatcgcttccaaccgccgcgccgggaagcggcatggaacggcatcgccgatgcgctggactacggcgccgccgcgccacaggcgggcgcagaaggccccggcagcgaggactgcctgttcctcaacgtctggacgccggcgctgggggatggcggccgccgcccggtgctggtctatctgcatggcggtggcttcaacaacggttccggcagcgacccgctgtacgacggcagtgcgctgtgccgtcgcggcgatgtggtggtggtgaccctcaaccatcgcctgaatgccttcggctacctgtacctgggtgcgctgggcgatgcacgctatgcggcgtcgggcaacgtcggccagctcgatctggtgcaggcgctgcagtgggtgcgcgagcatgctgcagccttcggtggcgatgccggcaacatcaccgtgttcggccagtccgggggcggcgccaagatcgctacgctgatggcaatgccggccgcacgcggcctgttccagcgcgcctggaccatgagcggccagcaggtcaccgcagccggcccgcgtgccgccgcgcagcgcgcggcgatcgccatgcagaccgtaggcgcaggggacctggcggcactgctgcgactgcccaccgccgatctgctggcggcgacccgcgcgcgcgatccgtcgcgggtggaaagcacgtcgctgtacttcgggccggtgctggacgaggtcaccctgccggtgcatccgttctggccgcaggctccgctgcagtcggccgccattccgatggtgatcggcaatacccgcgacgagacccgcgccttcctcggcaatgacccggccaacttcgcgctgacctgggagacgctgccggcgcagctggaacgccagcagttcgttgatctgctgccgcagacggtgatcgccgagtaccggcgcctgtacccgcactacacaccatcggaggtgttctttgccgccaccactgccggccgttcctggcgtggcgcagtggaggaactggaagcgcgtgcgcgccagcccagcggggccgcacccacctgggcctaccagctggactggggctccccggtggaggagggccggctgcgcgccttccataccctggacatcccgctggtgttcgacaacgccggcctgcccggtgcgcgcaccggcggcggtgcggacgcgcaggcgctggcggccacgatgagcgacgcattgatcgcctttgcccggaccggcgaccccaatcatcgcggaatgtcgcaatgggccccctaccgtctgccgcagcgccagaccatgctgttcgatcagcacagccgcgcagtggatgatccccgtgccggcgagcgtgcactgtacgcgaaagtgccgttcgtgcagcgcggcacgcagtga

SEQ ID NO: 501318 - DNA, 588 bp, Stenotrophomonas maltophilia
atgggagagatgtcctcgccactgccgttcaccggccgggagcgcctgttcgctgcgatcgatgccgcggtgatgctgggcaccccggaggcgatcaccgatgcgctgcagcaggtgctgcgtgaggccatcgtcgatccgtccatccagctgccgccctgcgtgcggcgcccggtcgaagggcattacgcgcgccgcgaactgcatcgcagcccgaccctgggctacagcgtgatcgcgatgtgctggggcccgggccagggcacgccgctgcacgaccacgatgcgatgtggtgcgtggaaggggtctggcagggcgaactggtcgtcaccccgtacgcgctgctggagcaggagggcgaacgccatcgcttcgccgcccagccggcgctgtacggccatcgcggcagtgccggcagcctgattccgccgcacgagtaccacacgctgtgcaacgccagcgacgcggacgtggcggtatcgctgcacgtctacgagggcgtgatggaacgcagcgcggtgttcgaaccgttgggcgaggactggtaccagcggcgggtgaagctgatggagaccgacgcagcctga

SEQ ID NO: 501319 - DNA, 3804 bp, Stenotrophomonas maltophilia
atgccgcaccgcacgaccgtgttccgctgcctgctgctggcagtggccctggctgcaggcgccgcgacggccgccgccgatgtccccaccctgctcttccatgtggatgccaatcacggcctgcaggccgtgaccgctcacggtgaggccgtagcgaactttcgcgacaaggtcgccgtggtcgacgacggcgagcatggcaaggccatccaatgggaggacgatggcgtgctggcctgggatgcgccgggcaacatcctggctcagcgcggcacgctggccttcgactggcgttcacgctacgcggtgggcgaagcgccgttcgtgatcttccgcgtcggctacgccgaccacagcagctgggacatggcctggctgcgcatcgactggaacgggcacggcttcgatgccttcgtcaccgatgccaacctggcacgcacacgcgtgtcgttccgcatggatgcactgccgcgtcccgagcagtggttgcacctggccttcgcctgggatgaggaccacggcgtgcgcctgttcatcgatggccgcgaagtggcgcgcgcgcaggccaccggcaattacgatgccgcgctggaccagctcggccttgccgggcgggtaatggcaccgtaccaggtgcagagtcgctacaacttcctgcgtgggagcgatttccagcacatccgggtctacgaccgcacgctggatgcgccggcggtagcaacgctggcgcgcggccgcgagccagccagcgccgtggcgatcggcgatggcacgcgcgcctggcgccaccgcttcggctgggaaggggctgcacccccagcgttggcggccggcggcacccgcatccgcaagatcgaattcgccgacacccgcgacctgaaggcgtggatgtggaaggccaccgatggcatcgccgaaaccacctggccgggcgtgtacaaccgctcgcgcctgcccggccgcaatgactacttccagcttccggactggaacacctatgtggaaggcggccagcacctggacctgaccctgccggccactgaaacggtgaaccgggtggagatccgcggtgcggccttcggcaccctttcccacgggcccgacgccgaacatgccaccgacgtgctggtcacgcgcccgcgcggcgtggtgcgcagcgtcgacgacattgccgcgcagcgcggcggcgtgctgcgtttcagcaacgccgagcaggaaacaccgatccaggaaatctgggcctaccacgtgagcgagggcggcgagccggaaggcacggtgaagcagacctacatcatcgacagccacgcgctgcccgactacaccaacctggacgcattgcgccgctacatcgacggacgtttcccggccgccgaacggagcacggtgatggcgctgccgaagggcgccggttcccgccgccgggatgccggcaccctgcccgcacatccgcagccgatcgtgcacgtgctgattccttccggggtgggtgacgcgccggccaaccagccgctgatccgcagctgggcctacagctgggagaacatgcacgacggcctggacggcgtggccatcgaccttcccgcgctggacctgccgcccacccacgatggactgatcccgctgaacatccgcatcaaggatccgatctggccggcgcgcgacatgatcgatgtatcggtgtcggtgccgccacggcaggcgcgcacgctgtggctggacctgcgcgatcgcatcctcaccccggacagcctgtggctgagcatcgcctcggccgcaccaggcttcgatgccgatgccctcgacggtgcgcaggtccggctggtgttcaagccgcgtgccgacgcgctgaaggagcacgtggccgaccgcttcaaccaggtccgcgacaactggggcttcctggtggaagagcacaccacgtccaagcgccagcgcctgtacgcgcgcgtgtacgcggacctgagcgacctgctgcgggtggacccggaccatgaactcggccgcctgtactggaactacatcagctacaacagccagggccgcccgccctacacggcgcctgccgtgcccaggggcgtgccggcgtgggcattcaaccaggtgcaggacctggcgcaggtgttgcagttcgtcgactggtggatcgacgaacggcaggtggcctacggtgacttcggtggtggcatttcggacgattccgacctgacccagcagtggccggggctggccctgatgggcgtgcagccggatcgattgaacgcctcgctgaccgcgctgtccgacgcggtgtaccgcaatggcatgttcagcaatggcctgagcaccatcgagaccgacgaactgcactcgtacgaggaaggcatcaacaccaacagcgccatgctctacctcaactggggcgatccgctgacgctggaacgcctgatggaaacagtgaaggccttcgacgagcgcatcatcctgcgcaacccgcagggccacctgctgttctccagcaactggttcggtggcaacaaggtgtaccgcgaaccgaactggcagtggcagaagccgtactcgttcccggtgctgcacccggcgttcctgctgggccagtacaatgccgatccgaccggtcgcaagctggtgatcggcctggccgatggctacctggcccacgcaggcaaggacgacaaggggcgcttcaccctgcccaacgagatcaactgggccagcggtgccacccggggcggcgagttgaacaatggctccggcggcggcgacaccctgcataccttctgggccgcgtggcgctggaccggcgatgcgaagtacctgcaggcactggactatcgcgtagcccgtggcggcccgggtgcgctggccaacctgggcgagaacgtggtggacatcctggggcggcaacaggactggtatccgctgctgagcgccgaagccgatgcgggaaagaccggcttcgccagcctgatggcgtggcaggccagcggcgacagggcctacatcgccgcgatgcatgccgacggcctgcaggcgaaagtgcagcgtgcgtacatgaacaccgagggccactggtggtctgaccgcgtggaagcacccagcgaattcctgcagcgcgcgcgcctgggcggcatcgcgctgaagcgcaaccagagctggcccggccataccgtcagctggcgcttcgaccgcgaggacgcggccgaacaggtcgccctgctggtacacgcgccgtcgcgcgagcgcttcacggtgaccagctacaacctgggcacgcgcaccatcggtgcggacatgactggctggaacgtggcgagtggtacctggcgcattcgcagcggcgtggatgccgatggcgacgggcgcatcgacggcccggcggccgcgcgtaccgtgcagctggaaaccagcacatcggtgccgatgcagttccgccccggccggaccgaggtattcgaattcgagcggatcagcgcgggcacgccggtggaaacccgcccggacctgggcatcggccgtggcgatgtacgggtggacggccgccaggtgcacgtgaccgtgcacagcctgggccatgtcggcagcggcgtgggcgtggcggtgctggaagatgcgcgtggccgcgagatcgcccggaccgaagtgccggcgatggccgcaccggcggacctgcagccgaagaccgcggtcgtgtcgttgccgttgcctgccggtgaccgcagcggcctgcgcgtgcgcgtggcactggccgacggcggcgaggaagtgacgcagctcaacaaccgggtggacgtgccgcgctga

SEQ ID NO: 501320 - DNA, 2751 bp, Stenotrophomonas maltophilia
atgcaatctcggatccatggaaaaaagacaccggttaccttgctggcgatgggcgtggcacttgccctgtcggcaaacgcgaccgcccagcagcagaccgctaccgacctggacacggtgaacgtcacaggctatcgcgccagtgtcgaaaaggcgctggacatcaagcgcggcgaggccggcgtggtcgatgccatcgtcgccgaagacatcggcaagtttcccgacctcaatctggccgaatcgctgcagcgcattccgggcgtggtgatcacacgcgaagccggcgaaggccgcaacatctcggtgcgcggcctgggcccggatttcacccgcgtgcgcatcaatgggatggaagcgctgaccaccgtcggcgccggtgaccagagcggcggtaccaaccgcggccgcggtttcgacttcaacgtgtttgcctcggacctgttctcgcagctggtggtgcgcaagaccgcctcggccgacgtcgaggaaggctcgctgggtgccacggtcgacctgcgcaccgcgcgcccgttcgactacgacggcttcaccttcgctgcaagcggccaggccggctacaaccagatggccgaaaaggccgacccgcggctggccgcgctggtctccaacaccttcgccgatggtaccttcggcgccctgctgtcggtggcctactccgagcgccaggcgctggaggaaggctccaacaccggccgctgggccaacggcccgagcaatggcaacttcgctgcgtcatcgccgttcgccgccgcacgcgccgccgatgtattccacccgcgcttcccgcgctacgtgcagatggaacacgagcagaagcgcctgggcgtgaccggctcgctgcagtggaagccgagcgacgccagtgaaatatcgctggacatgctgtactcgaagatcgatgccacccgcgacgagcagtacatcgaagcgatttccttcagccgtggcagcagcagcaccccgcgcctggtcggcaagccgagcaccatcgtcaggaacggcgagatccgcaacggcgcgctgctgtacggtgaattcgacaacgtcgacatccgtaccgagaaccgccacgacgagtggagcaccgagttcaagcagatcagcctgaacggccagcaccgtttcggcgacgacttcaccgtgtccggcaagctgggcatctcgcgctccaggcacgagaacccggtgcagaccacagtcatcatggacaagtacgacgtcaagggctacagctacgactaccgtggcaacagccgcttcccgatcctcaactacggcatcgacccgaccgaccccaacggttgggaactggcggaaatccgcctgcgcccgcagtacgtggacaacgacttcgataccggccagatcgacttcaactggaacatcagccccggcttccgcctgaagggcggcgtgcttgccaaggactacacgttcaagaccaccgaactgcgccgtgccagcgaactggccgtgccgaccttcgccagcggcagcaggatcgtgcccgtggacatgatcaaccaggccggcctgaagggcatcaatggcaatccgtccaactgggtggtgccgaacctggatgcaatcgccgaccagttcgacatctacagcaacagcggcatctatgccgtcgcgccgcgcgccaacaacgtgcgcagcgtggaagagaaggaccgtggtgcctacctgatgggcgagttcagcaccgaaatcggctcgctgccgctgtctggcaacttcggcgtgcgctacgtgcgcaccaggcagacctccaccgggctgtcgacgctggccagtggtaccacctccaccaccgccacccgcacctacgatgacaccctgccctcgttcaacctggtggccgaggtcacgcccgatttcctgatccgcctgggtgcggccaaggtcatgacccgcccgggcctgggcagcctgacgccaggtgcaaccgtggccgtggccggtggtgcgcgcaccatctccagcggcaatcccaacctggacccgacgcgcgccaccaatgtcgatctgggcttcgagtggtacttcgccgaaggcgcgatggcgggcctgggcctgttctacaaggacatcgagacctcggtgcagaccctgcgcgagaaccgcccgtacaccgacagcggcctgcctgccgaactgctgaccggtaccggcgcctcgcccaccgacgacttcaccttcacccggccagtcaatacccccggcggtgagctgtacggcgccgaggcgaactacacccagcccttcacgttcctgccgggcaagtggtcgaacctgggcgtgcagctgaactacacctgggtcgaatcgaagatccagtacatcaactcggctggccagccggtgatgaagaacgatctgctgggcctgtccaaatcgtcatggaacgcaaccctgttctatgaaggcgagaccttctccgcccgcatctcggccaccaaccgcgatgactacctcacccaggtgcccggtcaggaaaccggcttcaacctggacggctaccacggcatgaccggcaccacggtcattgatgcgtccatccgctacaagatcagcgaccagctggaactgagcctggaaggcatcaacctgaccaacgaagcctcggatgaatgggtgtactcgcccgccaccggccgcctgccactccagtacaccgaaaccggccgccagttcctgctgggcgtgcgctacaagttctga

SEQ ID NO: 501321 - DNA, 1020 bp, Stenotrophomonas maltophilia
atgggtcgtatcgtgtgtttcggagagctgttgctgcgcctgggcgcccccggccacgaactgctgctgcagtcgccgcagctgcaggtccatgtgggcggcgccgaggccaacgtcggtgtctcgctgtcccggctgggacatcaggtgaggatggtcggcgcggtggcgggcaacccgctgggtgcgcacgcgctgggcgaactgcggcggcacggggtcgatacccggcatgtgcgcgaagtgccggatgcccgcatggggctgtatttcctcaccaccggcgcggtgcagcgcgccagtgaagtggtctatgaccgcgcggattcggcgttcgcacgcagcacggcggccgactatgactggcctgcgctgctgcaggacgcacagtggctgcatctgtccggtgtcagcccggcgctgggccctgacgtggctgccgccacgctggcggcggcgcgcgcggcacgccaggccggtgtccgcgtctccttcgacggcaatttccggccccgcctctggcagcgctggggcggcgatgcccaggcggtgctgcgcgcgctgttcgcgcaggccgacattgtgttcgccgactaccgcgacatggaggtcgtgctgggtacgcgcttcacgcagccggacccggtggagcgggtcgacgcagcggcggcggccgcgttcagcgcctttccgcagctgcagtggatggcatgcacgcagcggcaggtgctgagcgtggaccatcatgcgatgggcgcgctgttgctgggccgcggagggacacgcgcgcaggccccggtgcgtcacctgcagggcatcgtcgaccgcattggcggcggcgatgccttcgcggccggcatcctgcatggcatcctgtccggccttgatgccgacgccaccgtgcgtttcggcctggccgccggggcgctgaagcactccattcccggcgatttcaatcctgtcagcgaagctgacgtgctggccctgatgggcgaggagcaactcgatgtccgccgctga

SEQ ID NO: 501322 - DNA, 144 bp, Stenotrophomonas maltophilia
atgaattcgaccatgaaggccgctgtcgtgcgtgagttcggcaagccactggtgatcgaggaagtcctggtaccgcgcccgggggcgggcgaggtgctggtcaggatcgaggcctgtggcggactccacacaataaccagctaa

SEQ ID NO: 501323 - DNA, 342 bp, Stenotrophomonas maltophilia
atgaagacagtcttggacgtccggttctaccgttccgcctcggccgatgagcctgtgcggatatggctcaaggaagaggtctctgccgaggcacgcagggccatcggtggcgatatcaagacggtccagctcggctggcccatgggcatgccgctggtgcgaaagatggacgaccggttgtgggaagtgcgtagctcgatccccgaaggcattgcccgcgtcatgttcaccacggtcaagcaggacatggtgctgctgcacgggtttgtgaagaagtccgataagacgcccaaggccgatctggcagtggcaaagaagcgtagggatgaggtgatcaaatga

SEQ ID NO: 501324 - DNA, 348 bp, Stenotrophomonas maltophilia
atgagcaagaacccgcacatcggatcgagctttgacgacttcctggagtcggaagggctgctggaagagtccgcatctgtcgcggtcaagcgcgtgatcgcctggcaggttgctgaagccatgaaggtggccaaggtcagcaagtctgacttggccaagcgcatgaacaccagccgctcgcagctggatcgcgtgctggatgaggcagataccgggctcaccctcgatacgctcagccgtgcagccaccgcgctgggctatcggattcacgttgacctggtgccgcccaagcaacagggcagcaagcggcggaaggatgcgactgaggctaccgtccgcgcggcgtga

SEQ ID NO: 501325 - DNA, 1041 bp, Stenotrophomonas maltophilia
gtgactgattcccctgctgatgccgctatcggtcaggttgtgcccgcgccgagcgcgggcactgccggggcaattacggccttttcctttggtgaaccaacgcccgtgctggactcgcgcgggttgttcgattatttggaatgctggcgcaatgggcgctactacgaaccaccgatcaccctcagtggtctgtcgcgcaccacgcgctccaatccgttcctgcacagtggcctgatcttcaagcgcaacatgctggtgcgtaccttcgtcccgcatcgattgctggaccgcaccgcgttctcgcagatggccttggattacctggtgttcggcatggcgtacatggagcggcaaatctcctactccggacgcctgttgcagttacagccactcatggcccagtacatgcgccgtggtgtgcaacccggtgagttctttcaggtgcgagccggacgggccgagcatgaatttgcacctggctctgtgtaccagctgcgcgaggccgataccgatcaggaaatctacgggatgccggagtggctggccgtggtgcagtcggcgctgctcaacgaatcggcgacgttgttccgccgcaggtactacaccaacggctcgcatgctgggttcatcctctacatgaccgacccgcagccggagggcatggacgtggacgccctgcggcaggcgctgcgagactcgcgcgggccgggtaatttccgcaacttgttcgtgcattcgcccaacggcaagaaggacgggttgcagctgatcccgatcagcgaagtggccgccaaggatgaattcaccggcatcaagcgcgtgacccgtgatgacattctggctgcactgcgcatccccccgcagctgctgggcatcgtgcctcagaatgcgggtggattcggctcgattcgggatgcggccacggtgtgggcatcgatggaactggcacccttgcaatcgcgtatggccatggtcaacgaatggatcggcgaggatgtcattaccttcgccccgtttgacctggcacccggagcaacctga

SEQ ID NO: 501326 - DNA, 750 bp, Stenotrophomonas maltophilia
atgagcaacatcgagaccaccaccaccaccacctccgaactggctacccaacccggcgaaggtgccgaggtagcgtcggtatcggagaataggcggcggctgaacgagctggcccagcagttggccagcgcagtgcagcgcaagcgcgccctggtgggcaaggtcgatacgatgcagcgcgccaaacaggctgcacagggtgacgccgccgctgcacgtcagcagtggggggccaaactgcgccagagcgatggcacgctgacccgtgacattcagaagctgcgcgccaacgagcgctcggcgctctcgctggctgaggaatatgaggcgatggagggcgaaatcgcggctgagctgccgcgcctggagctggagttggctgaggctgcggatcgttgcctcagcacgacgaacggtgtcatcagagaggctgccagtcaggcctatgggcagttgctggagcaagcgggcgatagcctggcggtcgcctttgcactgttctcgagagcggagaacccgggcgtgaaccatcggcaggcagccagtgacgacgaactggccagcgcgtttttcggcaacctctgcaacgcggtgcgccatcgtttggacgatgccacagtgactgagcaggttgcggaacgcttggcattgccgccgatggatatgagcgaggtggacatgcagctggcaggcagtactgccgcccgtatcaggcggcgggtagagctcaatgcagagggcgtggcgtga

SEQ ID NO: 501327 - DNA, 1851 bp, Stenotrophomonas maltophilia
atgagcaacgtcacctctgtcgatttcaatgatgccgccaagaacgccggcactggcgccgtacgcggttcgattcagcgcgccgtgcgcaagggcgccaagggcaggaccaagggcaacaaggacgccgtcgacagcgccagtgctgcacgggcccactaccagctcaacgagaccggcgtgtactacgtcggtgtcaccgaagacggtgacctggccgagccggtgtttgtctgctcgccgttgaaggtcgaggccaagacccgcgacagccagagcgagcaatgggggcggttgctgacttggaccgatgccgatggccatccccaccagtgggcggcacctgcggaaatgctggtgggcgacccgcgcgagttcgtgcgccagctggcagcgggcggtgtggaaatgtcggcccaccgcaacacgatgcagcggctgttggcctacatcattcaggagcgcatcgacacccgcgcccgtaacgtggccgtgccgggctggcatgagggccgctatgtgctgcccaatggcgaaagctacggcaatggcgcggagcggctggtctaccagcacagcggtggattgcagcatcactatgcggcggtcggctcgttggaggactggcgatgcgacgtggcccggcgctgccaggacaattcgcgcttggtgctggcggtgtcggcgatgttcgcggggcccttgctgcacttcactggcgctacgggcggtggcttccacctggtcggcagcagcagtagcggcaagagcaccgcgctgcgcgtggcggccagcgtggtgggtcccccggaatacgcccgcgaatggcgcagcaccgccaacggtctggaaggcgtggcggtactgcacaacgatgccacgctgattctggatgaactggcgcagatcgaccccaagcaggccggtgatgcggcctatctgctggccaacggcaacggcaagagccgcgccaaccgggccggtgaggcccgtgcggcggcacgctggcgggtgctgatcctgtcggccggtgaggtcggattggcgcagcacatggccgaggtgggcaagcaggcacgggcgggccagtccgtgcgcctggccgacgtacccgccgaggccgagggcgggcacggcgtgtttgagcgcctgcacgatgccagcgacggcgcggcactgtcggccctgctcaaggacgcggcagcacgcacctacggcgcaccgtggccgctgtggatgggctacctgacccagcaggacagcccgacgctgaccgcccagctgcgcgaatcgaccgaccgattcctggccagctacgtacccgaagatgcctcgggggaggtgcgccgggtggccgagcgctttgctgttgtcgcctttgctggggagttggccagcacctgccgccaccgcatcaccggttggcccaagggcgaggcgacacggggcgtggcgacgtgcttccaggcatggctgcaacgtcggggcggttccggcagcgccgacaccgacgaactgcttgcgcgcgtgcgtgcgttctttgaagcccatggcgagagtcgcctggagctgctgcgcggccccgaaggcacagtgccggtgcgcgaccgtgtaggtttccgacgcttcgatgaggtcggattgacggaatacctggtgctgcaggaggcgttcaggcgcgagctgtgtgcgggctttgatgtgcgcttggccgcacgcacgctggctgaggccggatggcttaagcgcagtgccgatggtaggccctcacaagctgtgcgcatccccggcctgggcgctatccgcgtcttcgtctttgaccctcgcaaggttcacgacagcggcctgtaa

SEQ ID NO: 501328 - DNA, 852 bp, Stenotrophomonas maltophilia
atgacgcggcctgagggattcattgccgcactgcgtgcggcaggactatgcgtggctacgggcgatgctgtcctggccaatggccgtctgtgccgcgtccgcgccgagggcgatggcagcggccagcgcagcggctggtatgtgctgcatgcaggcccgcctcaggccggtgcctatggcaactggaagaccgggctcaatgagtcctggtgcgaagctggaagcgaggcactcagcgaggccgaccgcgcgatgctgcgcgaggccgtggtgcgcgcacaacgccagcagcaggccgaacgcgcccagcgccaagctgtggcccggcagcaggcgcgtgagcgctggcagcgcgccagcgctgctacgcccgaccatccttacctggtggccaagggcgtgggcgtgcacggcctgcgtcagctggacggcctgttgctggtgcccctgcgcgatgcacaggggcggctgtggagcctgcaaactatcgccgccgatggcagcaagcgcttcctggccggtggccgtaagcgtggtctgtactacgccgtaggccgcacggtcagcgacgtggtgtgcatcgccgaaggctatgccactgccgccagcatccatgaggccaccggccaccccaccgccgtggccttcgatgccgggaacctggagccggtggcgtgcgccctgcgcgccaagttcccctcggcggtgatcgtggtgtgcgccgatgacgatgcggccaccgcctcgcggctgggcatcaatccgggcgtggccaacgcccagcgcgccgccgatgccgtgggcggggtggtagccatgccgccgcggcccagccatgaggccacctcctga

SEQ ID NO: 501329 - DNA, 651 bp, Stenotrophomonas maltophilia
atgaacacggaaaccgtaagagtgtccggcgtgccgggtgtggccgatggcgtgctgagcgccaccatcaccgatacctggttcgatgccgagcgcaccgcccatattgtcgaggtggctcgccgcatcgagcggctgcacagcaaggcttcgcgccgtcttgccattgtcagtggtgaactggatgaggcgctggaaggccacccgttggaggaccgcctgcgcgagcgcctgctgtggccgctggagcgcgattgcctggagttggccacggttgcggcgcgggtgcgcgtgcgcctgtcgttgttcgcgcctgcgcagtcacaggagcagttcgatcgcggcatggccttgcagctggccgacctgcaagccgagcaggctgctgtcgagccgccgcaagagcgcgcgcccagcgctgcacccatgccctacggctactggatcagcgaggacagcttcaatcgcgtggagcgtgcgcgttccgcctctttgctgctgtccagcgtaggcgagggcatcggcgagtccgtggcgttgtcgttcgatgccgtggcggccagcgccgcctacgtgcatgaagacctggccgctgtggtggccagcgcccgacacagcagtcagatggaggccgacgatgacgcggcctga

SEQ ID NO: 501330 - DNA, 216 bp, Stenotrophomonas maltophilia
atgaacgtctctgccctgaatttcgccgtcgccaatgacgatgcggccacgcatgacctgtttagcgctgtgcgccagttgcagcgcatccacacgatgccgatggctgcactgacgcagctggtagccgccttggaatgccgccctggtgcactggaagcactctccgtaggccagctgctggtgatggtccgagacgcggaggtggctgcatga

SEQ ID NO: 501331 - DNA, 288 bp, Stenotrophomonas maltophilia
atgaccagttcaagagcgttcctacgctgcccgcactgcgataccgccgccatcgtgcgcaccagcgtgctgcattccaaactgctgcgtgaatcactgctccagtgtcgcaacgcgctgtgtggccataccttctcggcctacaccgaaatcgtgcgcacgcatacgcagagcgcgtgcccgcgaaatgacatctgcctgccgatcagcagtcctgctgaacgcgccgcgctcagtgcacaggccaagcaagagcccgtcaccacacctggcaaggcacggcgatga

SEQ ID NO: 501332 - DNA, 204 bp, Stenotrophomonas maltophilia
atgaaagacaccatcgtcctgaccatctccaaccagaaattcaacctcagcccggaagaggccaagtttctggccgagcatctgcgcacggctgtggcacagccgaatctggcgctgaacttctcccaaagccggaccgcgcaaggcggccgcatcgcactgtcgcgtggtgtcgcgggtagccgctcggtcactgactgctga

SEQ ID NO: 501333 - DNA, 273 bp, Stenotrophomonas maltophilia
atgcttggttccccaacccctccggcgaccgcacctggccagcctgccgatcattcccggcatgacgccggacgcggtgagcgcttcctgcgcaagcccgaagtgctcagccgcaccggcatatcccgctcgcacctgtacgggctgatgaaacgtggccggttccccgcatcgatccccctttccccgcgcgtgaccgtctggctggagtcggacgtggacgcgtggattgccacccacatccccgacacccatctgcgagtgcagccatga

SEQ ID NO: 501334 - DNA, 2484 bp, Stenotrophomonas maltophilia
atgtcgctgcaccagtaccggcgcaagcgccggctcggcggtggcgccgggcagacgccggagcctgacgacatccccgcgcacggcgatccgaagcgccggccgacctttgtcatccagctgcatcacgccagttcgcgccactacgacttccgcctggaaatggagggcgtgctgaagagctgggcgataccgaagggcccctcacttcgggccggcgagaagcggctggcggtgcaagtggaagaccatccgctgtcctacgccacgttcgagggcgatatccccgaaggccactacggcgcgggccatgtcgaagtattcgatcagggcacctgggcctgcgaaggggatccgcttgaggcactcgccgcagggaagatcgacttcgtgctgcatggccagcgcctggcaggcgcctggaagctggtgcgcacggcgatgaaggggcgccaggtgcaatggctgctgatcaagcgcgatgacgatgcagcacgcgatgcggaggcggacgacctgctggaggtgcccgcgtcgaaagcccgaccgtcgaagaagcgtgctgcgacgaaagcggttcgcgctgctccggccgcgcgcgcccgcagccgcagggcctcagcgcgctggcgtacccgcgcgctggggctggaaggcgcgcgcgacacggcctatccccgcgacttcaagccacagctgaccgatcaccgcgacagtgccccggacggcgaacgctggctgcatgagatcaagtgggatggctatcggctgctggccgacctgcacgaaggacaggtgaagctccgttcgcgcaacggcctggactggacggccgacttccccgaagtggcgcaggcggtgcaggctctgccggtggatgatgcgcgcctggacggcgagctggtggtgctggacaagcaggggcgcagcgacttcgccgcgctgcagcgggtgatcgacggcagttcgaagcagccactgcgctatatcgtgttcgacctgcccggcgtggccggcacggacatcagtcgtgcaccgttgctggagcgcaaggcgctgctgaaggatctcatcgggcccgcgccgggcatcctggcgttcagcgaacacgtgatcgaccatggaccgcaggtgttcgacgccagcggcaaggccggtttcgaaggcatcgtcagcaaacaggtggatgccccgtacgtgaacacccgtgcacgcagctgggtgaaggtgaagcacgaggacaccgaggagttcgtgattgtcggccacactgcacccaagggttcacgggtaggatttggctcgcttctgctggcggcgccggacaagggagggctgcgttacgtgggacgggtcggcaccggtttcgacgatgagagccttcgcgcgctggcccaggccttgcagccattggcagtgacggcgccggtactgcagctgccggcacacgtcccgttccgcgcggccagcgtgcgctgggtcaaaccggtggcggtggccgaggtggccttccgtggctggggcaaggaaggcctgctgcgccaggccagcttcaagcggctgcgcagcgacaagcagaaaaaggacctgggcgtggacgcagcagaggccgacgccgggtccggggtccagatcacgcatcccgagcgggtcgtgtatcccaggcagaagctgcgcaagggtgacgtggccgactactaccggcgcatggcacgctggatccttcctgaaatcgccggccggccgctgtcactgctgcgctgcccggatggcgtcggcaaggcctgcttcttccagaaacaccatggccccgggctgggcgacgccgtgcatgcggtgcccctgcagcagaaaagcggccgcgaggactatgtctacatcgacgatgcacggggcctgctgcaactggtgcagatgaatactctggagctgcatccgtggggcgcgaccgtggccgatcccgagcatcccgatcgcctggtgttcgacctcgatcccggcgaaggggtgagctgggcacaggtgaaagccgccgcgcgcgatgtccgtgaccacctgcaggaggtcggcctggagagcttcgtgcggctgtccggtggcaagggcgtgcatgtggtggtaccgctgcagcccaagggcgactgggaacaggccaaggcgttctgcgaggcgtttgcgcgggcgatggcggagtgggcaccggaccgctacgtggcgaccatgagcaaggccaagcgtggtggcgtcatcttcatcgactggctgcgcaacacgcgcggcgccaccagcgtgtgctcctggtcgctgcgtgcgcgcgacagtgccggcgtagcggtgccgctgcgctgggaagagctggcccgggtcagagcggccgatgcgttcccgatggaaaaggcgctggcccgcgccaaacggctggacagtgacccatggcagggcatcgcgcaggtgaagcagacgctgccgtcgctgaaacggtag

SEQ ID NO: 501335 - DNA, 615 bp, Stenotrophomonas maltophilia
gtgcgaatgaggttgttgattgcgcttgttctaggcttgagctgcagcgcgtgcgcgtcgctgcttcctggtagccataagatcagcgccttctacgtgtctaacgccgactcggatgtgaccggctgcgaaaggtctgaccacagggaaatttcacttgcgtgccatcggattgttgatggcgacaatgttgtagtggcattgcgcgagtacacagcgaccaagattgataatgaaagatgcaagaagctgacattgatccttcccccgaatctggcggagggagatgtcttcagtttgacggagggtgataccagggcgttctacagcactggcctcagcctgaaacctggcagcactggatgctacggaaaggcagtttcaggcagcgtggagatcctcagaaaatccaatgatctgatgcagcttcgcatcaacgcgcgttttgatctcgatagccccgcgggctggaaggaccactgcaaggtgcgcgagctcagctatgaactgaatgccatccgcaggccgctgggtcagctgggcgcatgggaaggcgtgccagcccccggagattctcttatcagcgagggcagccccgatggcggtctgccttag

SEQ ID NO: 501336 - DNA, 594 bp, Stenotrophomonas maltophilia
atgaaatgcagtcactgcttccgtgccagtggtcttcttctctgccttgcgaccctgcaagtccaggcccgcgccctgcacgagtgcatcgttgttccgcaggccgcggtcgtcactgacatgccggctggcctggacgagttcgaacaacgtttgtggacagcaaatgcaggccaggtggtgagcaagggcactgacacccttcttctgcttcgcctgttctcggaatcaccgggcgtgatggattcccaagagttcaccaaggtcaccggcaccctgtctggatacactccgtcctctgaagggattccggctgtgctcggcgcacgcctgagcagtggcagtgcgggcttcgcgcacaagggagactactggttgtccgattcagcggatatcgaactacatcggccgcacaagggcgacagtcggatcgaagtcaaagtgacggctgttgggtggaacagctatcgaaaggaggaccgttccttctatctccagatcacctgtcaactcgaggagatccctgtcgagaagctcagtgcctggcaaggcggcaacggcaacctcttgggatcctttggtcctgccagataa

SEQ ID NO: 501337 - DNA, 1071 bp, Stenotrophomonas maltophilia
atgtcgctggaccactaccgcctgctcggccgctccggccttcgcatcagcccgatggcactgggcacgatgaccttcggcgccgactggggctggggcgcggacgaaaccgaggctcgccgcatcttcgacacctacgtcgaacgtggcggcaatttcatcgataccgccaacaactacaccaacggcagtgcggaaaccctgcttggccggttcgcccaaggccagcgcgaccggctggtgatcgccagcaagtacaccctcgccaccgtccccggtgaccccaacaacgccggcaaccaccgcaagagcatgctgcgctcggtggaggacagtctgcggcggttggggaccgactacctcgacctgctgtacctgcacgcctgggacgacaccaccggcgttgacgaagtcatgcggggcttcgacgacctggtccgcagcggcaaggtgctttacgccggcatctcggacacgccggcctggcagatcgcgcgcatgcagaccctggccgacctgcgtggctggtcgccgctggtggcgctgcagatcgagtacagcctgatccagcgcagcgtcgagcatgaactgctgccgatggccgatgcgctggggctgggcgtggtggcgtggtcgccattgggcagcggcgtgctgaccggcaagtacagcacggccgacctcgccagcgccgaggcgttgccagccacacccggcgggtcgcgccgcagcgtggccctgatcaatggtgcgttgacgccgcgttcgctgcagattgccggggacgtcgcaaccatcgctgccgatctttcgcattcgcctgcgcaggttgcactcgcctggttgctgcagcgccccggcgccggcgcgctgccgatcatcggcgcccgcaccctggcgcagttcgagcacaacctggacgcgctgcagctggtgctgccggccgaggccctggcccacctcgatgcgatcagtgcagtggcaccgtcgttcccgcacgatttcctgcggatgccgttgccgcggatgctgatgagcggcggcacccagctgcggccgcgcgggcgctga

SEQ ID NO: 501338 - DNA, 933 bp, Stenotrophomonas maltophilia
atgaagagtgacttcacaatggatccctccgcaccgttgtcggcggtggtcgccttcgttcacgtcgccgaccatgccagcttcacccgcgccgcagatgcgctgggcatctccacctcggcactgtcgcagagcgtgcgcgcgctggaggcgcggatgggcgtgcgcctgctgcaacggaccacgcgccgggtcggcctgaccgaacacggtgcgcgcttccttgaacgtgtacgcggcggactggagcagatcgattcggcgttcgccgacctcgacagcgcgcgtgcggttccggccgggaagctgcgcatcacccttccacgcatcgtggccgagcgccgggtgctgccggcactgccttcgttcctggcgcgctatccacaggtggacgtggagttgtgcgtggagccggcgttgaccgatctggtggccgaaggcttcgacgcgggtatccgccttggcgagtcgctggcgcgcggcatgatcgcagtgccgatcggaccgccggagcggcaggtggtggtggccacgcccggctacttcgcgcagcacggcattccggccagcccgcacgaactgcagggccatgcatgcatcgtccaccgccgcgccaacggccgactgatgccctgggagttcagccgcgatgaccatgacctggaggtcgaggtcaacggccggctggtgttcaacgatgccgagctggcccacggcgccgtgctggccgggctcggcatggcgcaggggttcgcgtcactggtggccgatgacctggcatccgggcgcctgcaggcggtgctgcaggactggcaaccgccgttccccggcttccacctgtattaccccgcgcgcgagcacatggcaccgaagctgcgggtgttcatcgaccatctgcgcgcaggactgcacggcgggacggggcccacctag

SEQ ID NO: 501339 - DNA, 570 bp, Stenotrophomonas maltophilia
atggagtttttccagcgaagtctcgacttcatccccccacacagtggacctttgcccgaaggcgccgatggccatgacgacggtgatgggccgcgtctggcatggagtctggccctgttctcgcgcatgcaccactgcagctgcgctgagatggacgccgcttcagccgacgacgcctgggatgcgctgctggcgcgcacgcgcatccgaccgcatggcaccgctgcggcgcggctggttgaacgtgcgcggcactggatcgagcggcatgccgatgatgaaacgctgtcggtggaccagctggcgtcggccctgaacatgtcgcgcaccagcctgcaccgcaagctggtggccagtattggccacccaccgggtgaactgatccggctggtgcgcctgcagcttgcgcggcgcctgctgtgcgaaggcgaaggcaatgtatcggatgtggcctacgcggtgggctttgtcagcctgtccggcttcagccgcgcttaccggcaccactacggcgaaccgccgtcgagcatgcgcggcaacccgccgcgcacgcctgcaacccggcgctaa

SEQ ID NO: 501340 - DNA, 507 bp, Stenotrophomonas maltophilia
atgagcggcaccatgactttccacagtttgatcgaagcactggccggggccgtcatcgaggcccaggacagcatcgagatgcatcagctttcaaacctgcgcgacttcttcgatgaagacaaccggcccaggagcgtcaccatccgcctcccctcgcagcacccccaggccgaggaaggtgatgaagacctctaccgcgctccgctgttgcccctggtctccaccaacaacctgcgcatccgggaagtggagatcagtttcgacgcggacctggcggacctgggagccgaggatccggatgtgcctgcgccgggcgcagcggatgcctgggagtcgccgcggccggcggcgcgacacgtaggactggacaccggccgcggcaagggcgtgggcaacgtacacgtgcagctgcgcgtggaaggaaccgagccgaccgatggcgcggcccggttgatgaaccacctggcgcaaagccagggggtcttcaagaccatcaaggcaacctga

SEQ ID NO: 501341 - DNA, 639 bp, Stenotrophomonas maltophilia
atgagcgaattggtcaatatctccagccagttcaagggcctgccgatgagcgatctcatcggtggtccgttgacggccgcctgcgattcacagatcaagctggcccaagccaccgccagcttcatccgctctgtcggcttcctgccgccggaccccgccaacgccgatcccaacgcggtcggtgccacccgcaccgcgctgttccgcttcaagcgccctgtcgacaacctcgatccggcgaccaaggcggcccagcccttcgccgaagaagaagtggaactggaagtgccactgctggccatcgtcaaggtgccgaacctgagcatccagaaggtcgacatcaatttcgagatggaagtgaagtcctcgttctcggccaaggaatccagtgactactcggccagtctgcaggccgagatgaaggtcggctggggaatcttctcggccaaggtgaacatccagggctcggtggcctcgcacaaggaaaatgcccgcagctcggacaactcggccaagtacaccgtgtcggtgctggccgaggataccggcatgcctgaaggactggcccgggtgatggacatcctgctgaccgccaccgcaccgcgcaaggtcagcgcaccggtgccggtggcggcgtaa

SEQ ID NO: 501342 - DNA, 258 bp, Stenotrophomonas maltophilia
atgttcgatctcaacgacgtaaagttcgtcagacggattgtggtgggtagcaacaacccgacacagatgctgaccgacgatgatctggcccaggcccagtcattgctcaaccgctgcctgagcgacacgcccaagggagcgatcctgggcatcgagcgcagcttcaccatcctgcagatcggcgagcaccaggtggtgctgcagtggctggcctaccacgtcggcttcccgcggcggccggtgtggatgagcgagtga

SEQ ID NO: 501343 - DNA, 456 bp, Stenotrophomonas maltophilia
gtgaaccatggtaccggcaggcggggccatgccgacccgcacctggacgacctgatcgcgaccctggcccgcgccctggcgcgtacgcgccagtcctgcgcacaagcccacctgcaacgcctgcaggcacgcctgtatcgcgggcaggccctgtgcgtgcagcattggcaggacggacgctggcaggcgatggacgtgccgctgcatgaactggtcgcgcctgggcgcattctggcgtccacgctggaagtgcagattgactgcgacgtggaggaagccgagccagaccaggacgggcagccgccggcactggccctgctgcccacccaccgtgacgcgccgcaccggctgaccatcgtgctgtacggcggcaacccgctgcgcggcgaactgctgctggatggccagctgctgaggcccctgctgatcgatcccatcactggccgggaggcatga

SEQ ID NO: 501344 - DNA, 192 bp, Stenotrophomonas maltophilia
atggcccgacgcgcgcgcctgcgcctgtggttgtccgatgaagatgcacgccaggtccggctctggctggccccggtgctggcgcagcgccgccaacaggcggccgaacgccgccgccgccgccggcgtcagctgctcaccacgctgtggttgctggtgttcgccatcgccttgttgaaccgccatctctga

SEQ ID NO: 501345 - DNA, 780 bp, Stenotrophomonas maltophilia
atgcatgccccactttccctccgccgctcgccgacgctgctgctggccccgctgctggcctgggccagcccatacccggatagcgccgtggctgcactgcgccagcccgacgccaccacgcccaccgcagcagccacctgggtaggcagcaatgccggcagcggccgaccctggtcactgcgcctgagtgacggcgcggatgggcgccaggtcacgctggaattcggtgaaccctacaactgcagggtcaaggccgcacgtaacctcgccgaaaatggccaggtgcgcctgaccatcaacgatgccaacgggggctaccgctgcaacgcgctggtgggccagatcgccacgctcgaagtgcagggcccgcaggcgacgctgcacgtgcccggcaccacaccggtcgcagtcgcgatgtggaaacccggccaggccaccgatgggggtgccgatgccgtgcagggccgctgggtgagcacggtgaccagcaatgggcggccgattgccctgcgcctgcggctggcggcgcgtgaccctggcgaccggggcagtgaactggcctatgacagcccgcgcagctgtcgtgctccgctgcgctatgaaggcaccactgcacagggcagctggttcagcgcactgccggggccgggagggcaggcctgcgaccgcctgatcggccactggctgcgggtgcaggccgatgcggatgccacacggctgcagatcgaaccgggcatcggggaatgcgtgcccaactgcagtctgcaacgcacgccctga

SEQ ID NO: 501346 - DNA, 501 bp, Stenotrophomonas maltophilia
atgaacgcaatgacgttgagcccacagggcatcgactggctcaagcgggtggaaggacagcggctgcaaccctacgatgaccagacaggcaaggcgatcgaccattgggtggccggtgcgaccgtcggctacgggcacctgatcacccgcgacgaatgggcggcactgggccggggcgtcaccttggccgaagccgaacggctgctgctcagggacctggcgcccttcgagcagatggtcgtccgcagcgtgaaacccagcctggcccagcaccagttcgatgccctggtgatcctgtgcttcaacatcggtagcggcaatttcggccgttcctcggtgctcaagctggtcaacgatccgcacgtggccacgccctacgccaacctggaggcggcctggatggcatggacacggtcgcagggcaaagtgatgaagggactggtcaaccgccgtggcgccgagtggcgcatgtacagcagcggcagctacgaccactggtaa

SEQ ID NO: 501347 - DNA, 1185 bp, Stenotrophomonas maltophilia
atgccctgcccccgccccgcgccgcgcgcacctgcctgccctcccacacaggcccggcggcgccgccatttccggcgcgccgcgctgctgcgcatcgtggccctgctgctggccgcactgttgggcagcctgctgtcaccgaaattgccggcggccgaaccggaggcaccacgcgtactcggcctgcacggccacctggagctggactacagcatcaccgtgcgcgtgcaggggctggcggtctgggcggcacgcaacgacgcgcgacggctggtgccgttcatcgatggccgcgcgctgcccggcacgtttcccgaatcgatcgacctgggcaacggcctgctggtctaccacccacggatcaacaacgacagccgcagcgtgtggacggatctactcggcgcgccggatggcatgcggcgtgcggtcaccttcagcgtcggcccggtcgacggctcgccgttcgccagcgtgcacgacgagcgcgggcgggtgcagctgaccgtgatctcgcccatctacggcggtatcgcgctggccgtggtggtggtcaccctgctggtattcgtgcacctggcgcgcaccaccagcatcatccgcaagccgatcccttacgggctggggccctacgatctcggccgtttccagatggcggtgtggttcttcctgatctacctctcctacaccgccatctggctcgtgaccgacgacaccgacaccatccatccctcgctgctggcgctgctgggcatcagcgccggcacggcattgagcgacgcggtgatcgatgctggcggccccgcgcccggcactttcccaccgctcgtggatgcgcctgccgccgacgcgcgcgggcagtggccggcccaacgcacctcgatcgggcaaagccgcagccgcctgcatgccgcccgccgtcagctggccgagcacggcggtgccgggccggacgctgaaagcggccacaacgcctcgcacgggctgctgcacgatctgctgtccgatgcgcacggctaccgcttcgaccggttccagatcttcgccttcaccctgatcctcggcgtggtgttcctgtccggtgtctacaacaacctgagcatgcccgagctcagcccgaccctgctgggcctgatgggcctcagttcgggtacctacatcggcttcaagctgcccgagcggcgatga

SEQ ID NO: 501348 - DNA, 798 bp, Stenotrophomonas maltophilia
atgagcctgcgccgccgacacggtacccgccgtaggctatcgtcccccccctcaggctggcgcgaacggctggtgaaactggtgcacatggtggccgagcaggcactgccgctgaccattgccggtgtgtcgttcgtgatcgcactggatgcctggctgtcggcccgaccgatgcagtgggaacaccagcgggcgctggcttcgctgtccatcagcagcgacgtcgacagccaaggcaagcgcaacgcggacagtttgcacacgctgaccatcaccaatgtcggcgaactgagctttgccgtgctggacatccagctggagctgtcggcacaggaggggctacgcgtgccctggtcgcgcaacacgctgctgcaggacccagcggtgctgccgatcggcctgcgcccgttccatatggaagtggccggagacaggcgcagtgcgcgcttcagcttccgcaccgagaccgcgggctggcacgtgatcgatccggggcgttcggtcgacctggtattcgcccagccattgctgggtcatgggcggctgggcattcgtgccgaggtgtttacccaaccactgcgcatggccgcgatgggcgagcaaatgaccgtcgagcgcgtggtcgccggccgtatccgccacgtatcggaagaatcgggcatgaacgtaatctccgatctgggcgtgtacccctacaccgccgcgaccacggtcatggtgcccggcgccggccgtgccgtggccgagcatgggccggcacaccgaacgcggcgttggcagggctcggcaaaccactga

SEQ ID NO: 501349 - DNA, 945 bp, Stenotrophomonas maltophilia
atggccattcctgccgctgcgtccgatgcgctgcccgcatcggatgcgcccccgacactgcacgcccagcgttgcctcggccaaccgctgcccccacagcgccagcgcggcccgtggccacagttgttcaaactcgaccagctgggcctttcatcgcgtctgctggatacgctggccacccacaccgatgcgctgtgctgggatacctacgacgtggcccagcggcgccggcgcctgatcaagcgtcaccacggcatcctgcaggcaccggtacgcaccctgctggaccgctgggacggcagtgaacaggatgcggcctggctgccgctgttggacgcattgccatcaatgctgcgcgcggcggtgctgcgcgtggcaccccatcgccgacgcgccctgcggaagtatgggctggaccgcgtggcacctgcctgctggaacatacagccactggacgacccgcacttcgagcagcccgccagcggcgaccgcgctccacgccgaaccttcgcgttgctgccgcccgaactggcctgcgatgccgatctgctgcggctgttggccggcatcgccgagaccgtgcacgagcgttgtggtgcgacccggctggcggtatcgctgcatcagatgctgaccctcgcgcgaccccattgcacggccgaaccggcaccggagggcgtgcaccaggacggcgccgactacatcgtgtcggccctggtgatccgccgccacaacgtctgtggcggcaactcgcgggtctacctcggccgcggcggacgcctgctgctctcgcacacgctggccgagggccagggcctgttccagcccgacgcgcgctcgccgctgtggcatgaggtgactgccatccacgccgacagcgacgccggcggcgaacggatgatcctcggcttggacatccatgtgctgccagcaggtgccgcatga

SEQ ID NO: 501350 - DNA, 177 bp, Stenotrophomonas maltophilia
atgtcccccctgccgccactgagccacgacgaaatcatcggcctgctcaacgctctgaactacttcggccatgcggtcgatgccgatacctgccagacgctgaccgggctggaacaggcacagatgcaggcgctgcatgcacgtctggaccagacgctggccggcacccaggactga

SEQ ID NO: 501351 - DNA, 435 bp, Stenotrophomonas maltophilia
atgttccagaccctgcatcgcctgcgccgccccctgctggccctgttgtcggcgctgtcgctatcgcttgcctttgctctgccgacgatggcctgcaccgtggccggcccgccgtcggcaaccaatgccgcaaccattgccacgagcatcagcaacggccatgcgtataccaagcacagcggtgagttcatcaatggtgtggtgatcgccggcctggccttcccgaacgccaccattgccagcaagggcgcctttgccaccttcctgcaaccgatcgtcagcagtggcgcgaccaacaaggccctgtccagcaaccgccatgcgttctgggatacgtccaccggcacggtggtgatcttcaatccgggtgccagcgactgcggcactgcctttcgtcctaccaacgggcaggcgtactacactgcgctgaagtaa

SEQ ID NO: 501352 - DNA, 1434 bp, Stenotrophomonas maltophilia
atgcgcgtatctcagcagtacaagttaaaacgaaagcaggcagagctcgatttcgttgacgttcctttggatacagatcttccagtttttgtggagcccacggcaattcgggcaatggacactccgtggtctagtgagtgcgtggcactccttcagaacttctttagcaatgttcttactgcggtgcaaaagggcgacaagactagggctgtctcgctacttgggtcgttgaacgaaagaaatgattttcatcttgggtattcatctggtaagtcgcgtggccacgcattcggcaagggatctgcagggtcagtgtgggagtcacttctgacaagcaaagccgcgaagtctggggtgctatctgacttggaagatactgcccttctcatcgaaggcgtgggtgctgacatgatctctgatgcggtctgcaacataatccgagcgccgctaattgagtacactcaagacatgtgccgatactacggcattcctatggtcgcaaatgtttcatcaggcccatgctgggacatgcaagcgcaaaactgggtggctaggcatgtagagcttcccatgccgaagggcgagagtctcgtgttggtccccaagtcgattgttcgactcgcgggtgcttacgacgctgggacctactatcggcactacttgttgccggaactacagaaacaacacttggccagtggatctggcctggtagaagtgctgaagagtaagaagcgaagggttacgaagaccgctttgatgaaacactatggtaaagacaaaaatgctgtagcaaaattgacggaggacaatcctgatgtcctcgccaagtataaaaaggcgaaatcggcagatccttcgcctccgatcagtaatagtacgtttgcagagattgagaacgtcgcgaacgttcaattgtacgatctctataagaaggtggtagctgtccctcctggaagagcccacgcccacgattatgagcgagctgtcgaaggcctcctttcggccttgctttacccgtctctcatacaccccgtgcgtcaagccccaatcaatcaggggcggaagattgtcgatctccggttttctaactcagccacggctggcttcttcagttggctttcaaagcactataccgcgccttacgtcttcgttgaattcaaaaattatacggaggatgttaagaatccggagctcgaccaattgtccggacgcttttcaaagtctggtggccaagttggaattttaatatgccggggagttagtgaccgtaagaagattgatgcaatgtgcagagacaccgcaaaggatgggcgcggctacatgatcgtgctggatgacgtggatttggaaatgttggttaagtcaacttccgcgattcactacgatgcctctagaaccatactgaatgatcggtttgatcaactggttctctga

SEQ ID NO: 501353 - DNA, 261 bp, Stenotrophomonas maltophilia
atggagttcgccaaggtgatccagctcaacacgggtgccgctgaccgtcgctacgacctgcgtgtctgcgacgaaccgatgtttcgcgcaatctggagggcccgtcagctggttgacatgacgggcatcaactaccgcgcctacgttcagcgtgctgtgacctacctgcgccactgcggcaagaagcgcatcactcccgcaatgcttgtctctgctgaagtacagctgcacgtgatggagctcgacgccgtcagtcgctga

SEQ ID NO: 501354 - DNA, 1074 bp, Stenotrophomonas maltophilia
atggctaggaacaagaagtcaggcgcgacgggcgggaaggcaaaggcaaaacggcctaacccggcccgaaagaaggcgtctgcgaagaacatggtgggggcgcagagcagggatgcctcgtatcaacgcgcgcttaagtcggctgatcccgtgaagcgacaggtgggagagctggtcttccagcgcacgtacatcgataaatgcttgcttgccaaagaagcattgttgctgcgtacccgttggatcgggaaccgctacatgtccccggtgcaggccacgcaggcgttcacggaggcgtacatcgctgcgtaccgtgctgcttgggcgcgtcactttgaccattccgaagcgccgcgcaagcagccctgtgcgccaagtctcgcattgaacgacaggtcggttattaccagcttgtggcgggcccgtcagaaggctgacgaactgggaatgccgtacgatctgttctgcgagatcatcatggaacgatggatcgtgggccgaaaggcgaagcgtccaccattgccaaaccagctgatttccgggaagttgttcggcgcatggatgcgaggacaccccacctgggctgagactggtgaacggttgttcttgcccgcttgggatcggcgcttctttatggagccgtctggagaagatcccgtgcatgctgcggcaatgcgggcattgaatgccgatgtgctgcatgcaagggaccgccccgcccgattggcgcggtatcttggggctggtggaccgctgacagaggcgcgtgccaaggcgatgtttgaagaagacatggtccgggatgcgctggcgatggtcgccgagcctgctgaggtcaacgaagcgcctgaaggatacgctccggcgtgcatcggcaatcgtagcgacgtgcgggatatgccgtgtcacaactgcccattcgctgtgcagtgctcgagcgtaaagcggaaggtgacacgcgcgctgaacgcggcaggcgtctcaggcgatccccgtgcggacaggaggcgtgagcagaaccggaacagccagcgcaagcatcgcgaggagcaacggcgaaaactggctgcatag

SEQ ID NO: 501355 - DNA, 660 bp, Stenotrophomonas maltophilia
atgtatagattgctcgccatgtatgcagtgtttatggcgatccacatgacacatggtcgattcaatggctactcggatggtcatgtggcttgctgtaaaccgcagtcctcattgatcgacggcgtaattggccgcgaggttgcatgggggcttggccgtgtaagcgcgttttggaaatcttggaggttggtgtatagcccatacaaagcgctatcaaagcgcatgtgccctgagcttgacgtgcaacatgcgggcggcggtgcacgagcctgtgcctgcaatcgtaaggcatggcttctttgtatgaagcgcacgatggtgttcggccttatgcgggcggcaaagaaagttcgccattcaagtctcatcccgtgcgaccgatatgctcaaggatgcataaaacaatcaccgggacggctacatggatcgttggacgtggatgatggtaaggatgtatgcgccctcacttggggctttggcgctggggttgctgctgatgctgccgttgggaatgctccggcagagtccgatgcttgcaggggtctatgcgatggcgcgatggctcccgacgttggctatcgcggtatcagtcacccttgcacttgtcgctactctaaggctttggcgctgggatcaagggcgcagcgctttggtttgtga

SEQ ID NO: 501356 - DNA, 987 bp, Stenotrophomonas maltophilia
gtgattagcaatcgagtcaaggaaaggtttggcatcaatgaggttcgcagcactgtagaaaatctttgggaatgcggctggcaggagtatggcgcacagaatgacgatgcaattgacggggtcataattatgagaaggggtacgaagcgcccctccgacaccggcggcatcgtttttacccaagtcaagtgcggcgggaacggctatcgcaaagaccaggcccaatatccagcgcacatcggcgtcgcgctaggaccagattacatcgccacccacatgcctcgatggatcagagcgccgggaccatgcgttctgatctttgttgacgacacaactggccgaaggtcgccggagtcatggtgggtcgacttgagacaggactgcatttcaccgacgaacaaaggaattgtattaattcccagagcccagcgattcggcgagcacagcaagggagatttccacaggctgtgcggatctggaacggtagaccgcctcttggatcgaatcaacctggagcgacgtgagtcactcataccaaccctaggaagaaatgagtccatccgcagagatgccaggtatttctacaggcattggcagcaagataaggccagtcagataaatcctatccttggccccattcttgttaatcgtgttgggtggaagcacatcacccgccgtggaagattaccagaacggattgttcaatcttggatgctgcttggcgcagcgaaagctatgattatgcgttgcacacaagtttatacacttggtcacgcatctgaagaacagtatgaagatggaaacattctagtgacggattacctagggctacgcgcaaaggtaacattcacctacagacatcaatccatctgccaagtcgtgctaaagagaacacgccttatccgcccaaacaacgaaaattcagaacggcagaaaatttggttttactccatatacgaaacgcgacgaggccgagagaacgtctaa

SEQ ID NO: 501357 - DNA, 1266 bp, Stenotrophomonas maltophilia
gtgatcgatccgggccctggtctgccacctcatgtagcgctcctactgaatgaggacttcgatttcacggaccccacgctggttgtccgtaggctgcgatcaatgcttcgcgaccttaagaaccaagcgaacatcagtgagatcgagcccttacctaaggtacccattggcaatccagaattcagagcagtattgagcggaggattggacctattcggcaagacgggcgcctgccaagaggtaccgtgcagaatcagatacgcggaccaaattgctcgaaccgtagccctcatgtctgatcgggtcaccgctcacgacttcttctacgaacgcatttcggcccttagatctcgcccgacgaacgccgagttatatggcttggcaatagatacccttgtgctcaagcgtgtacagcctctgattgaagcgggaatcctacgcttcacatctcccttcatgccaacctgcaattcttgcatagtcgaatttgagcgaagaattgagaccctcactgaagaggctgttgcgcggataggcgctgatatggtcatagggcgcactgaccgcggtgggtacgttgatctgaaagccgtctatgatccgccgatattcatgcacttttcaactaaattcgctaactcagctagcgatgaagagatccgatcgatatttttgcatgaggcggtacggtctacagtttgggacgcacgcactgctgcatggacttctggaagcgtcttctcgaactcttcagttggaatatctgctcttctatcctcggacggagcgcatttcacatcacctgagctacaggccttcgcagcggataggactgctgagctcccttgggttgcaagcctcacgattgaacaaacgcttgcactgcgtgacgccgccagcctcgcccttccccaactccgcgaattcatggcacgcaggctgtccggcttaggtgaatcggacgaaccgaatcgacagtggcgggaaatcgtggaagagctaagggaacaagcggcggaagttcgttcagaattagaggctgcaacgacccgatccccctctcttagtcgaaactctgcgggagtcctgggcttagcagtaagcgcagcgtgccttatcggcgacggccccatttctgcactcggcgggctactgggaacactcggtttattgcactccatggataacagacattcattcgaagcgaagaccaggccgggttatgtgctcgtctctgcaagagatatcctcgcgcacgcccgttag

SEQ ID NO: 501358 - DNA, 2517 bp, Stenotrophomonas maltophilia
atggtcgactttacaaagcgcgtctcaagcacaagaacccagcgccccacgaatccaattgacttgtacgaaacgctggacagacttcacgacaaaggcccattacggcctgcccagctttcggtcttagaggaatggcattcgaagcgaaagcatgaccgtgacgtgctgataaagctacacaccggacaggggaagaccctaattggactgcttgctcttcagagccaattgaatgacaagaaggggcccgccctctatctgtgtcccgacaactttttaatcgaccaaactagagagcaagcgagacaatttggcattgctacgtgcggagcggacccggaactcccagacgactttcttagcggagacaagattctggttacgtccgtacagaaggtattcaacggacttaccaagttcggactgaatcataagtcaatcacaatcggcacgttcctaatggacgacgcccatgcatgcgcggacacgatcagagacgcttgcaggattcgagtgccgcatgaagaccctgcttataaagcgctactgactctctttgcatccgatcttgaacagcaagggatcggaacttttgcagatattacaaacgagaagcgcgatgcattacttccagtaccctactggtcttggcagcgacatgtggagaacgtcgccaacattctatcggccgggacagatcggaagccaattaagttcgcttggccgctaatcaagaattccttgcatcactgccaatgcgtgatatccggagctgcgatagagatcgagccttaccttccctctattgaggcgttcggcagctatgcttcagcttcccaccgaattttcatgtccgcgaccgtcaccgacgatgcattcttggttaagggactacggctaaagcctgaaacaatcaccagaccactcacctactcaggcgagaagtggtctggcgagaagatgatcataatcccttcattaatcgacgaagatcttgatcgcgaacttatagtgagcacattcggcgcgagccagaagcggacatctggattggtcggcttgacaccagggtttgcatggacgaaagattgggcgcgatacggcggaattgttgcctcacccgacacggtttcgaagacaatagaaaacctcaaggccggcaactatggcaatgccgtagtcctcgcaaatcgatataacggcatcgatctgcctgacgactcctgtcgaattcttgtattcgacagcaaaccctactctgagaacttgatcgacctgtacgaagagtcatgcagaccgaagagtgtcaccacactcatgcgaacggtccggactgtcgaacagggcatgggacgtagtgtgcgcggagagaaggactactcagtaataattatcacgggatcggacatcacgcgcctaataagagacagagagtccagaaccttcctttcatctcagatgtcaacccaagttgaaataggcctcgagatatcagggtttgcgcgagacgagatcgagcaaggcacgaaacctatagacgcgctgagccaactgattcgccagtgccttggacgagatgcaggctggaagactttctactcagaaagaatggaagaagttcgacctaaaggcgccaacgcagaagcacttcttctctatacgaaggaactagaagctgagcttctccactcgaacggcgagaacgagaaagctgctgcagcaatacaagcactgcttgattccggcaaattgcccgactccgagagagggtggcatcttcaatccatggcacgcttcctattcaacagtgatcggctgcggtctcaggcgcttcaggtgacagctcacaaatcaaatcgccttgtattgaagcccgatcaaggcgtgacagtcaccaagctgtcgattatcagccagggccgctcggagcgaattatcgaatggctgcagaattatggcaattattcggatatggaaatagcgctcagcgaaatattgagccgactgacttttggcgcaaaagcggaccgctttgagcatgctctggacgaacttagcagggcacttggctttgcaggggagcgcccagacaaggaatggaaggaaggtcccgataatctatgggcattagactcaaagcagtacattatctgggaatgcaagaatgaggtagacgtagatcgtgccgatatcaataagcgcgaggccgaacagatgaacagatcctccgcctggtttctaaagcactaccccggactgagtgccaagcgaattatcgtacatccagcgagcaaagaagctagcgcggcatcattcctacatgaggtagaagtgatgcgggtgactgagctcaaaaagctgctcaagaacataagagcattcttcaagtcactgcagccacttgacttcgctgacttgtccgtcaaccacatccagaagaacttggacgcgcacggcctgtctattccatcactcctaaaagactattccaagaagatcaaaccattaatctaa

SEQ ID NO: 501359 - DNA, 1905 bp, Stenotrophomonas maltophilia
ttgaaaagtccagcgtcgagcaataggtccggttcactcaagtttagtttgacctacgcccaggtgctggcgttgtcggtcaacaaaggcccggccttggatgcgcagggaaaggttcgcttggtcccccgcccggaagccaaaccctacgtggtgctcgacggtggaccaggcgctcccacggggttcggcttccgggtcggctccacgatgaccacctacgtgggccagaagcgcgggcccacgggcacgccgatccgctttaccttgggcaacgtgagcgacatggggctggacgaggccagggacgcgtgcagggagcacttggcgctgctcaaagaaacgggaaagaaccccgtccacgtcaagcgccagcagttgctggagtcgctggagagggaatcggaaaaggagttcggggatctgaccttgcgcgaggcattggagcgttacatcgcccacctggacgcccgcgcaaagaacaagaagatcaagccggccagcgtggacgcggtgcgggacagtttggcccgccttttgcgccccgcggttgggttggcggataaatccttgaacgagctccacttggaggtcatccaacaggcctttgatgcttgccggatcagttccatgcaactgtccaatcgcatcccgcgggacatgagcaagaagctggcggaggtggcggattgggcgaagctcaccgtgtcccagctggaagcgttgggcatcaccggcaaatacatccagcgtgtgcgagctgcagggttgagttcaacggaacacacgttttcagatgccaggcgagcggtcgacttcctcatcgaagaggaaagagcccgcgatcatcgctttggccggccccaacgccagttctacaacccgctggtggtcatccatacccgggacatgctccgagaagcacacgagctgcgaaaccattacagccgggccgaggttcgcaatcccctgaacgacaaaaccctgcccaaggtcctcaaagccattgcagcacggcgggacgaacaaggcgggcgcaacgcggccggggcggactacctgctgctgactttgctttgggggacacggcgcagcgaggcggccccgttgcggtggtatgaccgctgcaccgccggagagttgtcgcaggaaatggtgtcctgggtctggctggcgggtcctgaggacatcaacccgaccaccaagcgggcgggcagccaggtctaccttttcgagaccaagaacaaagagcagcggttcttgcccgtcacctactttgccgagcgcgtcctgcggcggcgcttcagcgagcgcgtggacgatacgggggccaagcagggattggaggccgccaaggccgcgctgagcgccgcgagcaaacggggtggacaacggggactgatcgacgccttggaggcggcggtggctgacgctgagcacgcgttggatcgaacccggttcgtctttccggcaaggtccgggcgcagcaaaacgggtcattactccgacagcaaatccatcatcgccaacgtgcgtcgcgacgctgggctgatcgatttgcgcgaggaggtggacatcggcctgaccccccacgacttgcgtcgcactttggggcgctatgccgaacggattcacggcaccaaggcccgggtcgtgtcgcagatgcttcaccaccggatcaaggacaaggattccgcggccaccgacgcgatctacaccgagcaggagtggtcggtcctgcgtcaagcgtttgccgtggtggaagagcacatgatggcgagcagtccccgggtctggaaccgctggaagggcacggacaagccgcggctggatgaggtcaacgacccgccagtgacgatttttgcagcacgcaaccagaaggtggcgctcgatgacgaggattga

SEQ ID NO: 501360 - DNA, 762 bp, Stenotrophomonas maltophilia
atgacgaggattgagcccgttcgcacagaagaggcgttccaagccaaagcggaagcctcttggaacgcagagttggcccgggcgaagagcgctggaggcgggttggtgtccgccaaggccgccgcgtggttcttgggcatccatgccgacacgctgggcgagtggaggcgacgcaccccgcccaccgggccccgctttcagaaggccaccggcagcgccgtcaatggccccaaccagcgtgtgaaatacgactacgacgaactggtggcttggaaggatgggcgtcagggcaggtcagcgaaagagcgtcggctgaccgctgagctggagcgcttgagccaacagcagcgagagctggagctggagcggcagatccacgaggccaaggtggcattggaaaagctgcgcaagaacgccgggcgctttgctgcgttgatcacgtgccatgaaggttgggccattccccacccatgggcggtggtgggagggctcattgccgggcacgtgctcaccgtggacgaggacaccctggatcgcgccctggccgagggcgaactctgggaggcccccctggccgaggcgctgctggagccttggaccagcgtcgcggcgcgcgagccattcgatgacgcaatggaggcggcacaatccgcgttccaggcggcgtggagggcggtccggaaccaagcccgtgcgcaaggcttggacgacggcctgccgcccgcggcggacccaatcactcgcacaccgttccggttctga

SEQ ID NO: 501361 - DNA, 930 bp, Stenotrophomonas maltophilia
atgtcccttgattccaagcaggaagcggaaacacagctgttaaaacgctacagaaaaacctggggccaaaagcacccggcgttcctggccggcgagggcgtctcctggaagcgtctgaagaacgacattgaccaagaggcgaaagcggccaaggcgaaaacgaaggtggagttgagcccgccgtggacatcggcgcaggccgctggacttctgggaatcaaccaaaaggttttccgggttctcgcaacgatggacagcgaaacaggtccgttgcttgcagacgatggcaagcatgcggccattggcctgccccgacttctggaatgggcagaaggggtgaggggcgcccccaaggttcgccgctggcgtgagtctcggcgcgatgaggacttgcttggggcaaccgtcaaaaggccagcggcgacgttccaagtggtcaaaaaaacccagatccgcctggggctggtggacggcaaggtgtcaacgctggacctttcccacctcagtgaagaggagagggttgcacttgcagcgctgctgcgtggcgcgcgtggggcgctccagcaggacgagcggggcgtggtgatgttcatgcacaaggaagccacgctgcccgaagcgttcacgctgccctgggcggacgaggcgctgaaaaaggattgcgcgggacgctacaaggagctgctggaaagcgcccagggcgagctggcccagctcctagcccgggtggagcaagacatccgaaaagcccgtgaggcggttgctcaagaggaaagcccaaccgcccaagccgtccaggcggcaatgctggacatgtggggggaggaggagcgcgacgtgcagatgcttcagtccgaggttcgcgaggcgttgttcgatttgaccctgccggctgccacaggtcaggctcgcaagccgtgcccgttctga

SEQ ID NO: 501362 - DNA, 213 bp, Stenotrophomonas maltophilia
atgcagccgctcatcctctcgctcgacccctcgctctcgacccacttctccaccctgaccccccaggccctggcccagctcgccgctgacaccagcacgtcggtcatcgtgcccaacctcgacatgcgcggcctccaccccggccaggtgcttaccctgcagctggcaacgctggacagcttcctggacgtggccgacgccgccaacggctaa

SEQ ID NO: 501363 - DNA, 690 bp, Stenotrophomonas maltophilia
atgaacgctgctgctcaccccttcgaccccagcgcgctgtccctgccgaagcagcgcaagaacacctcggcccctcgcgccaccaagctcgcgtccgccatggtcggttacgaccgcctgcccgcagcacaaagcacggacacctggctcaccccgccggagctcattgggggcagcccgaaggaaggctacactggcctggggcccttcgacctggatccggcaacgcccgagaacgggatgccgtggcccaccgcggctcggatgctcaagcccagcgatgacggcctggcgtcggaatggccggcggatgccttcgttttcatgaacccgccgttcggccgggggcaagaggcctggatggagaagatggccaaccacccgggcggtggcatcgccctggtgtttgcgaggacggaaaccaagtggtttcagcgcttcgtgctcaaccatcccaacatcagcgcggtggttttccaggagggccgcctgaagttccaccgggccaacggagacgtaggtgacgcgccccctgctggccctgcgtggattgcctacggcgaggagggtgcccgtcgcttgaagcgggcggtcagggaggggcagatccgcgggtgttacttggagctggatttcgcgcgtgtgagttgggtgttggatgctgacatgggggcggccaacgatgaatga

SEQ ID NO: 501364 - DNA, 726 bp, Stenotrophomonas maltophilia
atgaatgaggtcgccaacctggtgaaggccattcgcgccatcccttccaccgatggcaaaccgtggaatccgcgggttgcagtcgaaacgtttgttcagcacgcgctgatgtcactcgggatttaccacgtgaagctggtggctcacatcgaccccaaagtgcttgcatttacccccttgcaagaaagagccgtcgcagtggccgaggtgggggcggccatcaccgcttacttcgacgctgtcgctgcaagcaggccgtttgaagacattcttgggcaggtccatgccgagctgctggccaggaagggcggggaagggctggggcagtctttcactcccggcgatcttctcgatctggttcaagcccttgccaccaacctcacctggcggcaccccagtgccagcgtgggtaacgtctatgactgttgttgtggtgccggctcactggccctggccgcgatccggagtcgcctcaacctcatttcaagcaatgaaatccgggttcgcgcgggagacattgatcccttgtgcgcagcgatgacagctttgcagattcacatgaaccagacctttcattccctgccgcttagggaagtcaaagtgacggtgggaaacgagctggtccgaggaaaaaagcagacggaaggagaggggcaggcagaaggggacgagttggccgaccctaggcgatgcgggttctggtcccactccttcaactacgagtag

SEQ ID NO: 501365 - DNA, 162 bp, Stenotrophomonas maltophilia
atgagcacgcagcagaaccaaaccccacgcaaagaccctttcaatgcccgcatggaaagggcgttgattgagcggctgaaagccgaagccaagcggtcggggatttctcccagcgagaagctgcgccggatcctcgacaacgcgttgccgcacgtcgcctaa

SEQ ID NO: 501366 - DNA, 1875 bp, Stenotrophomonas maltophilia
atgtctacgaacaatctccctcaagatccgtcggtcgtcaacccccctgaggttgcttttctcatcgaaaagcactgggagaaaaaccggcgggattacgccagcaatctcaaggttgaacaacgggccttggatcgccacaagcaagccaagctcaacaaaggcgagctgcgcccggaaagcctggacttcttgttcgctcgccacctccagttggggctcgacggccacctctgggccagcgtccgcgacgaatccgcgacgcaatcgacgctggtctaccgttggagtgcaaatcactgggcgctggttcaccgcggcctcggcgacggcctggcgtccgactggctcgatgccaacatccccgcaaaggccagcgacaagctcgcttcgagttgctgggcctacgcccgcacccgcctaggccagcaaagcgcgttgccgcagttggaacccaagcgggcggtggtcccctgcgctgacgcttacctggaaatcaccgccgacagcatccaggcgttggaaccccggccgcgctatggcatgacccacgccctgaacatcgccacgggtgccacgcccggccagcgctacatccccagccccgtgccggccgatagcctgctgggcaagttcctggcccatgcgttgccggacgaaggcgtgcgcgccttggtgcaggagcagtgcgggatgaccttgctgcccggttcctaccagattgcagcgtggtggcacggcgccgccggcagcggcaagagcacgctggccgagtgcgtggaaggcgtccacaacaaagtggctcgcttggacctggccactctgggagacacgtttgcgctcgaaggcatcctcggcagccagctgatcctggtggatgaggtggagtgcgagaagtggaaggaaggcacattcaaaacgctggttagtggcaacggcatcggcatcaatcgcaagcacctctccgttctgaactaccactccaaggccaagtggatcatcagctccaactccgcgccgttctaccgtgacaagtccggtggcgtcgcccgacgcctttccatcgtggagtgggccaacgtcattccggaaaaagaccgcgtggaggacttcagtcgtaagttgctggaggaagaaggtcagctgttcctcgattggatgctcgaaggcgcacgccgagtcgtggcccgcggtcgcttcatggccgaccacgagctcccggaggccgcacgtgcttacaagcaggctgtcatccacaacgccgattccatcgccgcctgggcccacgccgaccgggtgctgttcggtgccgccgctggcagtgagcaatggcaaagcgtcaaggccatccatgcccgctatgtggcctggtgcgagaagaagggctttgaaccggaggaaatcctctcgcagcgccagttcacccgtggcctgaagaccgccgggcacctgcgggggcgcccgtcgaaccggcgcgtagagggcgagcagttggactgctacctctgctgctggaagggcgagcagaccgacgccgagcgcgcacaagagcaggagctcaagcggctggaggccctgaccccagaagcccgtcaagccgaatctgagcaggccaaggcggccaacgacgcccagaacgaagcactggccgtcgccgccgaacggcaagacgagcaggacttcgccgacatgcccgatgccatccgagacgtctttggcttcaccaatacgccctacgagcaggtccaggcggaacgccgcgccgaacgggagcgccaagccaagaacgccgccgcatgggagaggcaggatcgccgggagcgacaggcacgggagcagcgcaaggccgaggcagcaaagaagaaggccggctaa

SEQ ID NO: 501367 - DNA, 246 bp, Stenotrophomonas maltophilia
atgccatcgcccaaccacatccccgacgacgcgttccccgaatcggccatcagcccggccgatctggagagcccagagacaccggaagcggacccgcaatatttgctcgtgcagagcgggtttggtctccatgtccgtctgggaaaagacggcgaccagggattgcgcagcgaggacgaaatcgccgagctggtgcgacgagcgttgtatcaccgaaagacgctgacccttcatatcgagttctga

SEQ ID NO: 501368 - DNA, 1014 bp, Stenotrophomonas maltophilia
atgtccaagtattctgatctcattgaagccactgccgagcgaatgctttcgctcatgcagcagggcaccatcccctggcgccggccctggaacgaccccgacgccccgcagaacggctcgatcaacgggccgtggaatccaacctcgggcaagtcctatcgcggctccaacacgctgatcctgcgcggggcgcagatggcccatggctacaacgacaatcgctggctgacctaccggcaggcagaaagcattggggcccaagtcaagcgcggcgagaaggggcagcagatcacctactgggacttcagcaagacgggcaaagccaaagacggtgccgagccgttgatcgaaggcgaagagaagagcggataccaagggccatcggtgttcgtcgccacggtgttcaatgccagccaaatggacggcatgcccgagcccccgccgcccttcatcatgcccgagtcgatccgcaacttgcgtctgcgggagttgttggacaagcaccagccaaaacttcatcacgatggcgggaacagggccttctactccgttgctaccgacagcatccacgttccgaaagccggcagctttcaagacccgattagttatgcgtcaaccgtgctccacgaactggcccattggaccggggccaagcaccggctcggccgcgatctaaccgggcgattcgggacggaggggtatgccaaggaggaactggtggcagagctgtccagccttttcatttccgagcgcctcgggatcgggctggggaaagaacacgaagaacagcacgccggctacctgcagtcttggatgaaagccctggccgatgacccgaggaccctgttccgcgcagccagccaagcggagaaggtcatgaccttcctcgacatcccgacgtttgaacgcgagccgctgccgcaggtcaagaaggagcaggacacggagcaggggcgggaggcggaagccggccgaaggtctccatcgcgacgcaaggaacgccaggttgcttaa

SEQ ID NO: 501369 - DNA, 1755 bp, Stenotrophomonas maltophilia
atggctggcaacgtcttttcaaatctacttcgacccttcatccgtcaaaaggacacggaacttccaggcgtggctccttctgagccgcctgaacccccggtccgggagcgcttggacgattcaagccagcggccagtggcttcagcggagccggcaaccctttcgcccgttgagggccctcaaagtgtgcccttcaacgatgaggcaacggatcggttggggagcactctggcctttgctggtctgaagacgaagggtcgcttcgaggacgaggtgaggcaggccatcgaagacggcgccgatgtgaaagggtatcgcgactcgcgcggcgattccgccttgcataaatgtcaggaaccgtggcagatggagctgctcatctcggctggggcggatgttcacgcgttggacaaacaagggcgttcgccttttgatcgcctgttgagcacctaccaaagggaacccgcttggtccgaaaaacctactgcggaaggtttggcgttgttggcgaaggccggagcggatgtcaatgccctgagccaagggcaatccgctctgcatgtcgctgcgaagcgagggcttgacggcgacatccacatgcttgtcgatgccggcgccgacgtgaatctgcgggcggacgggggagacaccccgctccacctggccagcgatctaggcgttgtgctgcgcttgctggatgccaaggccgatccctccctgctgaactccagtggcgagccagcgctcaaacatgatccggtgctttatcgagaaaacgctcggaaccaccgagacgatttttcgccgcgtgagcgcgtcgatgcggcgaccgacccgattttcctggccgaaacgcccagcgagcttgtcgctgcgttggggcagggcggcagtgtgagggacaccgatgcgctgggccgaaccccgcttcattacgtcaaaacgggggagatggtgcaggcgttggtgttggccggcgcccaggttgacgcaaaagacatggagggaaacattcctgctcacaccgcggacgagcgcgccatgaaagagttggtcgatggggtggggcgaggcgttccccagcaccacgtagagaacgacaggggggaaaccccttatgcgacccgcgattactaccacgaggatcggtattgggatgccgaagcggaagagcaggccgcggaaaaggcggaggagacgaaggaggagcaagaccgcgtgctcaacattgtggccctcgttgaggccggcgacgccaaacgtctgctggagcaggtggatcccaacgaagaactggtcagtcggaaccgaacgttcaacatcgacggagacgagggctgggcctacaacaactatgccggctacagcgtcctccatgaagcggcgaagcaggggaaaacggaactctgccgagaactggtgttcgcaggggcggactgggacaaggggtgtaagctcgtcggcgagcaaggctttgacaaccatgtcaacggctttcgaaacgagcctcgtatgaagcccatcgattttgcgagcaaccgagagaccaaggcgttcttgaacaacgctgagaacgagctgcgagcccacaaccgatccaagctcttggacgagcttcttcccgctgccaacgcttggaagccaccggaaggcgggtttggggccgacgcccaacgccaggtcggtgcggccatgaaggcccatgggcaggatggccaaacccaggaagcccctcgcttgcgagcgcgcttctaa

SEQ ID NO: 501370 - DNA, 474 bp, Stenotrophomonas maltophilia
atgcgcgttttggttctttctctggcccttgtcggcctgctccccctgacggcctccgctgcggacaacggttccgcccatcgttacggcaccagtgaaaccttgagtgttcagaacgcccgcctgggcgaggtgctcatggttcgcagcgtggacatcaaatccgacaagcgtctcaacgccggttccgccattggggcggccgtgggttatggggccgctcgcgaggttaaaggcgactaccgcagcgccgccagggtggcgggtggggtgattgggggcgtcgccggcacggccatccaaaacggggtgagcaagcgccgaggtgtggaggtgtatgtccgggacctggacaccggaaaagtcattgccattgtgcaggctaatgacttgcctatccgcagtggctcccaggtctttttgacaggccgaggttcgaaaactcgcgtggtcccgattgaggggcagcgctga

SEQ ID NO: 501371 - DNA, 240 bp, Stenotrophomonas maltophilia
atggccatatctatttcggctggggcctttgtctgggacggcatggactctttggccgaggaactccgtgcgcttccctttgcgctccaaatcctggatggcatggactgctcccctgcgcaacctcgcgagctgcatcacctgccaatggcatggaatctcaagcccagccagtggggccaacctctcaccttccaggcacgcccgctgaagagcgaagcgggaggctgcccatggtga

SEQ ID NO: 501372 - DNA, 321 bp, Stenotrophomonas maltophilia
atggtgagcgcgatccttttgctgaccctgcttggcctcatggtcctgattccgctctggacgttcaagcgctttgccgacgccaaggcagcctggcaacgggtgagaggccgtgagcgagacgctcgcacgcacggccgcttcgtgattcatggcgggctgtttggggttgggatggtggtcatcgccgcgttcctggctcaagccaccttcagtgtttggcgccacgtcgccaccgcgggaggcctgtttgcactcggcacggtcgcggtgctctgtctgctggcctttttctggggcaaggggaggtcgcgcggatga

SEQ ID NO: 501373 - DNA, 315 bp, Stenotrophomonas maltophilia
atgagtgcgttgacgatgctggtcctttccatgctggtccttgctgtgtttctctgctcggcagcatttctctcttttatgatcgcgctgacttacccgacggtgaagcaatcgctgaccttcatccggagcggcgagcggagcgcgtcgctttacattggtttcgccatttatggggggatcttcacgggctgcgtcctcacgctcgcattcggggcggtaatcatggccctcaacatttccagcgctgaggacgccgctctatacgcggccaccttgcttagcgcggggctgggctactgggtgggccgatga

SEQ ID NO: 501374 - DNA, 312 bp, Stenotrophomonas maltophilia
atgcctgcggagatccaagccatctacgacgctgcccagtgcaacacgcctttcagcaaggacgtggacgacgccctggccgcgcaccgcaacgcacacggcgaagcggagcaaatcgagcacgcccaacgcgtagacccgtccgatgccatgcccatcgacccggaggtgcgtcgccaagcctatgcacgccagaggaggtatgcgattcgggccggcatgactgcaggcctgacgcccgaggccatcgcgcaagcgctgggcgtgtcgccctcggtgattcgtggcgactgggcggcgatggttcgatga

SEQ ID NO: 501375 - DNA, 480 bp, Stenotrophomonas maltophilia
atgagtccacgcaaaggctttctcggcggccgctccccgactgaaatccaatccttgctggacgaaggggtgactcagcgcgccttggcccaacgcctgggcgtcacccaccaagccgtgaaccgctttgtccggcggcatcgcctggccggttgcggacggcaggcctttcgggcccgccaagcccgagaggtcaccgagcgccgccagcaggtgcagcggctggtcaacgccgggctcacatcggccgaggtcgccaagcgcttgggcgtgtcgccggccaccatcggcctggaccgccaagccctttggttggggcgcgtcctgaaagggccggagcaccgcaccttgcgggggctggccctggaccaggttcgggctcgcttaaaggaggtcagccgggctcagttggcgcgggagctcggggtgagcagctcggccgtgtatcgctactgcaggaatgcgggcctcagcacgtag

SEQ ID NO: 501376 - DNA, 1656 bp, Stenotrophomonas maltophilia
atgcacccgttgaaggatacttggagcctgttcgaggggatgtattcgatgccactgctcaactggtccgaccgtgatgaggacctgacccgctccgccctgacgccctatcgactcttggagccggtggcaagcttgtcctatggggaggtggacgctcccaacatgctgatcgagggcgacaacctggatgcgttgaaggcgttgctgccttactacgccggccaggttggttgcgtctacatagacccgccgttcaataccggagcgatgttcccgaaatacgacgacaacttcgagcattcgatttggttgtcaatgatgtatgccaggctcgaactcatccacgagcttgtttcagagaagggatctctttttcttcatctggacgataacgaggttgactatgcgaaggtgatgctggatgagatttttggccggtccaacttcgtcaacaggataactatcgctgcccgctctccttctgcatttagcactgtcaatcctggtgtattcaaagcatcggaatacattctttggtatgccaagaacaaagagaagtttgaagacgtaagtgcccgcattccacgcggtgttgactatgcctacaacctttggctggagaaccgggatttgcctgagagtgaatggaggttttcgtctcttgccgataaatacgctgaggtgccacggaacgcaaggatcaaacaccctaagtctattctccagcacttcgacaagtgggttctgaagaactcaagccaagtctgccgcttagcatccattagcgactccggtgcgggtcaggcaatcgttgatctaaagaaagagtctctcagtcgacctggtgaggttctaaagctggagcggggcgaatcgctcgatacggtctacatcttggacggtcagcaaatccttttctacagcaagaacgttgttgagattgatggagagcctgtcgcctcctcaatgcttacgaatatctggagtgatatctcgtgggagggtattgctggcgagggcggcgtgacatttaagaaaggtaaaaagcccgagcggctcctgcgtcgttgcattgagttaacgactaaacctggggaccttgttctcgatagttttcttggaagcgggacgacagcagcagttgctttgaagctcaatcgcaggtttgttggtattgagcgaggtgaccaggcgcgaagccattgccaagcgaggcttgtatccgttgtggaaggagagcaatcaggtatttcgaaagaagtcggttggaaaggtggcggtggctttcgcttctacaagctcggcgtgcccgtgttcgatgacgagggtcacatccgcgacggcatcaagttcgagcacctggccgcccacgtctggttcgccgagactggtgccgcacgctccactcgagccccgaagcagtcgttcctgggtgagcaccatgggatcggctactacctgctgttcaacggcattttgggcgatgagagcaagaccggcggcaacgtgctgaccaagcgggtgttgaaaggcctgcagccctttgacgggcccaaggtgatctacggggagtcctgcgacttgccaaaggagcgtctggaagaactccagatcaccttcaaacagaccccctacgacatcaaggcacgctaa

SEQ ID NO: 501377 - DNA, 2646 bp, Stenotrophomonas maltophilia
atggctctctccctcaaggtgtatcagcagcgggccctgtccagcctggcccagttcctcgaagacgcccggctgactggcgccgcatccgcgtttgagaagaacgtggatgccggtctggtcacgcaatacaaacccatgcctcatctggaggcctcgccctacgtgtgcctgcgcattccgacgggcggcggcaaaaccgtcatgggcgcacacatcatccaggcggcaggtgacgcctacctcgagcgcgagtttccgctggtcatgtggatggtccccaccacccagatcaagacccagacgctggaagccttcaaaaacccccgacacccctaccggcaagaactggacgaggcgttcgggggcaaggtcgccgtgttcgatgtggaggacttcacccacatccgccccgctgatctgggaaccaaggtctgcgtggtcatttcgacgatggccgcgctgcgcgtggagaaccaggaggggcgcaaggtctatgagcaccacgaggacctagagccccatttcgccggcagcgtgtccgatttgccctacttggagcagaacaaggcgggaaaggccatcgcgtcctttgccaatctgctgaaacttcacggtccgttggtcatcaccgacgaagcccacaatgccaacacgcccttgtcctaccaggtctacgagcggcttggtgccaaggtcgtggtggagctcacggccacgccggaagccagtaagagcaacgtgctggtcagcgtcagtgcctttgagctcaagggcgcggacatgatcaagttcccagtcgtgctcaaggagcacgtggggcaatgggaagtcgccgtgggcagcgctgtggcccgccgcaacgagttgggcaagaccgcgctgggcgagccggactacatccggccgatcctgctcatccaagccgaaaacgccaaaggcaccgccacggtcgaggaggtcaagaagcacctcatcgacaacgagaaggtgcccgagaaggcgattgccatcgccacgggcgatcagcgggagatcgacggggtggacctgttcgccaaggactgccccatcgaggtcatcatcaccaagcaagcgctcaaggaagggtgggattgctcctttgcctacgtcttttgctcggtggcccaggtcaagagcgacaaggacatccagcagctgctgggccgcgtgctgcgcatgccgtatgccacccgccgcaagcaggaggccatgaacaaggcctacgcgcacgtcaccactgcggcgttcaatctggctgccgcagagctcaccaagtcgctcatcgacatcgggttcaacccgctggaggccgtgggcgcggtgctggcggatcccacacctgggcccggcttggacttgcgaggcggcaaggtcaatccggttcccgtgacgcccaagaccaccattgccgtgagcaaacaaccggatcttactggtatccctgctcgggaccagaccagcgttgttttcactccgaacgaggaaggcaagggcggctcggtggagatcacgggcgaggtggacgagtccaccgtggaagcgatcaccaaggctgtgccaaccaaggagcgcgaggaagcggcggctacaatccagcggcaccagatcgccgccaaggccgtcaaagcccctagccagaacggcgcggtgttcagcgtgccgcggctgggggtcatggagcagggcgagctggagttcgtggagagcggcgccacgccgccgggcttcacctgggacttgctggcctatccgccggacctgtccagcctcaagttcaacgtcgacagccagacctttgaggtggacctggtcgattcgaaagtgagctacaccaagatcgacgacgacgtgaatacctacctgccgggctttgccaaggaccgcactcaagcggacttggtcggctggctggaccagaagatccgcgatccggcggtcaagcagcccgtgctgcgggagtggttgcgccggtccatcagcgggctgtccgaagatcggggcttctcgctatcgcaactgctcaatggccagttcgtgctccgacggaagctcggcgagcagcttcagatcgccaaggcggaggcgctcaaggaaggcttccagcaagcgctgttcggtgccgacgccgacatcgtggtcagcgacgagcccggtgcgatgttcacctacccggcggacatgacccagtatccggcgcatgcctactaccaaggcggcacgtatcgcttccgcaagcactactaccccctcgtgggcgatcttcaatggaagaccgctgggggcaaggtgggtgaggagttcctctgtgcccaggccatcgaccagctggatgaggtggagttctgggttcgcaacttggtggacaagagccagttctggatgccgacgtccaagcagcgcacctacccggacttcgtggcgcggcttaaagatggtcgactgctcgtcgttgaatacaagggtggtgaccgttactccgcggactccgagaaggagaagcgcatgatcggcgagctatgggccgctaagagcaacggccgaggtgtctacctcatggcccagctgcgggacgagaagggcaacagcatcaccgagcaacttaaagcagcgatctctaaatga

SEQ ID NO: 501378 - DNA, 258 bp, Stenotrophomonas maltophilia
gtgaccgaagacgagatcgaacaacgaaagattgaagccagagtgcgcttggctaaaggaagcatggataaggctggaaaagagcttgaagaagctgaaagggtcgcgaaggagagtcctacacctttcaagcggaagctggtgaatcaggctaaggggcgctacagcaaggccgcgcaagtttttgacagagccgtgggcgacaagatgaagagagagcttgggggcggtaaggatggacccgggcgaaggatgtaa

SEQ ID NO: 501379 - DNA, 381 bp, Stenotrophomonas maltophilia
atggtccgcaccacaaactggcccagcgcgaagttgtccccccagcagaaggccatcgtcgccgcgcacgcggtgctgaacctggcagaaggcaaggccggcgaacgcgagctgcgcagcctgctggtcaacgagatcggcctggcctgggcaccgttaaactgcctccaatacctgtccggcaaagaagccccggccgcgctcactgcgttgccagacgaatggcaggcgctggagcgcaacaagaaagaccccctgcgtgcctcggtcatttccttggtcatggtcaaagacgtctgcggcgctgggggctgcaagctctccggcgccaagatagccgagcggctggaagagctgcgaaccgcaatggagcccaaatag

SEQ ID NO: 501380 - DNA, 459 bp, Stenotrophomonas maltophilia
atggatcacttcgaaggtgtggtgctggactatctgcgcgccgaccgagcgctgttcgtcaacagccagtgctgcatccaactcaacgaaggcgcgaacccggatactagcggcccgcactggtattgcgacgccgtcgcggtcagcttcaaggagcaggcggcctacctctgcgaaatcacctacgccgcacgcgcgccgtcgctgctggcccgtctgcgggcgtgggacgagcattggcctggggtcagggcagccctggctcgggacagcggtgtgccgctggattggagtgccaggccctggctctttgtcccagagtccaatgccaagggcattcaatccgccatcggcgggctgaagaacctccccagcccccgtgtcaccttcttggaggaagtgttgccctggcgctaccgctcctgggatcgcggtgcatacgtggacgagtccccatga

SEQ ID NO: 501381 - DNA, 459 bp, Stenotrophomonas maltophilia
atgaccgatctcaatatcacggccaccagctacgccctgctgcagggcaagttcacttgttggaagtgctcggagtcgatcgtggtgaccgccatttgggtgcctgggttcctcgacaacgaggacgaggagtatcccgaggaaggcggcccatcgctgctgaaatacgtcagcgagctggacgtgggcacgatggcccgggtcagggccgcggccccctggctcaagcccaactgctcgcagacggccaaccagacctacgtggccaaccactgtcaaatctgcggcacgctgcagggagaccatttcatattcagcccagacggcccgttcttcccccaagaccaggccggcgtggaccagctcaaggtcatcccagggcacgggcccctgatggcgagcgcttccacggcgcagtcggactggatgggactggtcaagcttcccacgcacgcctga

SEQ ID NO: 501382 - DNA, 978 bp, Stenotrophomonas maltophilia
atgttgattcggggggcagaacccgtcagttgctttgggctagccggctgcgatgagaacgcgggcacctatgccctgggatggtgcctggagcagtccgcagcgcttcgtgcggagctcttcggtgccatggggcttgatccgttggcacaggtggcgctttccagccaagagttcggcatgaaggatcgcgggttcactgatttggaggttctttcaggcacggcctttcatctggtgtttgaagccaagcgacactggcaggtggccacgcatgcgcaacttgcccggtatgtccatcgcttggccgactcgaatgtgcagcacaagcggctcatctcggtcagcgcggctcggaaggattgggccgttaggcaccttcccgcggacgtcaagggcatccccgtcgatcacctctcctggtctgaaatccgtgccatggcgaagcgggctcatgctgcgaccagaaaccaaatcgaacgcttgtggctggaccagctcgccttgcacctatcggaatacggaatgacctccaacgcgtttgactcgctcgcctatgtggtttcgctaagccgagacttgatgcccagctctcaagagctgacctggatcgatgtcgtcaccaagcagggcaagtatttccatcccatcggtggcaatggctggcccactgtcccgccggcctacatcggcttccgctacctatcgcagttccgaagtgtccacttcatcgagcgcgtagacacggttgatcggcttcaggacgtagacccgcattggccggaaacccattctccgcacttcgtctacacccttggccccgcgatgcgtccagcgacggtgttgccactggggaacatttactacaccgcccggcaccgggtcgcgttggatctgcttcttagcggcaaagcagccacgtatgaggaggcggttgcgctcaccaaggaccgccaagcccagcgaggcgaggcctga

SEQ ID NO: 501383 - DNA, 357 bp, Stenotrophomonas maltophilia
atgacgaccaagcgcctcaaatccatccgcacatccgccttccatgcccagtctggccgctgcttctattgcggtctgccgatgtggctcgaagctccatcagaactgggactgaagtcccgcaaggctcaagcctttcagtgcaccgccgaacacctgctggcccagcaagacgggggccgagacgtgtccgggaacgtggtggccgcacatgcccgatgcaaccagtgcaggcataagcggaaggggccagccccttcccccgatgctttccgcgcgctcgtgatgaggcgcgtcaacgcggggaagtggtggccccaaaaccagaagttctggcaacatcagtcgacccagtag

SEQ ID NO: 501384 - DNA, 498 bp, Stenotrophomonas maltophilia
atgcgcaagaccctttctttttctctggccttgatggccgcgttttctgccgcttcggcgtccgccgccgacgtcaccgaagacttgatgatttctgcgaccgtgaacaacgagtgcagcatgctcgtgacccagctgggcggcggtgaatacaacggcttggcgtccggcacgcagggctattccaatggtgcgttgatggttcgctgcaaccaaggcaccgccttcagcatcgtgcccggcgatgggttgaactacggcgccgcgattgctcgtcccaatcaccgcgccgtgtccgatggggccggaaacttcgtcgcctacggcctcttcaaagatcctggtgccagccaagtgtggggcagtggggccgatgcttgggagggcgtggggaccggtgagcagcagatgatcggcatcggttatgccttctacgatttgaacaaggtgcccggcgggaccttctccgacaccattgcggtcaccctgacttactga

SEQ ID NO: 501385 - DNA, 657 bp, Stenotrophomonas maltophilia
atgttgaagcgtttgttggccgtttcgttgtgctcattgttcgccgtgcctgcgtgggcgggaaatgtgtcgttgtttcccacgagcatcgtggcgccggctggggaaaaatcgggcgcgttgaccttggaaaaccacggggacagccccgagcgctttcaggtgacggtgctggactggtcccaagatcccagcgggcaggacgtgaccagcccagctacaaccgtgcttgcggcgccgtccattgtcgaaatcccacctgggtcccgccgggccgtgcggttggtccgcacccagagcgtcggcgcccccggctactaccgcgtgctgctgcgccagttgccccagccgtccacggcgggccaagtgcagttgttgatccaccagaacctgccggtggggtttgaagacgccaaggccggtcctccggtgctcacggcccgcttcaccgccgacggccttctgctgaccaacaccggttcgaccgctgcgcgcctgaccgccgtcggtcctcaaggcatgccggcatggcgcgaaggggcgttgggatgggtattgccggggcagagcaaatccgtggagctcaagcccggccagcgagccgcctcggtcaccgtcacggtcaacgggtcccccgtcgtcgtccccgtgaactga

SEQ ID NO: 501386 - DNA, 2202 bp, Stenotrophomonas maltophilia
gtgcggcggggaagcgtcctgggcctcgcgctggccctgtccatcggcagcgcgcacgcggccatcccagacggggtggagccggtgctggccgcgccaatccgggccaacgggctgcccgcgaaggaccccgtgttgctctggcagcaaagtggggcctgggtggccgaatccacgacctggcagcagctcggcgtgacccttcgcccgggcgaggagggccaggacctgaccgaccaagccttgggcgtgaccgtggcttacacccccgagaacgccaccgtccagctcaccattccggctgaccgcaagccggcgcagcagctcagccagcacggcactccggtttctcaggtgtcgcccggcatcggtggcttcttggtcaactacaacgtcgccacccagattgcacgcggccaacaggccacgtccttggcgctggacgcgcgcacgggcggccgttggggtgtggtctccaccaccgggcagctcaaccaatcccccaatgggtttggcatgcgccgcggcgtgacggcctggcagaaagacgacctgcagcgccaacggacctggcaagccggcgatgtctacgccacgccccgcatcggccccgtggcgctgggcggcattcgcctcgcgcaggacccggcagccctggatccgctcacgccgacgtggcccgtcccgaccttggggggcatcgcgttggatccggggcaggtcaaggtcctgtccaaccaagccgaaatcacgcgccaggacgtcaaggccggccccttcaccgtggacggtcgaaacgtggccctgggagccagccaaacggccgtggtcgtgcgcgacgcctacggccgggaaaccgccgtttccactgcacgcctctacgtcgccccaaccctgctgcgccccgggctctccgcgtgggaaatcgccgccggccaggtccgcgaagacgaaaaccgctacggcacggccggcgtcagcgcttcctgggccaagggcgtcaacgaccgctggaccatccgagccggtggccagctggacgagaacggcaagggcaacgtcaccgtgggttccacctgggccccaggcacctggggcgtgctcgacggcgaggtggggcgctcaagcgacggcgggacgcgctgggctgttgcctacgactacaaagggcccacgtttggcgtgcgattggaacacgaggaaaacgacgggttctggcgactgcagagcgagaccgcgctgcccatcgcgtcgcgcacccaagccagcgtttcctatcgcccagatcgccgcttaaccgtccgtggcacctatggcgccatcgacacggggcgctccagcctagccttcgcctccctgagcgtgagcgcgaacctgggcaccgcgggccaggtgtccgccaacgtgctccgagaccttcaaggcgacgatcttcaagtgtccgccagctacacctaccgcttcggcagcaaggccagcgtgggcgtgcgggcccgccaggccccaggccaggatgccctgaccacccgagcgacctaccgcaccgagggcggccttcgcttggctgcagagcacaccgagggcgaactgggcagcacccgggccacggccgacgcgatgacccgttacggcgacgcccggatcatgctggaccgctacgacgggcaaacccaggtggcggccaacttctctggctccgtgttcctggaccatcgcggtgtggccttcggaaggcctgcctacgccagcttcgcggtcgtggacgtgccgggtcaggcgggcttgccggtgcgggtcaacggagcgccggtcggccagacgaacaagcaaggccgcgtgctggtgaccgacgttccctccttgctgcccaccacggtgagcctcaaagacaaagacctgcccgtgggcgtggagatcggggagacggagaaacaagccgtggccccccggcaaggcggtgtgcgggtgaccttccccgtgctgacgcagaacgcccgggccttcatcctgacaggtccgatcatcgcgccgggcaccgtcgcgtccacgccgaacgaacaagccatggtcggctacgacggagccctttacctagaacaccctgagccgaggatggccgtcgaggtttccggcgtgtgcaaagccgtgttgccgtcgccactgccgggcgtggacgaagtggcgaagttaaggtgcaactag

SEQ ID NO: 501387 - DNA, 834 bp, Stenotrophomonas maltophilia
atggccctttacaacatcgcggaacgtttaagcacggctaaagaactaatcagcaggggcgatgacgcgtcattgatctacgccgcgctggaactacgattctgcctggaatccgtggcgtatcagaacttggctgcatatggtgaagacgtttccaccgagcttgctcgcgagtggcgaccggaccagatcatgaaaatgctggccgccttcgatccgaactctgatcaaacggccagcttctccatctcggtaacgccaccgcccaaagacctcgattttgcctcaagtgacttgaaggccgttttcaaggacaaggatttcttgccgatcggcgaggccaagcgcattccttggggcaagtttcgcagttactacaactcgttggggagctttctccatctgcgcaaagatctgacgaacgcacggccgaagatcgaaaggctccgggctctcatcgcggagctggaagaggttgcgagctcgacgctgatcgctgccagcaaggatctcgcgacgggcaaatgcgtcgactgcggccatgtgctcattctcggcccggccgagcaagcgggggacaagcccgttttctgcccgaataccaagtgcaactcgagctatttggccatcaagggggacccggagcggcgggtgcagaaggtcgaagccctggggctgcgctgcgaatgcgaggccatcgttcctatcttgccagagaggcttctcaagcctgcggtttgcccagcttgtgggtcgaccgtttgcgcagtcattgctgcaaaggcaagggtgctaggggtgccgcccactcgcgagggagacctgagcggctag

SEQ ID NO: 501388 - DNA, 453 bp, Stenotrophomonas maltophilia
atgcccatcagggccgtggtgtatgtcagcgaggcatccgacgcgttgcgcggcgatctgcttggcctccggagcggcaagctccaggagctggtcgacgacgcaactcgatttaaccgggacgcaggtgtcagtggggtgctcttgttcgacgggacgcgcttcgtccaatacttggagggccccccggacgggttggacgtggtgttctcaagggtgctcggtgcttcgagccatcacgacctgatcgagctgcaaagcgggacgatcatggatcgccgcttgccttattggcctatgcgctggttgcctgtggaagttaaagagctgagcgaggtcgcagtgggcgactgggccggtttcaaggtgcggggggatggagaagcgttgaacgcaacggcgatcgaccggctgctgttcctagtgagcagacgcgcactggtaggaagatga

SEQ ID NO: 501389 - DNA, 363 bp, Stenotrophomonas maltophilia
atgccgatcgacgtgttgtttgttgaagacgaagacgatctccgcagcgtcgtcgtagaggctctgacctctcagggcttccaagtcactcccgccagcaacggggatgaggccctcgtcctcctgcgcggcgacgccaggttcgcggtggtagtgaccgacttcaacatgccagacagcgccgacgggctggaggtcgcggcggaagccgcggttgctcaaccccaggcccgcgtcatgctcgcgtctggccttcaacgctcgcagctgcccccgctgcccgagacggttcgatttctcccgaagccttaccgcttccgacagcttgttacggcgatccacgaagacttgggctgcacgtag

SEQ ID NO: 501390 - DNA, 1143 bp, Stenotrophomonas maltophilia
atgaaccaacctgcgaaagcgaaaatcgatttgagggacgagagccggcagtttgccctgctggtgaactccgtcaccgactacgccctttacatgctcgaccccagcggggtgatccagacctggaacccgggtgggcaacgaatcaagggctaccaggctgccgacgtggtcggcaccaacttttcccgcttctacctgcccgaggaggcccaagccggcctaccagagcgaaacctgcggaccgcggccttagaagggcgctacgtcgccgagggctggcgattgcggcaggacgggacccgctttcgtgccagcgtcgtgatcgatcccatctgggaagacggggaactggtggggtttgccaaaatcacccgcgacatcacccagcgccacgaagcgcaggagcagctgctccaagcccagcgcgatctcctgcaggcgcagaagatggaggccatcgggaagttcacgctcggcttggcccatgatttcaacaacctgttgacgatcgtggccaactgtctggagctcatcagcctgcgggtgaaagacggaggcgtggccaagctcatcgataccgcgcagcgggccgccgagcgcggggcccttctgactcggcagttgctgaccttcggcaagggacaaaccttggtgccagaggcagtcgacttggccgccttgatggccgaatgcgaagcgatgctgcgccgctccgccggcgacgcgatcgcattgaccgtcgaagtttcccggggccttccgaccctgtcggtggacaaggcacagctggaggccgcaatccttaaccttgtgtgcaacagccgcgacgccatgccgaagggcggaacgatcctcatcacggcctctgcgcggcaaacccgtgatcctacgttgcccaacaccagtgaaagaccttacatctgcctgagcatccgagacgacggttcagggattgaggcggaccagcaggccagggtatttgaaccgtttttcaccaccaaacccattggaaggggcagcgggctgggcttgagccaagtgtttggcttcacggcccagtccggcgggttcaccgagctccagagcgagcttgggaagggaacccgcgttagcctttgcttccccgcaccagagcattga

SEQ ID NO: 501391 - DNA, 378 bp, Stenotrophomonas maltophilia
atgggattggacggcaaagcagtaagggttcttcttgtagaggacgaacccaccctcatgatggtcttggagcaggccattgcccaagtcggctacgacgtctccaagacggcggaagacttgcccacagccttggcgtgcgccaaggaagccgccttcgatgttgcggtgctggacgtcaacttaaacggggtcgagtcttaccccgtggccgatcgcttggtcgagttgggggtgccgttcctgtttacgaccggccttggggccagccggctgcccgaacgcttcaaaggcacgcccttccttgaaaagccgttccgcctgaaagagatcgccgccgccctccagtccctttgccacgaactggaggttcactga

SEQ ID NO: 501392 - DNA, 1947 bp, Stenotrophomonas maltophilia
atgcggatcaagcgatccccgagtgaaggcttggcgaacggcggagcatctcagaccggcggtgcgtgggcctggagatcgatggccctcgtggtgaacggcgcgcatgcaacgcattcgcaggccattgaccgctcccgccacatgctgaacgctcctcagcgccaggccatcctcatgacccgttccgcgcttttgctcgtcttcttggccccctccctcgccttcgctcagcagggggacggaaccgacgtccaagccaacgtccatacgttcaaacccgccaaggtagatgcgacgcccgagcgcgttcaggccctgacggtgcccagtggcttccaagtgcgtccccttgcgcaaggccttcagaatccgcggatcatcgccgtggcaccagacgggcggatttatgtctcacgtcgagatcaaggcgacgtgctgttgctggaggatgccaatgaagacggagccttggacgccgaaccgaaggtggtcttctcgcggccaggggcgcacggcctggtcatcgccaacgggcagctgtatgtcgccacggccaacgacgtgtatcgcgcccccatacacccggacgggacgttgggtccagaggaacggatcatcaacgacctgcccgatggcggtcagcaccccaaccgcacgctggcctttggccctgatgagatgctctacatcagcgtgggctcgtcctgtaacgcgtgcaacgagaccaatcccgagcatgcggcgctgctgaggtcctcgccggatggcaagagccggtccatctttgccagcggcctgcggaacaccatcggctttgcttgggactccaaaacgggggagctgtgggggatggatcacggcatcgactacttgggcaacgatgagcagcccgaggagctcaaccgcattcagaaaggaaagaggtatggttggccccacatctggggcaaggacggggtgaatccccagagcacaccgccagggcagatcagcaaacagcaatgggcggcgacaagcgagcccatggtgctcggctacacagcccacgcggcccccatgcagatgctgttctacaccggccagcagttcccgacggcttaccggggggacgccttcgtgacgatgcgcggttcctggaaccgcaagcctgcgtcgggctacgaggtggtgcgggttcgtttcgacgccggcgagccggtcgggtttgagcccttcttgaccggcttcctggtcgacaacggccaggcgcacatcgcacggcccgtcggtctggcgatgaccaaaggcggtgccctgctggtcggcgacgacgccaatggcgttatctatcgggtgacctacagccaaggccaagtggccccctcccgcgaggcggcggtgcctagcgggcccttgatggcccaagtcaatcaaggctcaggcgtgccgttggccaaggatcggatcggcaacgccgccgcgttcgagttccgctccccgtcgttctcctcgggccaagcgttgcctccccgcttcagcgcgtatcacgacgatgcatcgcccgctctttcgtggagcccggtgcctgatgccaagtcctatgcgctgatcatggaggatccggatgcagccaacgtcaaacccttcgttcactgggtcgcctacaacatcccagccaccgagcaatcgctgcccgagggcctgccggtcgatccgcggcttctgaaaccggagggaatgctgcagggggcgaacagccgaggatcggtgggctatttcggccccaaaccgcctgtgggcgatccaccgcaccattaccacttccagctgttggccttggacaccgtgcttgatctgaaggccggcgcgacgcgggacgaagtgctaaaggccgcgaagggccacattctgggcatgagcaagactgtgggaacctaccagcaggtcgaggccccgctgaaataa

SEQ ID NO: 501393 - DNA, 510 bp, Stenotrophomonas maltophilia
atggcagagctcaaagagaacctgttggactggctgcgcgacgcacacgcgatggaacagcaagccgaaaccatgctgaaggggcaggcttcgcggatcgagcactacccagtgctgaaggcgcgcattgaagagcacattcaggaaaccattggccagcgcgaacggctggaagggtgcatcaagcgcttgggcggctcgccgtcgaccctcaaggacgtgatgggcaagatggcagccttcggtcaggccgtcggcggcatgacggcctccgacgagatcgtcaaaggcgcgatggccggttacgtcttcgagcatttcgagatcgcctcctacacggccctgatcgccgcagcgaagacggtgggcgatgcagaaacggcccggatctgcgaagaaatcctcgtgcaggaagaggcgatggccgactggctggcggcccacctgcccgaggtgaccgaagagttcatggtgcgcgacgccacgccgggcgtcgaagccaaaaagtaa

SEQ ID NO: 501394 - DNA, 945 bp, Stenotrophomonas maltophilia
atgcccaggcccatctggagtggttcgttgtccttcgggctgctcaacgttccggtgtccctcatgtccggcgagcgtcgcatggatctgagctttcgcatgttggacgcacgaaacaaaaagcccattcgctacgagcgggtcaacgccgaaaccggcgaagaagtgccttggaaggacatcgtcaaagcctttgaatacgacaagggcagctacgtcgtcatagagaaagaagacatcgccgcggccgcccccgagacgcacgagtccatcgacgtggaggcctttgtcgacgccgagagcatcgggctgaggttcttcgaaaagccctacatcttggtgcccggcaagaaggccgaaaagggctatgtcctgctccgagagaccctgaaggaaaccggcaaggtgggcatcgccagggtggtcatccgcacgcgcgaatacatttgcgcggtgatgcccgaaggcgatgcgttgatcatgatcctgcttcgctacccgcaggagttggtggctccggacgaatacaaactgccgcaggggggggcgtcggactaccgggttgcgcccaaagagctcgaaatggccaagcagctgattgagagcatgacctctgagtgggagccggacagctaccaggacgagttccgcgagcgcctgtccgacatcatcaagaagcgggtgaagcaggccggagccacgaccaccttcgaggaaccggaacatcgcgaggactcggcgaccaacgtggtggacttcatggcgctgctccagaagagcttggaaaccaacaagcgcaccccggcgaaagcaacgccggtgaagaccgcctccaagtcctccaccaaagacagcaagcctgccaagaaggccgccataaagaaggccccagcaaagaaagccgcaaagaaagcccccgccaagaaggctctaaagagcgcctga

SEQ ID NO: 501395 - DNA, 177 bp, Stenotrophomonas maltophilia
atgagcgacgacaagaagaacaccggcagcccggaccgcgaccgcatcaacgtcaacgaagactacgagctgcagtattggaccaaggcgctgggcgtgtcggtcgatcaggtccgggccgctgtcaaagccgttggccccaccgctgcggccgttcgcaagcacttgggcaagtaa

SEQ ID NO: 501396 - DNA, 2547 bp, Stenotrophomonas maltophilia
atgtccttggtcgaataccgtcgcaagcgccgctttgaccagaccaacgagcccgagcctggcaaagcgctgccgcaagggcagcgcgccattttcgtggtccaacttcaccacgccagccgccggcactacgacttccggctgcaaatcggcgacgccctgaagagttgggccgtccccaagggccctagctacgaccccaaggtcaaacggatggcggtcgaagtggaagaccatcccgtcgactacgctagcttcgaaggcgagatccccaaggggcaatacggcggtgggcacgtggcccagtttgatcacggcgtttgggccacccaaggagacccagaggcacaacttgccaagggtcacctgcgattcgagctgttcggcaccaagctcaaaggcgggtggcacttggtccggtccggcaaaccggcccgtcagccgcagtggctgttgttcaaggacgacgatgcgtatgcgagcgatctggaagcggacgatctgctcgccgatgtgtcggcggccccaacggcagacatcaggagggccggcggcggtaaagccgacaagaagaagctcaaagccctccctgcaaagcgtgcgcgacggaagaactgggccaagaaggccttggccctgcccaaagcgaaagaggcggctccgccttccggccccttcgagccccagttggccaagctgggggaggccccgccgcagggcgaccaatgggtccatgagatcaagtgggacgggtatcggatcctcgcaacggtcgccgatggggccgtccggctctggtcccgcaacgcgttggagtggaccgacaagatccccgagatacgcgacgccgtggcggagttgggccttacctctgctgccttggatggcgaactcatcgccggatcgggcaccaaggaggacttcaacctgctccaggcgacattgtccggggagcggcaaggcgcgctggcctacgcgctcttcgacctgctccacatcgatggcgtggacgtggccgcagcacctctgttggagcgcaaggcgctcctgcaggagctgctggcgggccaggccggccacttggccttcagctctcacgtccaaggcgacggcaacgaagcctaccgcctggctggcgaacagcactttgaaggcatcatttccaagcgcgccgatcgcggctaccaccccggccgcagcgacgactggcgcaagaccaagcagctggccagcgacgagttcgccgtggtcggttacacggcccccaagggcagccgcagcggctttggctcgcttttactggccaagcccgacgccaaacacggttggctctacgtgggccgggtgggcaccgggttctccgacgccttgatcaacgacgtgagcaagaggatccaagggggaggcaagaagccgacggcctacgtgcccaccgaggacaccgatcttcgctctgccacgtggttcgagccgcgcttcgtggtggaggtgttctatcgcggcatcggggggcagcaactgctgcgccaagcctccttgaaagccgtgcgggccgacaaggaagtgaatgatttggcggattcggatcgcgccgccccggcgaaaccggcccgtggcaaacgggcatcggcggcgtcttctgcccgcaagaccgccgcaacgcctcaagtcgaacgcgtgccccccaaactgtcctccccgagcaaggtccttttccctggcgacggctatacgaagcaagacgtttgggattactactcggcagtgatggatcacctgctgcccgaggtgatcaaccggcccttgtcgatcattcgctgtcccgccggcactggcaagccttgcttcttccagaagcaccacaccgccgggctggagctggtggactcggtcaagctgaaggaggacagcggcatcaacgcccactacctcgtagtgcgcgacgcggccagcttgctggagctggtccagttcaatgccctggagttccatccgtggggaagccacgcggaggagcctgaccgtgccgaccgggtggtattcgatctagaccccggcccagatgtgcctttcgcggaggtaaaaaaggctgccactgatatccggaagcttctggcccaactagagctggagtccttcctgcgggtatccggaggcaagggccttcatgtcgtggtgcccttgaatcccgggtgcgactgggacctgaccaagcgcttcgccaaaggattcgccgacgcgttggcccagtcggaacctcagcggttcttggccaccgccaccaaagcccttcgaaacaagcggatctttgtcgactacctgcgtaacggtcgaggtgccaccgcagtggcgtcgtattccctgcggggtagaccgggcgcgcctgtcgcgatgcctctggcgtggagcgagctgccaaacctcaaacgggctgacgcgttcacgatcaaggacgtgccgggcaagctgaaacgtcgccgcaaggatccctgggagggcatcgatgcgttgaagcagaacttgtcgaaatgggcccgaaacgactag

SEQ ID NO: 501397 - DNA, 570 bp, Stenotrophomonas maltophilia
atgagcctcatgcagtgcgatgctcccgctccgaccccggtgaccgtctggaccatcgggcattccactcgaccttgggacgagttcttacgcctgctgttcgcacaaggcatctcggcgatcgcggacgtgcgtcgtttcccaggatcgcgtcgtcacccttggttcgcatccgagcagatggctaaaacgctgccagcgcacggcgtggagtatctttggattcctgaactgggcgggcggcgcaaggtgcagccggattcgcccaatggtgcgtgggacaacgccgcgtttcagggctacgcagaccacatggcgaccgccgagttcgccggcgggctatcgaaggtgcttgcgctggggggcgaacatcggaccgcgctgatgtgcgcggaggcaccgtggtggcgttgccaccgacgtctcatctccgacctgctgacgcaccggggccatgaggtgctgcacatcgtgtcccacgccgaacccaaaccgcatccgctgaacccgatggcgcaggccgtcgggccagcgcttgtctacccaccggctcagacggagctgttctga

SEQ ID NO: 501398 - DNA, 279 bp, Stenotrophomonas maltophilia
atgcatcctgatgttcttggctggactgcaaccgccgtgttgatagccacgttggtccggcaaatgatcaaacagtggcagtctccccatccggaaacggtctccaaatggctgtttgtcggtcagatgaccgcgtcgaccctgttcaccgcctacagtgcacttttggggtcaacggtgtttgtggtgaccaatgccctgctgctgctcacggccgtggtgggacaggtcctggcttggcgtcgacgtcggcgaaccggcgcgccgcctccctgctga

SEQ ID NO: 501399 - DNA, 255 bp, Stenotrophomonas maltophilia
atggagaagcgggtgtgctttgatttcgagattgatttcagcaacgggggcgggattcagggccaaggcttccggctggacatcgccggtgatgacatcaccgatgaggcgttggccgactacatcgtgcgcgacatgcgcctgctgatggtgggcgaggttcgcatcctcaacaaggaaatcattgaggagcctcataagcgcccggcgcacggccaagacggttcaactgtccacgacccaaaggacgggtga

SEQ ID NO: 501400 - DNA, 201 bp, Stenotrophomonas maltophilia
atgcatggcgcgtatggccgccactggatcatcgaatcgaccgcgagaaagagggaagatatccttctgcaggacatcggattgcgtgtctgggccgagacgatggccatgaaggccaatcgcgccacccagcaggctgcatccgataagacacggggctccgaagggttcttggtgacgcacgaggtggggagctgctga

SEQ ID NO: 501401 - DNA, 387 bp, Stenotrophomonas maltophilia
gtggcactgacgctcgaagaaatccgcaagaaaaaggctgaagcggaggccttggtggccgaaatggaaaaggccgaaggcgacgcgctggcggccgaagccggggccagctttgcaggagtctacgagaccttgcagcagtttgcgcagcattacacgacgaagcagaagaacgatctgaaggcgctgcttgagccacgcaaggcggtttctgcaagcgccggcatcagtcgcgccccgaagttccagatcccggacgggaccacgtgggctggcaccgggcggcagcccaaggcattccttgcgtgggccgaaactgctgaaggcaaggcgtggaagaagaataacccggaccaagaatggccggcgcacccgtataaggcctga

SEQ ID NO: 501402 - DNA, 369 bp, Stenotrophomonas maltophilia
atgaccaaacgctacattctccgccccccagaacgcttggtcgaaaccatccacgagacgtggattgacgcgcccagcaaagccgcgtttcaagccctggccgccgcgcaaggcctgagcatgcgcgctgcactggctcaactcatcgagcaacacgcccagattcgagaaccgttttcccctcgacgcccgacgccgtggaccggggaggggtcgaaggggcgagagcgctacagggccgcgctccccagtgtgcagctgggactccatgccgtgacggccctgcagattgacgctaaccgggctgggattcgtctgaccgaggccgtccgccagctggtctggctatgcatccaagccaacgcctga

SEQ ID NO: 501403 - DNA, 246 bp, Stenotrophomonas maltophilia
atgaatacccgcagccaaacccaagcgcccgcccggtcctccacccctggagccctcctgcgattcctgttcgacgccatgtcgggcatgggagcggccaagctgggatgggagatggtgaccgaccccaaggccaagctgtcggacattgccatcggcgtgtcgctctgcctggctcctgcagcgattgcggccacttgggcgctttgcctgttcggcatcgcccaacaccaccagcttttttga

SEQ ID NO: 501404 - DNA, 186 bp, Stenotrophomonas maltophilia
gtgcgaaaacttttcaacaaactgctcaacatcgccctttttggcatggttctgttcgccctggaccaagtcccggaacgcctggatcgcatgtcgcaaaccgcccagaacctggttcagcaggtgggctactcgggccccatgcagggcatcccctcgggcgtgccagacggttacgagttctga

SEQ ID NO: 501405 - DNA, 2607 bp, Stenotrophomonas maltophilia
atggcgaacaagaatggggccgctgcgcctacgactctggaagagtggttgaatggccgcccaagctggctgcgcatggccgctttcacggtgatccagcaccgccgcatgccgaacgaagaggagatggaggcgctggcggatcactgcctggccgaggcagccaagaagctggatgctccccacccggcgttggcaccgggaaccatcttggggacacccaccgccgctgagcttcgcatcgactcggtctcctccatctgcggcgtcaatgcccttggcgaggacgcggcattggacctcagccaaggccagatgaccgtggtctacggacccaacggggccgggaaatcgggctacgcccgtttgatgaagcacgtttgtggcgcgcgggccaagggatctatccacggcaacgtgttcaagcagaatcccgatgctgcctctgccttgatcaaagtcacggcgacccgatccgacggcacgacatcgtctgctgatctcacttggcaagcatccgacggtgcccattcgacgttgaaagcggtcccggtcttcgactcagccacagcgctggagttcggagacagcgccaccaccgccacccatcttccccgggcgatgcggttcgtcgggatgctcatccacatctcagacgatctcgccacccgattgaaggcccgcgccgccaagctcaccagcaaactgcccatcatcccggaagagcacgcgcagagcagcgctgcaacggtcctccggaagttgacggcgaaactgaccgaagaggatattaaccagcgttgcgccttccccgctgcactgaacgatgagcgtttggcgctggagaccgcactggcccaggcgaaccctgaagtggcccacgccaaggccgtcggagagctagaacgcttgtcgcagatggccacaagcatctcggcattgaaggagagcttgaacggcgagaaggcccaagccctcttggatgcccgcagcaatgcagaggtcaagcgccaggccgccaccgcctatgccacggccttcctcaatgggctgccgctcaaaggcgtcggagacgccgtgtggcgaaccctttgggacgctgcaaaggcgtattcgacaggtcttgcctaccgtgaccaccctttcccccacgttggggacgaatcccgttgtgtcctctgccagcaaccgttgggagacgacggcaaggcccgcttggccagctttgaaagctacctcaacgacaccctgcagacagaagctaagagcgcggaagacgcgctgacggcgctgaagaaagcgttgcccagtcctctcaccgatgtcgcctggcaggcccagtgcgctgctattggcttggaagccccccaagccactgagctgtttgaggccatccatgcgagattgaaagccatggccgaggccacggcggctccggcagtgcagtggtcggtgtggaccaacgcctacgatcagaaggtcaagaccactagcgctgatcgcgacgcgctggcgggcttgctggacccgacgggacggaaggagaaggaaagccgcctagcagagctgaaagcacaacagtggctgtcggagcagcgcgatgcggtatgggccgacgtgatccgcctcaaacgcgtgggaacggtggaagccgctgtccggtccacctcaaccagccagttgacgaccaaaagcaatgacattggcgagtcggagttggccaagggctattgcgaccgcttcaatgccgagttgcgggcgctggggggccattcgcttcctgtccgcatgtcgtatcgatcccaaggcaaaggggcgttcacgttttacgttgagctgaaggacgcgcaaggcgcccagaagaatcgtgaaatcctgagcgagggtgagcaacgcatcgtggcgttggcagccttcctggccgacgcgacgggccttgaacggggcatgcccgtgatcttcgacgaccccatctcctccctggatcagcgctttgaggaggcggtcgccaaacgcctcgtagatctggccgagcatcgccaggtgatcgtgttcacacatcgattgtcactgatggtcctactgcagagtgccgccaagcagcgggccaacctcgatcagcctacggtcaaggtcgcggttgaatcgatcgcccgcgatggaagcaggaccggcatgccggcgcagatcaatacgttctctctgaagccacaatccggcttgaaccaaatgatcagcagcatcggacagcttaagaagcttgatccgccactaaaagaacttgccctgaaggccgcctgcagcaacttccgaatcttggttgagcgctctgtagaggacgagctttgttctggcgtcatcaaccgctaccggcgcgagatcaacacgctcaacaagctacagcggctcagtgcaatcaccccagcagactgcgcactgatcgacgggatgatgacgaagtattcggcattcgagcactcccaacccaccgacacccccagttggcttccgggtccggacgaactgctaaaggacgttcaagacatgctcgaatggtgcaaggagttcggtaagcgagcggaaaccgcggcgaaacccaaggcgtag

SEQ ID NO: 501406 - DNA, 312 bp, Stenotrophomonas maltophilia
atgctgaaacgacttcgacgctggtggctgcagcgggatgcgccaagcccgatggcaccggagcagttgcaggcgctgatggacatcaaccttctggaaatccagttggccgcgttggacgccctcaagtcctcgacgccagccgcggaagcggccaggctgcgatcccatgcttggctcgcgtcgatgcgtgggcaaggcccggtcgggacgccgaactggagcgaactgcgggctgaagcgcgagcactgaaccgtgatctggcagccgccctggctgccgcccagatcgatgccccctcagaggcctga

SEQ ID NO: 501407 - DNA, 387 bp, Stenotrophomonas maltophilia
atgcctgcccctctcgccccagctcacacgtttggccgccgcttgcgcgaggcccggctggccaagggcctgacgcaagcacagttgggggccgtgcttgggttggacgaggaaaactccgccgctcccagggtttctcgttacgagagaggagatcgcgtgccggatcctgcaacgatggaaaagctggcccaagcacttggcatgccggtcgcctatttccatgccacaaatgatctagtggcagagacgttgctggtgatgtcgcggcttgaacccgaacagcagcgagagctgctgacgaaggtgagggattacgcccagagccgtggcgtggccatcctcccgagtagcgacaacgatctcagggaagagaagacatgctga

SEQ ID NO: 501408 - DNA, 819 bp, Stenotrophomonas maltophilia
atgaagcaagcgattgcagccgtggccgtgtgcctggcgttggccagcgggacggccaccgcccaggacggcattttgggaaggattggcaaggggttgatgcaggcgggcaaggacgccgcctcggccccggcgaccaagcgttacctggagccggcaggcacttactgggacgacggcgaccctccagtgctcgacggctacacccggatccggtggggcttggcggccaccgcgtcggccggtttcggcatgtgcgaagacaacctctttgcccaggccaaggccggcgctgccctggcaccggcgatgcgaacccactgcattggctcatgggggcaccagttcaaacgcgtcggcctgcagggcgatccggcgtctgcgtttgaggccaaagcgaggcagatcgcctcgaccgacgcgttctacctgcgcccctatatcgatgtggagctcgaccccaagaccaacatcctccacgcctacgtgttggtcatgaaccatgagtggtatccccgctcgcctgactttcttccgacggccgttatcggcccttcgccgttgggcaagggcagtgcggtggtcggggtcgagcacggcgggcgctaccacgccgcgttgcgattgaagccggaagacgcggccgagctgcgacgggtggggcgcgacgccacgggagaccgaatctttttcaaggtcgtggagggcaggttgaagcccaacggcctgcccgacatcgttctccaaatcgaccgcctcgagatcggctacaagaaccagatcatcggcatcaccccttccaaagacaaggacgcatga

SEQ ID NO: 501409 - DNA, 384 bp, Stenotrophomonas maltophilia
atgaagcacgcactgatcgtggccgcagcagcggcacttttgaccctgacggcctgctctggcgacaagggccccacgaaggaggacggggtgaaggtcgtggaaggcttcttcaccgaacagggaagacaggcaaccctccagcgcacctggaagtttgaggtcaccgatgcggatggcctggagctcgattgcgagaaaaagcccaatggggatcaagagtgcttggtggcagggtccgtgaaggcgttgggttacatcggtggccagcccaccaagcccgagccgagcaccctcaagccgaagctgcgggccctgttccgcccgcaaggcgagggctggcagattgtggaagtgaaggacgaagggacgtctgcgggctaa

SEQ ID NO: 501410 - DNA, 495 bp, Stenotrophomonas maltophilia
atgaaccgctatccgccgcagcaagttgtgtatgcgccgccgggcccatccgcgctgatcctccctagcgtcatcttgggcccgttgggcctggttgggctggcggccggcctggaggtgatgaagcgcgacttcttcatcggcgtggtctgttgtgtgcccggtgcgctcgtcttcgcgtttttggcattttgcctggcgcttcacatccgcgctcagcggctctgggactggcacgtccgcacggggcggatgccgtatttccggaaacatgggttcctgaaaggggcgctgctcggtggcgggttgggcgtggtgacggtggtggcggccgccgttctggggttcaagtatgcagagcatcccgtgtatggagaggtggccgcgatggcgttctacggcgcgtggctgtatggcgtgttcctgatcggcgtgctggccgtcgtgttggggtgggtcaagcgcgcgtgggatagaaccgcactccccagctaa

SEQ ID NO: 501411 - DNA, 1953 bp, Stenotrophomonas maltophilia
atggctaagaagggcaaagcagccaacgaagctctctttgaagaagactacgtgctgcggtcactcgggcggattggctatgacccagatgtagcgctaaccgagttggtggccaacacatgggatgcgggagcggctaaggttgccgtgatcatcccggaggaaacaggtggcttgctgtcggtggaagatgatggccatggaatgaccgaggatcagtttcgcaagcgctggatgaccttgggatacaaccggcatcgaagccaaggggcgaacgtccagtttccgtcggggcgtcgcgattgggtgcgcatggccttcgggcgcaacggcattggtcgccatggccttctgtgcttctctgatcattacacggtcgaaacttggacgaacggcgttctctcaaccttcgtgatcggcactcgaaatcagccgtccccgttctacatccagagccatgaaacaggcacccgttccggccatggcacccggttgttggtagaggttgaacgccaccgcccggatccagatcggatcagaacggtcttgtcgggacgtttcctacacgatccgcagttcatcgtttcggtgaacggccagtccgtccctctgtctgagcatgagggccttctagaagagcgcaagattcaggttgaaccaggctttggcgtcaccgcgtatgtggtggacacaacgcgcacggccaaatccacgcgttaccaaggcgtggcattctgggtgagcaatcggttggtggggctgccgagttggaccgttgggccaatggccgttctggatgggcgggtgcgctttgcgaagcgctatgccatcgtgatcgagtgtggggcagagtggctgtccgaagtcgaaccagactggtcgaagttcaagaataccgagcgcaccgatcgccttttcgaagcggccaacgggtatgcgcaggaaatggtcgaaaagttatcggcccacttgattgaagaaaactcagaggacgcactctacaagaatcgagaggatctgcgcacgctgcctaggcgttccatgcttgaagtggcacagttcacgaagacggtggtgcatgaccaaccaggcataccgcctgaaacgctcaacaaggtcgtcaaggcagtcataaagattcaaaaggcacgaagcggttcaagcttcctcgacaaactgatgcagctggatgagcacgacatcgacgggctcgacaggttgctggggcagtggacggtggaggatgcacttaccgttctggacgagatcgacagtcggttgtccatcattgcggccatggagaagctcagcggcgacccggaggctgacgagctgcacaccctccacccgctcgtgacgcaggcgcgttggctgtttggtcctgagttcgatagctcggagtatgcgtcgaacaataccctgcgcaccgtcgccaccagcttgttcaaagtcagaaagggtggacaggcgtttgccaatgcagcgaaacgccctgacattgtcgtcctatccgatgcgacactctctgttgttgggacggagactttcgatactgccagggatcagctggtgatgatgcgcgatgtcctactcattgagctaaagaaagggcgctctgaaatcggtcgcaaagagatgaatcaagcggctgagtatgtcgatgagcttgtctccagcggaggcatcgaaggggttcccttcttccatgccttcgtggtcggtcattcggtcgcatccaatatctcgaccgtcactaaccgggaatacaacggagcccagcgtggacgcatcacggcgaccacttacaaccagctcgcattgacggcgaatcggcgccttcatgggctcaaagcaagaataccctcccgttatgaggaggtctctggttacgagcttgtccagaaggtcatggggacgcccagccaagcatcgttcgtgcccccagctgagtag

SEQ ID NO: 501412 - DNA, 795 bp, Stenotrophomonas maltophilia
gtgcggtcgcgggacgtgttcacccattgcccgttcggcaccaccgccctgcccggccccacttacggcgactggtcggcgtgggcagatacggggggccgtcgcaacgaggtcaacacgtgcaagcccacggccccgcgctgcagcgatggcagcttgcaggtggcggcgtggtattcctccgattacgtggacctcccgctcccttcgggttcctccgcgattcaatactggtatcccgacgcagtggttcgtctgactccagcggagacagcacggctgcaatgggcattgaacaacgtgccggtaacccgcgtggagacccctgccccgatgcctggcaactggcccgccaacgtgagcgagtcggctttctatgaagagcaatgcaacgcgctttcggacgcggggaacatccgttatgcctactcctacgattttgagtgcgtctccaacatgggcatgcactactgcgactacaactggaccagcggcggcacctctttggccgtgtgccgccaggcctgcgcgtccgatctggtcggcaagagcaacaacccctatcgctgggagtggcctgagtcctcggtggtggcttcaacgccctacaccacctgcacgggccagcctggatgcacgcccaacggcggttttggcacccagcaaggcctgccggcgtgcaacgagcacaacgtgggccagaccatcgctttcaactggtatcgccagttctacaaccccgtgcgggtggattaccagtcgctgacgctgacgtgcaggggacctgtgagctag

SEQ ID NO: 501413 - DNA, 228 bp, Stenotrophomonas maltophilia
atgggtaaaccgacctatccacaaaaagagagtgacgacatgaagattcatcccgtcgagcctgccagcactgacctggcgcatttccaactccacaccgccgcgcggttcctggaccgcaccaatggcctcaatcagctggccgacaagcaccgcaggaaccagcgcttggccacccgcgcccgccatgagcggcgttggaagaaggaagaggagcgcttcgtatga

SEQ ID NO: 501414 - DNA, 246 bp, Stenotrophomonas maltophilia
atgagcattttgaacatggccctgctgtttgtcggtctcctgggcaccgcggtgttctaccgggacctggtcgccaaccccatctccgccgggcgcgccctggtgcgcttctatcaactgccggcggagcatcgccaaggaagggtgctgcaagaggtttcgaagacgtggtggagcatcgtgctggtgccgttctacgcgttggtggccttggtgctcatcggggttctgggaggtgggcaatga

SEQ ID NO: 501415 - DNA, 471 bp, Stenotrophomonas maltophilia
atgagtgccgggaccgaaagcctcatcagggccatccaaaccaacgacccgctggccttctatgggtggctccacacactcaaggggacgcccgacctggacgctggcgtggccggcgatcctggcatcactgcgttgggcgtcgcctccgtcatgtatgccaaggcgatccagtcggaccggatcctggcggcgcgctatgccgcgatgatcgaagcgctcatggacgccggggccaacccgctggtccggattggggagcggttcgtggtgcgacgggggcacaccgggaagctagaacgtcgtcagatctcagaagttcggagcgtcgcagaggtctgtggaggcgttctgtgcccggcaatgcaggcatggttcgcacgccataccgcggatttgatgaacacccaccttcaccgctaccacccagcgttcatcaagactcagcaaccggtcgctgaagaggtttga

SEQ ID NO: 501416 - DNA, 588 bp, Stenotrophomonas maltophilia
atgcgtctcgttgtctgttgcttcaaagggggtgtggggcgcaccacgctctcgctcaacctcgccgccgcgtttgccggccaatcccgcgtgctcgtcaacgaccgcgacccgcaatgcggttccgtggcgtggtcagcgatgagcgacggggaaacgccgttcaccgtgagccgtgcctcatccccaggcttcgacctggagattcaagacctgccgcccagcgccccagtgaaagaccagctgccggacgcggacctctacatcgtcccaacgctgctcgacgggggcagttacgtcgtctacctgcggaccatcgacacgctgcgacgtcagggcaagcccttcctgccggtcgccaaccgagtcaacctcaagcgggcggagcaccgccgccggctggaagatcccagcctggcaggcgccatcgtcattcccgagcgggcggcgttggcgagctactacgagcttggcgagaccgtgttctccatgcgcggcactggcgtggacaaggcgcgagaggacattctgcgggtaggtcaggctatccaaaaaagattggccaacccggcgcgggggcatgcatga

SEQ ID NO: 501417 - DNA, 555 bp, Stenotrophomonas maltophilia
atgctgcccctgccggacctcatggctgccaagaagacccccgccaagaacgccgttgccaaagcccgcaaagacctgtccaaggccgcgaaagtggtccacgccaagccggaacgcacgtatgcgccgctcattgatctgggccagttttccgaagggcaactggcagagctgatggtggctgcaggggacgcgcctgggcggagaacctatttcgactactccgaggagcggccctacctgcgggacggccagagggttcatctggacgtgggacgcgactccaccatgttcgactaccgcgacgagaacggggcgcgtgtggagcgaacgatggtcaccgtgccgcccaagctccgggagcagattcaggacgtcaccggggaagaacagccgattctcaccaccgcgctcattgcgctggcttcctgggcttgccaggagctcaaaaagagcaagcgtcgcctcgtcgtgaccacggcaaccgatgacctggatccaatgcggagacaggttcggaaagccatcgtggggcgggcgaggaaacaacggtag

SEQ ID NO: 501418 - DNA, 219 bp, Stenotrophomonas maltophilia
atgcaaaacaacactttcaccatcgaagccgactactccaccaacagctggggcagcaactgggagtccatcgacaacgcggaatactcgacactcgccgaagccgaagccggcatggaagatctggagcagaaactgggctggcgcaacatgcgcatcgtggatgaaacgcgttttgtttgggcctacggacaggagggcgaggatgaagatgcctaa

SEQ ID NO: 501419 - DNA, 216 bp, Stenotrophomonas maltophilia
atgaagatgcctaagctctatgccatccaatccaagcaaccggcctcacgccggttgcttgggccgcacaaagaactgatctacgtcgatgaatgcaacgttctgattgaaagcgatgcgcatgtctttgacttccgcgagcttctcaggctctacaaagaagatttggaaaggcggaagagcaacctatttccggacacaccctatggcgggtaa

SEQ ID NO: 501420 - DNA, 360 bp, Stenotrophomonas maltophilia
atggcgggtaacctctacgccatccaacccaagcaaccggcctcgcgacggttgcctacggttcgcattgccccggacaaggtcgctcagttccgggctctagctcgccagaaggggcttactcccaccgccgcccttgctgccctggtggccgcccatgccgacatccgccagccgttcgggccccgagtccgtgcccagcatgggcctgatgggatgcgctacggagcggtgctgcccgatcccaaggtgtctgaagaggtggccttcggattggtggaagacgcccgagctgccggtatctcgttgggcgaggctatgcggcaactggtggaccggtgcctggagcagagccggtga

SEQ ID NO: 501421 - DNA, 582 bp, Stenotrophomonas maltophilia
atgctcatgcgtcatttctaccactgctcccgcaatgccaacctggccgaccagcccttggagccctttgatgggcaaacctctgaaatccgtggcctctgcttttcggatggcgaagagcagcatttcgggccccacagttaccagatcagcctcccagacgactgcgattttctcaccgccaacttggtgtggaacatgaagctggccgtggaagaaggaacccgggcggtgggcaggaatggcgaacagctccagttgaccctcaccatggccgagcaagcctgcaaggaagccatggcagagatgggctatgacctggacgatgaaaccgttgagtttgttttttgccgcgccattgagttcgacgattgcgatgagagcatcggcggtgacgatagcgactgttgcgacccctgggatgagcagatcgacggctggggcctgcaaagcgttcgggccctggtggcgcacaagctgggcttggtgggggccgccatcgatgatgaaaacggccagtgctacatcagcgccaacccggacctggtgctgaaaaaggtggaagaggacgaggtgtcttga

SEQ ID NO: 501422 - DNA, 342 bp, Stenotrophomonas maltophilia
atgactccacttaccaccccagacggccgttacctcatcgtccgagggcgcctctggcgaaccaccaacccgggcctaagcgagccgcagagggagcgactggtccacgagctgatggacgcccggcgtgccgtgaagtcagcaaaagccaaccaggatggggaagcactcgccgccgcacggcgcgccgtggacagcgcgaaaacgggcttgggcgaacgtggcccggtgtggtggacggacggggagccggattggaaccggcacttggtgaagaactccccctatgcggggtggttctaccaacaagccaatggtgaggcggagaccggcgagatgtag

SEQ ID NO: 501423 - DNA, 789 bp, Stenotrophomonas maltophilia
atggcaaggaacaagcctatcgatttccccgtgctcctggtcgagtgcgacacaactggcgtaacgcgagacgacccgatcattcacatcatgtgcgtgctggtcgataaggggcaggacggcaacgcgcatcctgctgccacttataccggctaccaggaggtggccacgccatcttcggaagaggccttcagggcacacggtatctcaaacgagcggctgaaaggggagagcctcgacttggagcagatccgcggtctgatcgcccaagccggctccattgtttcgaggagcccacggttcaacgctaaaaaacttcacgcgctagtgcccgagtgcttggagaagcgttggttcccctattcccacaggattcagaactggcgctgggagcatttcccggccgtggctcgcatggcgatcatgtgtggtgaggtggagaacgacggctatggaaccatccatcacctgtccgagctcctcaaaatcgaggcaagctcatacgaggtggtgtttgacgaggacgggccgcctacgctgaccgtcaagttcgggaggcgcaaggtgctggaatgcttccccgaggccttgctgaagtgtgtagaaggggatcggttccgcttccatgggaaggagggctacgacttcatcaccgcctactgcgactcgggcgatgccttccgtgaccgcgccttccgcttgcaaacaacgccttcaaacctggcgctggctggcacacgggcctacttgcagaagatcaagggcaacgaatacgtcattggtgcatag

SEQ ID NO: 501424 - DNA, 1050 bp, Stenotrophomonas maltophilia
gtgcttgagctgccccccttcttggattccattgcccgagccgatgccccgctggaaggcaaggccaacgggtggcaacgcaaagcagggctggtcgagttcggcaacgcctgtgccttctgctccgctccgctggacctgtcctcaccccagtcctggacggctacaccgctggttcccgctcaactgggagggccgacttccgttgtcgaaaactgggtgccgtcctgccgtccctgcgctgctgccaagggcctgcgcgatgtggtgagctggtccgaatggcgagcgaaggcagaccctgaccgggtggccctgctgctggagcgtcggcgctctgcgttgctctacgctgaaaaccacttcacgcccctatcgcgtcactccaagcgtgagcggctgctctcccacctgttggcgcgtttcgccaggccccgcttccaggtctatgcgtggtcgggtgaggtggatggggagagggtgtgcatggtgggctggaactcccggtcaggcgatgccttggcactgagcgagaccctgctggcgttacgaatgagggacgggggcgaggtgctagcagagggccaggtcacccttctacggcttccggtggacgcgttcctgcgggccgtgtgggcgctcatcgaggcccatgggatcgtcgtgccgttggatgtgccaggcgatggcccgctggacgcagacgactggagagagtgctggcgccaccgcgtcatggacccggccagcaaccacaagcgcgtcccgatgaccgaaggccaggcgctgcctcatgctccccgcgtgctgtccaccaacccggattccgttcgccggctgtcccagctgcaggctgcgaaacgggcggacaggctggaagaagcggagttgcggtatcgagaagcgctggcccggaaggccaaatacctggagagggtgaagcgcggccaggaggccccgatgccgctggacgattaccgggcgtgggccgatgaggttagatccctacagcttgcctgggcgcgtttggtgaacgagagactgggctga

SEQ ID NO: 501425 - DNA, 2466 bp, Stenotrophomonas maltophilia
atgcgtccagtgccgtccgctcccgccgtcccatcatcctcgcgcccgctggtgcgcctggcctgcctgcttgcgctgtcggcggcgccgatgctgctgcaggccgcgccggcagcgctggagcgcgaggtcaacaccttcatcggcagcaaggacgatggcaacacgttcccgggtgcgtcggcaccgttcggcctgatccaggtcagcccgatcggcagccactactcgggctggcgctatgacgatgagaagatccgcgggttcggccactccttcctgtccggcgcgggttgctgggaacagggcggccaggtgtcggtgctgccggtgaccggctcgatcggtccgggcggtgatttcgataccggcaacgccaagcagttcgaccacaaggcctatgcctcggcttacacccatgacggcgaggtcggccaggccggctactacaaggtgcgcctgaccagctacggcggcatcgatgccgaggcgaccgcgcgtacccgtgccgcggccgagcgctataccttcagccagcgcagtggcgatggccacgtgctggtcaacgtcggccaggccaacgagcgccattcggtgatcggcagcgtggtcgatgtggtcggcgaccgcgtggtcgagggcaagcttgtcaccaagagtttctgcggcggccatcagtacaccacctggttccgcatcgagttcgaccgtccgttcaaggcgcatggcacctggggcgagggcggtggcctgccgggcgcgcgccacagcatggaaggcgagcagaagccgaacggtgcctggctcagcttcgacctagccaagggccagtcggtgacagcggtcagcgcgatctcgcacgtggatgccgaaggcgcgcgcaccaacctgcgcgcggaaggcatgcagggtggggcgctgctcggcttcgaccgcatgcgcgcgctgtcccagcaggcctggcgtgagcagttgggccgggtgcgcgtgcagggcggcaccgccgatgaccgcaccgtgttctacagcgcggtctaccacgcgctgctgcagccgatgaccggcaacgacgccgatggccgctaccgcggctatgacgatggcatccaccgtgccgatggctggacctactacgagtacttctcgctgtgggatacctaccgtgcgcagaaccagtggctggcactgacccgcccggacgtggcgcgcgacatcggccgcaccctgctggcgatcgatgagcagggcggttggctgccgcgttggggctatgccaacttcgagaccaacatcatgaccggcgatccggtcaccccgttcatggtcgacctgtggcgcttcggtgcgctcaaggggcgtgaatcgcaggcctgggatgcgctgcgccgcaatgccttcggtacgccgccgctgaactcgcgcatggccggccgctccggcaacccgacctacctggacaagggctacgtggcctatgaccgtgcattcccgtccaagggcatggacgtcgatccgcaccacggtggttcggccacgctggagtacgcgctggccgactgcgcgctctcgcagatggccgatggcctgggccacgcccaggatgcggcgacgctgcgtgagcgcggccgcaactggcgcaaggtgtgggacccgcaggtgcgcgatgccgagaccggcttcaccgggttcccgcgcccgcgcaccgaggatggccagtggtacaccccgtccgacggccattacagcccgcgttcgcaccacggtttccacgagggcacggcgtggcagtaccagtggctggcgcagcaggacgtgccgggcctggtcgaagcgatggatggccgcgaacaagcgggccgccgcctcgatgcgttcttcgcgatggacgcgctgcaggccgacccgctcaacgccgcgcgcaaggcgtgggtggtcgggccgtacagctactacaaccagttccgctacaacccgaacaacgagccggacctgcattcgccgtggctgtacacgctgatcggccagccgtggaagaccgcggccgtggtgcgtgcggcgcagcagctgttcaccaatgcccccaacggcgtgaccggcaacgatgatcttggcacgatgtcggcctggtacctgttcagcgccatcggcgtgtacccggcggtgccgggcagcggccagttcctgctgcacaccccgcgtttcagcaaggtggaagtggacatgggcaacggccgcaccctgcgcatcgacgcgccgggcgccgatggccgccgcctgcagtacgtgcagggcgtgcaggtcgatggccaggcgcatgcaccggtgtggctggactggagccgcctgcagcagggcccgcgcgtgcgctttgcgctggatgcgaaggtgccggagcagggctggggcacggcggtgaaggacctgccggtatcctggtgcgcggcaccgggcagccagctgcgctga

SEQ ID NO: 501426 - DNA, 429 bp, Stenotrophomonas maltophilia
atggacgctgtgctggacggcgtgacgctagccgctgctgctactggcgcgttcgtcgacacgcgcgtacatcgaatcgggaagaagcgcttccgtgcgctgtatcaggtgttcgattcaaacgcctccaacccgatggggcactgtggggcggggcgcgagatccgtttgttcgtctacgatttgacctcgccgaagcccattgaacgcggcaggatcctggtcagcagctgcctcgaatccgtgtccctcgccagccagaacacagggcgaccctacagtgaatccgacttttcctcggtcatctggcggggcgacgggttcaccatcgagtggtggggtaatgggcccggaggcgttacgtcgagccactacgccctccgaaatggccgcttcgtcccaactcgctcgagtgaggggaatcgctga

SEQ ID NO: 501427 - DNA, 414 bp, Stenotrophomonas maltophilia
gtgagccgcacgacctgggctgccggtggcgcagggatgctgttcggcgcgggattggcgctggccgggatgaccgatccacgccgcattctcggcttcctcgatgtggccgggcagttcgatccgactctggcctgggtattggcgtcggcggtgctggtcagtgcagtcgggcagcgcgcggtgctgcgccgtgcgcaaccgctgtgcgcggagtgcttccagctgcccactgcccgtggcattgatgggcggctgctgctgggcgcggcgctgttcgggatcggctggggctgggcgggctactgcccggggccggccatcgcgggcctggcggtcggcgcccacgaagccctgtggttcgtgccggcgatgctggcaggtttctggctgcacgatcgcctccttcgatga

SEQ ID NO: 501428 - DNA, 438 bp, Stenotrophomonas maltophilia
atgaacctgccatgggccgctgtggcgggtggggcgatgatcggggccgccgcggtgctgttgctggccaccaccgggcgcgtggcgggcgtcagcggcattgccgccggcagcctgcgtgcggaaccggaggaacgcgcctggcgctgggcgttcctgctcggcctggcggccgccgccgcagccgtgctgtggtggcaggcaccgcccggggaggcgccgcgggcgctgctgcgcgacgcgctgcccgcctggcaactggtcggcgccggtgtgctggtgggcgttggcacgcggctgggcaatggctgcaccagtgggcacggcgtatgcggcatggcgcggggctcgaagcgctcggtgctggcggtgctggtgttcatggcctgcgccatgctgaccacgttcctcattcgccacggcggaggcctccggtga

SEQ ID NO: 501429 - DNA, 429 bp, Stenotrophomonas maltophilia
atgccattgcgcgcgatcgcctacgtcagccaggcgcgggcggatctttccgctgaacggctgcaggcggtggttgacgatgcggcccgcttcaacaagatggccggcgtgaccggggtgctgctgcacgatggcgggcacttcctgcagtacatcgaagggccgccggatggcattgcgtcggtgtacgagcgcatcctccaggccggtagccatgtcgacatcattgaactggcgcgtggccgcctgggccagcgccagtttccgtactggtcgatgcgcgcgttgccggtggacgaggcgctgttgcggcggctttcatccggcgactggtcgggcttcagccgtaccctgcacggcgatcgcgccgtgccgacgccgctggacctgctggacaacgtcgtgcagccggtgctgcacgcgggctga

SEQ ID NO: 501430 - DNA, 357 bp, Stenotrophomonas maltophilia
atgcccctttgggactccgaatccaaagacggcgagtcactcgacagctttgttacccgtacaggtcgtgacgcactgcgcgtactggaatcatccccggctacgatctgcggtcagctggaagagacaccaggcaagtacaagatcttactgaaagccacgagcaaggcggcagactgtagcgcccaaggctcgcgccttccctacatgcatatcagacgcacagaagccggtgtaaagagcgttggtccgtccccgagcgagcttcgcggaccggtgtatgtagtcgacctgtctggcatcaatttcgaagacggcaggaagactcgaccggtcgtagatttcggcaagaagtag

SEQ ID NO: 501431 - DNA, 621 bp, Stenotrophomonas maltophilia
atggacgaacgttcgttcactatgtttggcatgagccgaatcgaccgcaatgagcagcgcgtgaccctgatcctgcaggcggccctgcagtgtttcctggccaagggcttccaccagaccagcatgcgcgacatcgcgcaggcggccggtgtcagcctgggcaatctctacaaccatttcccgggcaaggaggcgatcatccttgcggtggccgcggccgaaagcgaggaactggccccgatgctgcagcggctggcggcggccgacggcgagcgcgcgcaggtgctggcgttcctgcaggacttccatgcgttgtgccggcaaccggagtgggcaacgctcgcggccgaggtgctggccgagagtgcacgcaaccccgccgcagccgcggccttcgccgccaaccgcaggcagcttcaacaggtgctgggcgatgcattgcagggcattgcgcggcgcgagcggcggcgccctgcgctggccccggcactgcaggcgcaggtgttgctggatgccatcgaaagcgatgcgctgcgccagggcctgggtgaagccggcaacgcggagaacgccgcgctggatctcgagctgctaacacggttgctgggatcacgtgcatga

SEQ ID NO: 501432 - DNA, 1032 bp, Stenotrophomonas maltophilia
atgcccagcccctccgccgatcccagcgcaccgctcgtcgccatcgtcgcctgccacggccaggggctgttcgagttcggctgcgcggttggcctgttcgcgccggtgcggccggaactcggcgtggcctggtaccgcacccagctgtgcgcgggcgagcccggcgcgctgcgcatgctcggtaatgcgcaggtgcagctgccctacgatctcagcacggtcgatgacgccgacatcatcgtcatccccggctggcgcgagcccagcgaacgtccgccacaggcgctgctcgatgcactgatccgtgcgcatgcccgtggcgcgcgcatcacctcgatctgctccggcgccttcgtgctggcctgggccgggctgctcgatggccgccaggccaccacgcactggcgcctcaccgaagcactcgcacgcgacttgccgcgcatcgatgtgcgcgaggatgtgctgtacgtggataccggcagcatcatcacttcggccggctcggccaccggcatggacatgatgctgcacatggtgcgcaaggattacggcgcgcgcgtggccaacctggtggccgaacggctggtgctggcaccgtggcgcgacgccgggcgcagccagcgcgtcagccgcgccattccccacggcgagcccacccgcttggcaaagctgatggaatggatgcgccgcaacctgcgcgagccgcactcgctcggcagcctcgccgagcaggccgcgctcagccagcgcacgctgcagcggcagttcctggaggccaccggcctgtcacccatcgactggctgatccgcgagcgcgtggccttcgcgcgcgagctgctggaaaccaccgaccggccgctgcagtggatagcagaacaggccggcttcggctcgcaggagtccttccgccggcacttccgcggccaggtcgacgccagtcctgccgagtaccgcaaccagcaccgcagcggtctccttgcgccacccgcagccggcgttgttcccgcatcactccgaacgaaagcgcgatag

SEQ ID NO: 501433 - DNA, 270 bp, Stenotrophomonas maltophilia
atggacgatcagatgatctgcccgatgtgcatgggatacgtaccacgcggtgcggtcgtgtgccgggggtgcaaggccaggattgagtatggcagtcctgactgggcttccttgttggtcttgatctgttccatttccttcggaatctggtcgggcaccgtcttggtatggtggattggcctagtcggcggtgtggccctgttcggacttggctctgctgggctcacgcgcctgtttcgcaaccgggtcgtcttccgcctcaagtactga

SEQ ID NO: 501434 - DNA, 618 bp, Stenotrophomonas maltophilia
atgcttgaggcgaccaacgcggtcttctctctcatcccgccaagcaataccagagtgacgcgagatgctttgaagaatgccaccataaatctccaagccttcctcatccataccgtgggcatcatggacaacatggcctgggcctacgtctactggcacgggatagaacaggagatctatcggaatgatgttgacctattcaagaccaagatgcaggagaggctcccgatcaggctgaccgaccatctaaacagcccaaatctgacttcgtggcgagacacctatctaaagccatacagagattctttagcgcatcggattccgccgtatatcccggaaacccacacacccgaagaagcacgcaagttacaagatctagagcgccgcattcaaaacgcttcagaagcggctgattgggacggtgcacttatgcttcaggaagaaataggtgccatccaggggcatggctacctaatggtatcctcattcgcgcccagcaccgggccggtattgctccacccccagatgctttccgacttcgagaccatcttcgatgtgctgggcgagtttgttctggctatagccactccgcctcgaccacgcagacttcaatcgtaa

SEQ ID NO: 501435 - DNA, 1182 bp, Stenotrophomonas maltophilia
atgtcgcagcatccagatccagcaagagggggcacgcaaggtgacgaggaggatttcatccgcatgcggctggccggagggcgtttcgaccatcatcttgtgccatttgatgttctttcagatttggccgcataccgagaaatcgtcatcgatctagcccggcatctgttccggcgcgcacaccctaatcgccagaaggtgccaagaggcttcgcggaatctttccaactggggatcgcctccctgagtccaggaaacagcgtgactcttgcgagtcgcagattcaccgagcggaatctcggttatctggaggatcaagcggatcttccatttccagaatttggcgagttcttcgcggctagaaacatgatctttgatgtgatcttgaggacgaatggcggtctcgagttgcctgaggattttccagtcgcgctggcatctaaattcaataaatttgggcggaatttcagggcggatgagtttatagagctgtccgagggagggcgcacgcctgtccgctacactggagagactaggaagaacatcgtcctgaaagctgggaattcttacgaggggcatgtcgagggagagttcacccttgatggtgggcgtcagacagagcaactcattcatctcgtctctaaggacgttaatctcgttgacttgcctgtgcaaacccctggtgagtgggcagcactgttctccaaagtcggccagtcggtccgcatcacaggggttgggctttatgatcgtcaagatcgtctgacaagaataacggaatatgaagaaattctatctggccccccggagccggtgacagctaccagcactcgcttggagaagattgcgcagatcccggccggttggtacaacgggggaaatccggctccagcggctactgccgtacgctccatgaaacttttgctggaggaaatggaaatttccggtgtccctcggccgtacctctatccgctccctgagggcggtgtggttgctgagtggtctttcagtggctgggaaatatcgatcacagttgagccggacgcgagcgctgcagagtttctagcggtgagcactgaggggcttgatgacgtagaggaattgatctatctcgacgctgaggatcttggtggtgtggcgttaagagtatgggcaatcgtaaacccgacggaggcaaggtaa

SEQ ID NO: 501436 - DNA, 252 bp, Stenotrophomonas maltophilia
atgttgctttgtgatgccccccaggtcctttcggcagagggggaggtggactacgtagacctgatcacccgcgccggcctggcgaaagacctgatcggcaagatcaactggcactatgtcctgcatgaagacgggtgccctggggaggttggtgaggcgtgtacctgtggtctggtagtcgcctttgtaggccctacggcgatggtcatggtggacagtcgctatgcccaccgaactgatccaatcaactga

SEQ ID NO: 501437 - DNA, 189 bp, Stenotrophomonas maltophilia
atgagttatctggtcgggatcggtccatcggcgagggcgctggaattaatggacacctctacgcgggcgagcccgccgaccgcgaccccggagtttcgagaccagtacgcacacgcgagcggggccggccgggtcttcgagttttccgacgcctttacgcgggcgcgcgatgcgagcggaacggcctag

SEQ ID NO: 501438 - DNA, 702 bp, Stenotrophomonas maltophilia
atgagcaaagagaaccaacccgccgagggcgccagccagcgcgcggcgaagctcgatgtgccgctggagaaggggcagaccctggaggagaagtcggccgggttgattgctgagggcattgccagcaacgccttcgtcagcctgctgtttgcgcagcactccggggtggccggcgggaacgagctgaacgagctggtgaagtcgacccgggcggctgtagggcgtgccgccaagggcgagaccgaccaggccgataggctgctgaccagccaagccattgccctgaatgcgatcttcctggagatgagccgtcgagcggccctcaacatgggggagcacatgggcgccatggagacctacatgcggttggccctgaaggcgcagtcccagtgccggacgaccctggagaccctggccgagatcaagaacccgagagcggtggcattcgtgaagcaggccaatattgccggtggccaccagcaggtgaacaaccttgccccggaaagtcccgggccggtcccggaagagaccgggcgcgcgggaacaaaaagtcggccgaacgaactattggaggagatctcagatgcgcaatggctggaccccagagcggcgccggcggcaggcgcaggcaatccagggctggcgaccgtgggagcaggcgaccggcccgcgaagcgtcgaaggaaaggccaaggcggctag

SEQ ID NO: 501439 - DNA, 345 bp, Stenotrophomonas maltophilia
atgaacaccagatgcctgcggagactgactacacccgctctgacggcggcctccttcgctctgctattcgccctcacgggctgcgagcgagactcctgcaaggaatactctcgattcacctgcaagcagcttgaaactcaaaccttcaacgtctactactacgaaggcaaggagccacctgcggagccgaatgagctgttccttggcacggctgttgggctccaacagtgcggagccattgcctgggatgccgcgcaggctagaagaagagacagcacggaggactggtcttatgtctgctgcctgcagactgacgagtcatcatgcgctgagaagcatcgatga

SEQ ID NO: 501440 - DNA, 195 bp, Stenotrophomonas maltophilia
atgagcagtgacaaggtagacatgtccaatgttggcggacggcctaaggattggatgcagcgggagcatgagaaggaagtcgcatcaaactcgactgatgggtggaaggtattcctatcagttggagcgatcattgccttgttcgtcttcgctgcctggatgctgatctcggtcatttttggcccgttccactag

SEQ ID NO: 501441 - DNA, 1158 bp, Stenotrophomonas maltophilia
atgaatgtctttaagggcgacacaaacgcggtgaaacgcgcgttgtactgggcggtcgatcagcagatccctggaaccgcgccgactcccatggccaatacgcaacgcgttcttcagcggctcaccactcccaacccgagtgcaagggcaacaaccggggatttgatccagcccagcatgactaggcttcgaaccaacctcgaagcggatctccaggcgaatggcggaaacctgacgtatgaggcgctcaagcgcatccgcaccgacatcggtgagcagatcgggcgctcctcgcccctgaaccctagcactgatctgcaggagctccagaaggtctatggggccctgtcggaggacatgcttgcggctgcgcagaacagtggaccggcagcagtgcgggccgcagcacgcgctaacaactacacccggaacgtcgctgaaaggaatgatctggttcagcgcattctgaacaaacatggaggcccagagaaggtctaccaggcagctacttcgggcaccagggatggtgcaaccacgctccgcgccgtgatgtactcgctaccgcaggacgagcagaaggccgtgtccgcagctgtgatcaagcgcttggggctagccacgccggggaatcagaacgtagagggcgacgttttcagtacgtccactttcatgcgcaactggaatgacctgagcgaggaggccaaggcggtgctgttcggtcgctatggcaagaacttcagggagtcgatgaaccaggtggcccgggttgcgcacaacatcaaagagggcgcaaaggtctatgcgaacccatctggcagcggcgacaaggtcaccgcgatcgcttactgggttggccttctcaatgctttgggtagtggccatttcaggactgcagccggcgtggcagcgggtggagttggagcaaatgcgactgctcgcgcactcaccagcccaatcgccgtgaggtggcttgcctcacaaaccaacatgccgaggggggcggcagtgccgcaggcaattctcctgcagaagcaggcagctgccgcgaacgatccagaactggaagagatcgcaaaagccctagtggaacgggccaaaaatgaccgagatcagcatccaggcagcgaagacgaacaaggcaatgatcgctccaactga

SEQ ID NO: 501442 - DNA, 1671 bp, Stenotrophomonas maltophilia
atggcagacttccagcagaatttcttggcctcgctttctgcgggcaaccagttcggccagcagatcaaggcccagcgtgaccagcagcagctgaaccgtctggcccagctttcctatgaagcgccacaggagcagcgacagtcgcttctcggccagatggctgcactcagccctcgtgccgcgcagcagcaggagcaggcgtttgccagcgcggacgagcgccgcaataccaccatggtgaacatggccaagctgcttacggccatgccgccagaggcccgagagagcctgtacaacaaccggatgctccccgagctgcagaagatgggggtgtctggcgcccctcggtggtctcctgaaaccgaggcggtcatcatgagaagcgccaatgacctctacatggctggcaccggcggccagatgccgacggatgttcggtccttccagatgatgacatctggtctgtcaccggaagacaaggagcgcgcccgccgtgtccagctgggccttgaagggcgagcctccaatgccggttacggattctttgaattccaaggtgcggatggtcttaagcgcatgggtcgaaacaatccgcgtacgggctcgcgtgaggtatatgacgagtccaccggggagtttgtgcccttgggcggcactgctgggatgggggctgcaccgcaggctgtggcttctccggcaaacggcaaccactacgctgcattcagccagctggcgaccgaattcccggctgtgacgatgaccagtggtgtccgttctgccgagaggaatgcccaggtgggcggccagcccaacagccagcatctcaatgggaccgctgctgactacgccgttcctgccaatcagaagcctgccttcatttcccgtgcgcgccagcttggctatcaggccatcgatgaaggcgatcacatccacctgcagttgcctcgcggagcctccaacaacatcaaccctgcacttgcggttggccgcagccccgaagatcaagctgcgcgcactgcgcaggctacgacgaatgtggagaacgctaacttcccgaacaagctcaatcaggagcgtcagctgcaggatgtgaagacccagggggcgatcactcaagcagccgggacagcagcagcggaagcacaggctaaggacgctgcacagcgtccgaaacgtatccagcagtacagacaggctctgaccgccgccgggaacgtggaaacgtcgctggacaaggcgctcggtctagtaagcccatattcgactggcttcgtaggcgctcgctctcgtggcgttgaggggagcccctcctacaacctggctgcagaactggaaaccatcaaggccaacctcggcttcgacaggctgcagcagatgcgcgattcgtcgcccacgggcggtgcgctcggcgccatcgcggtacaggagctggttgcgctgcaatcaacgattgccaacctcgatcccaatcagtctgaggctcagatcagagacaacattgagcgtgtaaagacacactacaagaagtggaggtccgcggtggaacagtccttggcggacgaggagcgggctcagagcgcagcgcccgctgtaggggctggccaggactacggaggcgcagctccttcatcaacgccatcttcttccaactacagcaatctctggaactga

SEQ ID NO: 501443 - DNA, 759 bp, Stenotrophomonas maltophilia
atggccgctatcaccgcagcagcagtggtcggcgccggcatggcctattcggccaatcgccaaggcgccgcacagaagaaggcgggccgcgcccaagcaagcgcagcccagcagacactggacacccagcagggcatttacgaccagtcacgtcaggaggccatgccgtacttggaggcgggaaacaacgccctcactggcctgaacgcgctggcctctggcgactattccgggttccagaacagccccgactaccagttcgcgctgcagcagggcctgcagggcgtcgaccgctcggcagcggctcgcggcgcgctctactcgggcggccagctggctgacctgaacaactatgcgcagggcatggcatcgcagcagttgggtgcgtaccggaacagcctgatgggcctcgccagcatgggccagaaccagagccagtacctgggccagcttggccagaactacggcaaccagttcgccaatgccatgggcctcaaggggcaggctaacgctcagatcgcatctgctggtccgatgactcaggcgggctatggcaatgctttggcagcggcggccagcacttacgccggtgcggcaggtggcggcggcaatgcactgtccggctggcagccttcgtcggcttggggtcagtcagtcaccgtgtcgccaggatccaatcagggttttggcaacaacatgcagaattttctggccttgggtaatggccgcaaatccagcttcggcgggtgggggaactaa

SEQ ID NO: 501444 - DNA, 450 bp, Stenotrophomonas maltophilia
atggcaaccattcgtaaggcaactctggcagacgtgccggagatcgttcgcatgtctgcgcttttctacccgaccacgcattacgcgcagtggtgcgacatgaacgaggaaacggtcgcctccctggcatcgaatcttgtggagaaccacgtgttcttcgtggcggaggagagcgaagagctggtcggtatggtcggcatcttcatcgctccgttcctgttcaacgcacacgtcaggttcggcgtcgaggttgtgtggtgggtagctcctgaggcgcgcggttcacatgtcgccgtctcgctactcaacgcaattgagcagccgctgcgcgatgccggttgcgaccggatccagatggtccatatgcccaacagcccgccgcaagccgccgctctgtacgagcggatgggctatgcgcgctccgaaatctcctacacaaaggatctctga

SEQ ID NO: 501445 - DNA, 552 bp, Stenotrophomonas maltophilia
atgccacctatcattgtcgacaatgcgatctctgatgcgctgagcgctcgcgctgaggggctgcgagcgcaatacgtggactggcccgggcatgacggcgaggtctacaagcgcgtttcgctcacgccggttcctggtctgcaagaggcaattgaggcgcagatggggcccgtggaaatgttggggatgggctaccggctcaacttcaatggtgagctgcccaacgcggctatccactctgacatgggctggggcacgcacgcggcagttctatacctgagcgagggcgaaggcggaacggccttctggcgccacaaggctaccggcgcacatcgaatcgacccgggtgatatgtcgctgtttgaacacgtcaagggcgattgggacgacgcatcgcgatgggaacagatcggactggccgaaatgaagcttggccggatggtcatctacgaatcggccctgttccacagccgctggccgtttgccgcgtttggcactgattacgactctggccgcctcgtcgcggtggccttcttcaccccgagggcctga

SEQ ID NO: 501446 - DNA, 744 bp, Stenotrophomonas maltophilia
atggcatctcgagaccatgagcggtacttggagatggtgctgctggagaacgaggcagtcgatttggttgtgaggagcatcgctggcgcgtttggcttcggggcgccaacacggcccgcaatccggcatgcgacgaggcggagctccagcgaggagtgctgcccggatgacggtgcgtacctgcctatccatcgggtgcactcgattgagcaggccgcatccaagtacctaccaacgcaggcggcggcccgtaagcaggcgctggataggtttagcccgaaggatcgccaagcagtgctggattttgatcagatggcggtgatgcgcgcgccgaccgcggctgatcgtactcgccagctacggagctggaagacgcagggctcgctgacggccgcgcctgtcagggggcagagcaggctggtgctgcacgctctggcggatgcccagctggacggtccacttggcgcctggctgatgctgtacgccatcggtgacgagagaagctggccgttggtctgtcggcacatgactgcgtgcggacacccagactgggcttcgctggaagcggtccggagattgctggccggccgccagcagcagtcttatcgggagtcggccaagggccaagcccgccaagagcagcggtttcgtgtcgaggtgcagtcggctgagaggcgcctgcttgaatggctgggccgcgccagccggagagttgccgccgcaatgggcgcttcctgcgagtag

SEQ ID NO: 501447 - DNA, 477 bp, Stenotrophomonas maltophilia
atgcacagtacaagccaagaccgcgcccagcggtctccagagggcggcgcaagctatggccaggcgcaacccaagaagaacactgacaggcggcgccagaagctcgtagggcggtcgaagggcgcgccgtttctgatgcttgagcacaggatttccgactcgccggagttcggccagctatctggtaacgccgtaaagctgctgctggaactggcccggcagtacaggcctggcaaaaacggcgatctgagcatcccctggtcgatgctctcgacccgtggttggaggagcaaggcgaccgtgcacggcgccaagcttgagctcctcgccgcaggctggatcatcgagacgcgcaaaggtggcaagaacatgtgcagcctgtatgcgctgacctattacgccgttgatgagtccgaaaagcaccttgagccaccgaccgtaactccattgaacctgtggaggaatcgctatgggtag

SEQ ID NO: 501448 - DNA, 696 bp, Stenotrophomonas maltophilia
atggctactggaatcgtccacgtcgagttccacggtgccgaactcatcggccgtctccaccaaggacaaccctttgtcgccatgcggcccatcgtggaaggcatgggtctggattggtccaagcagctcgagaagctgaaatctcaccccgtcctggctcggcaactgtctaccttaagggggatggttgctggcgatggtaaggctcgccagatgcaggcgttgcccctgtctaggctcccgttctggctggccacagtgaatcctaacaaggtgaaggctgccattcgggagcgcgtggttctgttccaagagcaggtggctgacgttctcgcagcggcattcctctcgaatggcacgcggcaggatgtggcaatggcaaagcgcgtcgcaggcaccgtgatgtgccgcatcctgcacgacatgctggttgggctgggccgggaccccaagggttacgactacgccaccgagcatcgactcgtgaatcactgcatcactggggtctttggcggcgtctgtgaggactcgctttccacagaccagctcaagctgcagcaagagctcaggatgcagaacgcggtgtggatcgggcagggcaggccatatcgtgagcgcaaacctctcctcgagcagcatgcagccaattggtgcagctctcagcagatcggttgggaggcccccaatgcttcctag

SEQ ID NO: 501449 - DNA, 231 bp, Stenotrophomonas maltophilia
atgacctccgatgctatccggcttgggcgcgtggccgctcagggccgaaccctaatgcgcctgcccgaggtgatcgcggcttgcggcatgtcccgctctctcatctacaagatggcgaaggatggtcggttcccccaacctatccgagtagctgcgcgcttgtctgcctgggactcggaggcggtgcggtgctggatcgactcccgttgcgaagaggggagggccgcctaa

SEQ ID NO: 501450 - DNA, 255 bp, Stenotrophomonas maltophilia
atgagcggattcgacttctccgatctgagcccaggtcagcgacgtctgctggatctcggtggctggaccgcagatcacccccatgccgagaccaagccgggccgtaaggatgcctggggcttgatcgagcgcgggctccttctcgctgtcagcgttcggaggcgtgacagctacggcgcttactccctcactgagtaccgggtgccggacacggcccgccgggcgtgggctcagcataaggagacctcggtatga

SEQ ID NO: 501451 - DNA, 933 bp, Stenotrophomonas maltophilia
gtggcccgcacgaaatccgccagccgaattcccgactggttcgatctgaatgcttacggcgatttgacggacttcgctaccgaggactggttgaatctcctggttgagctctccatcgtgagtgacgtcagcgagatcctgcattctgttgtagaggatgacgctgagcatcgagtggagctcgaaaagatgttcagcaaccttcagaagagcctaggaaggcaggggcacgagtggtggaaagaaaagtatgcctccaacccggaggtctacgcctttgggagcgttgcatcgatcaccaattggacggtcgcgcaaatggcagcgcgtctagaacaactggagggctctcaggacttggttcgtagctcccggcgcgtcatcgaatgtgagctaagtgcggattacgaagcctggctagaagctaaggatcaggtccggacctatgaagaattcggacgtataccattctttgtcgcgctccgtgactcccctgagttcgctaagtcagcactgcctttgaccaacaatagggctgtcgcgattgatctaagcgtcccagatgccaccattcgacaggactttgataagtggttggcggcgatgaggcagctagacagtcaccgtgcggccaagcgcccgttctctcgagcggactattcccgctggatacagagtggatacgtgccactgcttgtattggatcactggcgtcgactcacgggggaaaagatcacgtacggggacatgtgcgacgcggcgtttccagccgggcgtagagtcgaggttgatgacatccgaaagactctgctgccgaacgctcgagcctgggcttccaaggaaaacatagaggctttggcagttcaggctgcgaatgaggatgcggcgcagatgcaggaaaattcagggggggagaaatcttccggaaagtag

SEQ ID NO: 501452 - DNA, 690 bp, Stenotrophomonas maltophilia
atgctcagctcgactgtagcgacggcggggcaggaaaaggatgtactcgaagtccgtattgaggcgctgcttgaagctggcgtaccgatccgaactttgatcggacatcagctctgcagcatagactggcttgctgctcgaatcgaccacaagttccggctttgctatcacggcgagcgcggtgaagtgattgttgagtccgtttctgcagccaggctcctcactcgtggcagggagctaggttggcatccgctggatgaagaaccatttgagctgggatggccagacctcttcaaggagccgctgtatcactaccgacacggcgtgcattggtatgcgaccgctgtctcggacacggatcgaatgctcccactcgcgtttcctaagtctgtcatcgcgaaagacagactagccacggaagcagcggctgagagggctgaaagtcgattgcgtcgccagcagaggtcgagggacagagctttggctgccaaagaccgccaagctgatctggacaatttgacgcgtatctcagagcggatactgcaggaggctgtacaggccggacgccccatttcagtttcgaccgcgcggcgaagggcaaaggcatggatgcaccaatgggagaaggatgttgccacagtcatgaagcggttcacggatagtcataggggtggcgacgatggccggtag

SEQ ID NO: 501453 - DNA, 231 bp, Stenotrophomonas maltophilia
atggctaagcgcaatcaaggcgggtcgacggccctgagcagggaagatgcccttttccaggcactgaactcagcaagccttgccatgggtgacattgagggaatctgccaactgctcttcaacgagcagtcgatgttcgaggcagatttcccggctccgatagctgccgccatcagcatgatccgcgagcgggcttctactgcaggaaacgcaatgcaggaggtgctgtga

SEQ ID NO: 501454 - DNA, 210 bp, Stenotrophomonas maltophilia
atggattgcagcattgtacttgttgcgcctgaacgggcgcgctcggccgaaatccggcccgcactttcggccgtactggccagcagcaggatcgtccgcgcttgccacagttggctcagcgccaacgatgacctcaatacctaccggatgtgcctcgcactttttgccgccgcgttggccctcgaattctgggagcgcgccaatggctaa

SEQ ID NO: 501455 - DNA, 1215 bp, Stenotrophomonas maltophilia
atgctgaccgacaccaagttgcgctcgctcaagccgaaggccagtcccttccgtgtggctgatgccaacggcttgtgcattgaagtgcgcccctcgggagccaaggtgtggcgctaccgctaccgctatctgggaaaggccagcatcgttacgctcgacgagtacccgtcgatgtcgctgcaggctgcccgcgtcgaacgcgaccgtctgcgctcgctcctgcgcggcggggctaatcccgctcaagtggccagggttgaaaaggcagtccaaggagaacgggccgcgaacaccttcggagccatcggcttggagttgctcgccaagcgaacgaaggagggcctttcccctggatcggttgtgcgtgagcgtcggctgatcgagaaggatctggctggactggcggatttgcctattggggacatcaccgcccccgtactgctggctgcgctgcggaagttggaacagcgcggtgttgtagaaaccgcgcatcgcgcccgggcacatgctgggcgggtcttccgctacgccatcgcgacggggcgtgctgacagaaatcccgctcaggacctcacaggggcgcttgaacagcctcagaccaagcactttgccagcgtgactgatcctgccgttataggaggcctcctgcgcgcgctgtggggctaccagggggcactggtcacgcaagccgctctaaagctggccccaatggtgtttgttcgccctggggagcttaggcaggcgaagtgggctgacatcgaccttgatgctgcagagtggcgctacgtcaccagcaagaccaaaacgccgcacatcgtccctctgtccgatcaggccgttgaggttctccgggagctgtacccgtatacgaaacggagcgaatttgtcttccctggcgtccgcagctcgctgaagccaatgagcgagaacacgatgaacgcggcgctccgaaaccttggcttcgactcagacacgatggttggccatggcttccgagcgatggcaagaacggtgctggacgaagtgcttggctatcgcccggactacatcgaacatcagttggcgcatgcggtaaaggatccgcttgggcgggcctacaaccgagcaacccacctaccggaacgccggaagatgatgcaggcctggtctgactatctcgaccagctgcgcgttgcagaaccgaacgtgctggccttcaaagccaaacgcgcctaa

SEQ ID NO: 501456 - DNA, 330 bp, Stenotrophomonas maltophilia
atggaactgaagatggttgtcgatgcatgcggcagggatggatcggatgcacgtgactgcaacttcccgccgttgttggactgggacgatgtaatgcgtgatgagcgcgatgaccccctcggattcgcccgccgagcaacactggcgttgctgacgcagccgagtgctggattgcttgccggattcaggggcgacaaccagaaggcgcttgaagaggccagaaggacggtggcattgtttcaggcacacctgcggcggcaggcgtggtttgcggaagtggcggagaggcggttggggcgcgttgccgaggttcttgctgctgccgggtag

SEQ ID NO: 501457 - DNA, 213 bp, Stenotrophomonas maltophilia
atgcgcatcctgatcctgtccacatccctgctggccaccgtgctgctgtcggcctgccagcgtccgcccacgccgaacccggagaagccgccggaaccgcaggccatggcacgcgcgatccagcagccgctggaccgcgccaagggcgtgcagaagactgtcgatgacgccgctgcgagcgagcgcaaggccgaggctgacgcgacgcagtga

SEQ ID NO: 501458 - DNA, 372 bp, Stenotrophomonas maltophilia
atgaacccgattctgcacgtcgagataccggtccgtgacctggcccgggccatcacgttctaccagcactggctgcaggtggtggtggacgccccgatcctgctgcatgactgcaggatggcctacctgccgtttgccgacgaggccgcaggtgccagcatggcgctggtgcagggagccgactaccagtcgtccgagcacggggcgcgcatctacatcggggttgctgacctggacgccagcctcggccgcgcgctgaaggcgggcgcggagctgcgcttcggcccggccgatgccggccactggcgcgtggccgagatagtggacagcgaaggcaaccgcattgcgctgcaggcgcgcaggatgccgtag

SEQ ID NO: 501459 - DNA, 567 bp, Stenotrophomonas maltophilia
atgcacgcggatatccgtaccgatggccgggtctttgcctatgtcttcccctgcgcatgggaggactacgcgaagatcggcttctcccgtgatccgctggggcgcatcactgcactgcaccggcgctggttcgagttcttcgatctcgatgcgggcctgttggtggaggccgagaacgagcgcgaggcccgcgatctggagctccggttgcgcacgccgctgaaggcacaccgcgcgccggcgccgatgacggtgcacgacaaggccggcgggcacacagagtgggtgcgcggtgccaaccaggcactgttgatcgccgtcgaggcgttgaacgaccagggctaccgctgctacccgctgcgggcatggttgcgggccgcatgggaactgcgcctggaccggctgcacgactgggcggcggtgcagctgccggaagacgaaggcctgcgcatgcccggtgggccgggcgagcgcgccctgcgcgacacgctggacggagtgcgggcgctggacatcgatccgatgccgtggctgcccgaacacgttcagcgctggtatgcccgctga

SEQ ID NO: 501460 - DNA, 594 bp, Stenotrophomonas maltophilia
atgacgcacacaacccgcccccgttgttcgcccaccctcacccgcctttccaagggcgtgcgcagcgcgctgggcttcaccctcaccgaggccttgctggcgctcggcgttgtgaccgccgccacgggcgcgatgttcctgttcttcgggcaggtcgatgcaaaggccaagctcgccagcgaaacgcgcaacctgcgtgagttgtcccgacgtatcgagagcagttttgggatggtggggacgttccgcggggtgagcaccacggccatagtggtcgatggtttggcccctgattcccagctcggcgccggggaaagcgtcttgaccaacgcgtggggcggcgcggtgaacgtccagccctacaccgtcgaacgcttcggggattcgttctccgtcagctacgccggccttcctcgccaagcgtgcgtggacctggtcgcggccaacgcgggcggggtgtgggacgcgcaggtgtcggacgtgtcggtgattcgaaacaccggcggccagctcgacgtggggttgctgggccgcacgtgtgcggacaaatcgcgcgtggtcttcgtctaccacctgtctcttatacacatctga

SEQ ID NO: 501461 - DNA, 525 bp, Stenotrophomonas maltophilia; identical to SEQ ID NO: 497759

SEQ ID NO: 501462 - DNA, 1200 bp, Stenotrophomonas maltophilia
atgaatgcatgggtgctgcgcactgttcttctttgttttccactgcaagccattgctggcagtggtactgaaaagcccgatccgtcacgagtgataatattgggcgtcgaccatgcagctcaattggtttcatccaatgacagtccggcaatgctggcggccttcttggatcgtgcgcaacccgacgcgatctgtatcgagcggtctccggaggcctttgctcggaacgactactacgaattcacctatgaagttcaggatgtgatcgtgcccttcgcccgcgccaggggcgtggatctgtgcccaatagactgggcgcctccgtcagaagacgccaagcttggctttggcaccgatctggaagcaattccgcaggtgcgccctgatcagggttttcagggcttcctgtcattcccacgcccggcacagctgaacagagatattttccacgcggataccgaggttaaccttgccaaggttacccagtgggctgtgaccccctcaaagcgagcaaaagatgacctgccacgtcgcttatacctctatcgaacctacttgcaggcgaagagagtggccgcagctgcgaaggcgcggcctggtggcaccatcgttgtagttgtcggcgagttccacaagcgtgatatagaagccgttctttctgatgacgacagcattcttctggtacagcccactgccatcggtagaccgagcgatgcccaacgggctgcggcgaatcgcgatgcgtaccggtatgcaatcgccagcttcaatctactgggcgttcaggccggcaccgggaatatcaactatgcgtttgttgatgaagcggtagcagcgctggcgcagagcacgccaagcgccgaggttgatctgtatcgcaccaggctggatctgctccgtaaacgcataacctcagagcaagccgtcgagcgatacagaacgatcgcaacggctgctggagatgcgcgtttcagctggacaggcgtaagtgacaaccagcgtgtcgattcctatttcgaccccttcggtaatctgagtgtgaggcaaagagcacttcttgaagctgctcgagagcttggcggcagcacgcgcatggttgaggccgaggcgatcgctggcacgattgccaacgagcttgacccagctaagtcgcgccaattccaagcgtacttcgagcgttacatcagatctggacgctag

SEQ ID NO: 501463 - DNA, 408 bp, Stenotrophomonas maltophilia
atgcccgaacgtcttcccgaccatccccgcctgcatgcgctgctgggcgccgccgtgcgcgatcttcccgctgcgttggccgaaacgctggaggacgcgctccgcgagtccgccgagttcgtcacgccatcggctttctttgcacacctggcaggccacggcaggaacctgcgcgctgatggcgaggcctggagtgaaatgcacttgagccctggccgcgccttcgacatggccctggcgacccgcagcatttcgggcattacggcgttgactgcggtgctgcacgctgcgcatgtggcgcgggagagcgacgatcccgcctgctgtccctccgcagccgtggtcgagggcctgttcaacgcctgccaggtgctgtcactgcaggtggagcgctgcctggttccatga

SEQ ID NO: 501464 - DNA, 2142 bp, Stenotrophomonas maltophilia
atgccgcttccaaccccgctcaagcacgccctctgcctggcgctgcccctttccctggctacacctgcactggcctccgaggcctccgctgatgcaccgaaggatctgggcaaagtggaagttcgcggccgcgcacagaccctgtaccgcgccgacgatgccgctgtcggcacccgcaccgatactccgctggagcaggtaccgcagtcgatccaggtcgtgccgcgtgagctgatcgacgaccaggctgcgcgccaggtcaccgacctctaccgcagcatcagcgggatcagcttcttcagctatgccggcgtcaccctgcgcgggttccgccaggaaaacgtgctctacgacggcctgcgcggtgatccctatgcaggcttctcggtgccgcaactgttcaacatcgaacgcgtggaagtgctgaagggcccggccggtgcgctgtacggcggtggtgatgcgggcggtgtcatcaactacgtgacgcgcaagcccaaggccaccgccgaacgccgcatcgaactgcaggcaggcgacgaggacttccgcgccggatcgatcgaaggcaccggccccttgaatgccagcggcagcatccgctatcgcgccggcctgtatgccgacaccgagcagggcgtgcgctggaacgccgacagcgaaagcgtgatcggcgatgcatcactggccttcgacgttggccagaccggcgagctggtgctgcagttcaccgacatcacccagaacctgggcggcaaccggctgcgcggtgtgccagtgaacgatgccggcagcttcctgaccgaccggcgatggaaccacaacgaggccagtgatttcctcgacatgcgcgccagggtcgcactggcgcagtatcgcttcgcaccgctcgatacgctggacgtggacattgctgcgcgctggttcagcaacaacgagcaccagatgtaccacgaaccgatgggcctgatcgatcgtgaccgcgacggcgtagccgaatggatgacgcgccagctgcgcaaccagatccgcgacaacgaggccttcaccgccagcggcaatgccgtctggcggatcaacaccggccgtatcgaacacaaggtgctgttcggcgccgacgtgtaccagctcgacgccgacttcaccgcgcagaccgccaacagtgccgacctggcacgcggcgccggcccggtgcgcggcatcgatctgttcaacccggtctatggcgcgagcacctggcacgactacaacctggccgccctgccatggcgcagcaccgccacccgcagcaagcgctacggcggctacctgcaggatgagctggccctgggcacgcgctggcacgtgctggccggactgcgctgggatggtttcaaggatgaagaccgcatgggtggcagcagcgtggatggcaacgcgctcagctggcgcctgggcagcacctttaccgcccgggacggcgtgaacctgtacgccaacgtcgccagcggcttcgtgccgcagagtgccgccaaccagaacccagcggccggcggaccgttcgacgccgagcgcagcaggcagtgggaagtcgggctgaagtccctgctggcagaccgcgtcaccttgaacatggcggcctaccgcatcgaccgcagcaacatcgtgcaggccaccggtgaagtacgggacggcgtgaaccagctggccgcgctgggcctggtacgcagcacgggcatggaactggacctgctggccgacgtgaccgagcgctgggtggtgaatctgacctacgcctacaacgacgcacgggtgaaggatgccggaccgaacggcatcaccaatgcctccggcgaccgcttcgcgaatgcgccacgcaacaagctcggcctgtggacacgctacgacctgccttcgatcaactcggccatcggcttcggcgccgaccatgtgggcgagcgtgtcagcctggatgggcagacggtgaaggcatacacggtgttcgacatcagctggaagaccacgtggaggcagtggcagttccaggccaacgtcaagaacctgttcgacaaggtgtacgcagccagtggcttcatcgaacgcaacgggcacttcccgggcgagccgcggcgggtgtatgtgcaggcggcctaccgcttctga

SEQ ID NO: 501465 - DNA, 183 bp, Stenotrophomonas maltophilia
atgggcatgacggcgcaccagcgggaaatccttgaagcaatcgccgccgcgcagccggtgcgcggcgatgcggcgacatgggcggtcaacgcgggattggcggtacaggcggaagatggagatatcgatctcagcgacgccggccgcgacgccctggccgcgcgggccggacgcaaggactag

SEQ ID NO: 501466 - DNA, 246 bp, Stenotrophomonas maltophilia
atgagcccgcaccccgtcctttacgcttccgtcattgccgccgctctggcaacgctcagcgcctgtgccacctatgacgacagcgccatgcatccggcctgccaggactcgcccctgctgaaggacctgccccgcgaggtcgccgcccgcgagagccgttgcaacaagggcctggaggtgtggtcgagcgagcgcaagggcagcgacaggccgctggacctgagcggaaagaaaaaggaaccctga

SEQ ID NO: 501467 - DNA, 1239 bp, Stenotrophomonas maltophilia
atgtcgctgttctccccactggtgttgccctccggtgccgtcgtccgcaaccgcatcgccaaggcggcgatggaggaaaacatggccgacgccgatcacgcgccctctgcggcgctgttgcagctctaccagcgctgggccgatggcggcgccggactgatcatcaccggcaacgtaatggtcgatggccgcgccatgaccggccccggcggcgtggtgctggaagatgatcgccatcttgatcgcttcatcgcctgggcggacacggcgcgctcgcggggcgcgcagatgtggatgcagatcaatcatcccgggcggcagatgccggctgcactcggccaacccgcactcgccccgtccgccgtcccattgcagatgggtgcgctgtccaagcagttcgccccgcccaaggcgatgaccgaggacgacatcgcgtcggtgatcgcacgcttcatccgcagtgccgagctggccgagcgcgcgggattcactggcgtgcagatccatgccgcgcatggctacctgctcagccagttcctgtcgccactgtccaaccgccgcgacgaccgctggggcggcagcctgcacaatcgtgcgcggctgttgctggagatcgtgcagggcgtgcgcgctgccgtgtcacccgccttcgccgtggcggtgaagctcaactccgccgatttccagcgcggcggcttctctcccgatgatgcgcgcgccgtggtggaaatgctggcgccgctcggcgtagacctggtcgaactatccggcggcagctacgaagcacccgccatgaccggcgctgcgcgcgaccagcgcagcctggcccgcgaagcctacttcctcgaattcgcgcgcgagatcgccacggtggcgaccctgccgctgatggtcaccggcggcatccgccgatactccgtggccgaacaggtgctgggcagtggcgtggccatggtcggcatcgccaccgcactggcgatcgagccggatctgccgcagcactggcagcagggccgcgatccggcgcccacactgcgcaccatcgactggcgcagcaagccgttggccgccagcgcacacatggctgcggtgaagtaccagctggggcggctgagcaagcgtcggcccaccgcacccggcgtctcgcccgtctgggcgctgctgctggcacaagcggccgccaaatgccggacccgccgctaccgtcgctgggtcgctgaccgggccggcgcctgttga

SEQ ID NO: 501468 - DNA, 798 bp, Stenotrophomonas maltophilia
atgaacagtctgagcaagaacaggaagaaggccggtatgccgcgcagcactcgactgagcgcgttggcattgggcgccgttatgtcgttggcaaccacgacggcgaacgcaggctggccggtgttcgattactcgaacctgctgcaggccatctatgagtacaagaactcgatcaccagttacgcggccgacgccgccgagtatgccgagcaggcagagcgctggaaaaggacgctggaccagtacgctcaggcactggtaaaggtgcaggcacagatgcggaagattggcctgccggagggacagccattggtacccgtgcctgcggactatctggtggcggaaacctgtggcagcaagagcagtttctcgcccggcgatcttttcaagagtcttgtgttcaatccgaccggtgacatgaaggagcagcagacccagatctgcgtgaacatccgcatgatgcagaatcgcaagtacaacgattcggtcatgttcctcgcgcagtccattccccagatggagtcgggcctgaaggaaattttcgatctgcgcatcctcagcaatgatcagggcaacgtccagggttcggacagcgaagcgacccgcatggccaacaacctggaagtggcagcgcaaagctgggaaggacgcatgcgttcttacgatgcctacattgaagtaatggaagccaaccagaagatcgtggcacaggcggcgctcaagggtgatcccaccaagacccttgcgagcgatctggtgaagaccgtcgcgctgaagacggcactgtccatcgattaa

SEQ ID NO: 501469 - DNA, 657 bp, Stenotrophomonas maltophilia
atggatgtagcacagcgcgaacacaggggacggccgttgttggcgttgatcgcgctattgccgctggccgcgtgctcaccttatgccgatgccgagcgcgacgttgctgcgggtggacgcggcctggccaagctcaacccggcgccgaagcaggcctacgaactggtgctgacagtgaaggatgcaccgggcccattcgcggttgttgagggcgtggcccagtatgacgtcagcaactacgaagactgcgggagggtcatatggtccaccggtacggccagccgcatcaccagccaggaaccggtggaactgcgcaggacgggcgagaacgaataccgcggtacgttctacctcgaccgcatgcaggaccaggactattacgatcgcggtacgtgccactggacgctgaccggcgttggcgcgatgttgcgtgccacgaccggcgaagctgatacgcgattcctgacgttcatcgacaggaagcgcatggacgcgggatcgccgttgactctctactatccgaagactgcttatccccgcgccgagctcgctgccaacttccctgccagcggcaaagaagatccgtcggcctacaaggaggaactgcgcgacgcgctgttctcgaccacaaccactgtgcggacgctcgcgccatga

SEQ ID NO: 501470 - DNA, 519 bp, Stenotrophomonas maltophilia
atgcattacacgattcggcctgagtccaataaagaccgtgcaggtatccacgcactcactgaggcggccttccgtgatgcgccgcacagcagccacaccgagcagttcattgtcgatgcgctgcgttcgcgtggagagctgagtctttcgctggtcgccgagaaggacgggcaggtcgtcgggcacatcgccctgtcgccggtgacgatcagcgatggcagcaccggctggtttggcgtggggcccatctcggtgctgcccggatgccaggggcagggcattggcgcagcgctgatgcacgcggcgctcgacgcattgcgtgggcagggcgcgcagggctgcgtcgtgctgggggagccgtcctactacgggcggttcgggttccatgccgaaccgggactggtactgcggggtgttccagcaacgtacttccaggccctctccctggtgccgccgatcgcgcagggcgaagtgcgctactcagcggcattcgaggcaaacgccccgcccgtggattga

SEQ ID NO: 501471 - DNA, 264 bp, Stenotrophomonas maltophilia
atgtacagcctgcgctacgtcggcttcgatgtgatggaaccgcatgtggtgcacggcgtgcgttccgggctggcaccggagagcgcgcaggcacacgacgaggcactggctgcagcaacgcactactaccgcgaacgcctggcgcactggacgcactggcccaccgtgtccttcaacgacagcgcggatttcgaggacggcgtggtgctgcgcgcggaggccaccacctacagccccttcatccgccatcgcaacgccggatga

SEQ ID NO: 501472 - DNA, 861 bp, Stenotrophomonas maltophilia
gtgctgcgctctcctcaccgcacaccgagccttgtcggggcccttcagccgcagagacgtcggttgaagacacgcgtgtggcggatgcactctgcgcggcgccggacggatgcccttgcgtacgaatgtcctccggcgccggccgttggccgtcacctccccctttacttcgtacgcaagggcatccgcccggcgttcggagttcgtcggcgcttccttgaagggcggccgcgcgtgctgcgctctcctcaccgcatgccgagcctcgtcggggcgggcaggggtttgggcaaagtaaaggaggaggtgacggccaacggccggcgccgggggacatttgcccaggcccctgcctgtcccggcggggcccttcagccgcagagacgtcggacgaagacacgcgtgtggcggatgcattctgcgcggcgccggacggaggcccttgcgtacgaatgtcctccggcgccggccgttggccgtcacctccccctttacttcgtacgcaagggcatccgccctgcgttcggagttcgtcggcgcttccttgaagggcggccgcgcgtgctgcgctctcctcaccgcacgccgagcctcgtcggggcgggcaggggtttgggcaaagtaaaggaggaggtgacggccaacggccggcgccgggggacatttgcccaggcccctgcctgtcccggcggggcccctcagttcgcagagacatcggacgaagacgcactccggaatccggacgccaggcaaaaaaagacccggcagagggagggatctgccgggtccggattgcgtggggggagggacccacgcaatgagcgttgcgtcgcgtcagtggttgttcgcgtccgccgttga

SEQ ID NO: 501473 - DNA, 909 bp, Stenotrophomonas maltophilia
atggatgcgcgccagggcctggacctgctgcagcgcctgccgcaggtctggtgcgaaccctttgccgacgcttcacagctgccgacgttgctggccagtgaactgctgggggcgcgcaagccggtcgcgctgaccggtgacggtggcgatgagctgttcttcggccaccccagctatggccgcgcgctgcgcaatgcgcgcctgtgcggcggcctgccggactgggtacgcgacctcgcgcggcgcagcggcaatcgcttgaacgccgagcgcggtcgcctcggtggctggcgtgcgctggtggccgaggtcgctgccaacgatgtggaggggcattacctgcagcgggtgacccgctggcgacagccggcccaggtcgtgctgggtgcgcgtgagccgctgacgatcttccagcagcaggacacggcgctgccggccgaggcgcgcatccagctgctggatttccgcatggacctggccgagggcatcctggccaaggtcgaccgtgcgggcatggcggcgggtgtcgagacccgtgcgccactactggacatggaggtcgtgcgcctggcgtggcgcctgccgcagcacctgaagtaccacgatggggaacacaagcggatcctcaagcacctgctggcgcgctatctgccggaaccgctggtgtatcgccccaagcgcggcttcggcccgccgatggcgcgctggctggcggggccgttgcgtgactgggcggaggcactgctggacccgcagctgctgcgcaaccagggctgcttcgatgcggtgcgcgtgcgcggcatctgggaggcgttcctgcgcggcgagcgcaagtggcacacgcacttgtggaacgtgttgatgttccaggcgtggcaccagcattggcatggtggtcgcgggcgctga

SEQ ID NO: 501474 - DNA, 1248 bp, Stenotrophomonas maltophilia
atgaaaatcagacacgctttggtcaaactgctgctatccaccgccgcactggccgcgccccccgcgttctctcaacaagtgacgccctccaccgaccccgttgttcaagcctttgcgcagcatgagggattgaccacgcaagaagccgacaggcggctcagacttcgaattgcggcaggtgaagagcttgcgcgcattctggatggaatgcctgatcgcttcgctggcaagagcttcactgagaacccgatgatcgtgacggtccgtttgaccgggaccgagccagtgccatcccgaactatgagcactgtctatggcaccatcacctaccgcttcacggtcggtgcaactcactctctgacgcaattgaagcagatagtgaagtcaggaaaggtggcagaacttttcccggagcatcaggggatcatgatcgacggacagcgcggtgtgattgttgtggagctgcccagcacagatttcgaaagaatctatgtcgacgaggaaaagaatgcgcgacgcgttctatccgcccccattgaactaaagaagtcctcagggcgttccaagttgctgtcagcgccacagactcgtgcgggtgggagagctgtttccaacaactcgtactgcacgtttggatttcgggcctatgattctgatgaaaagcctgggttgattactgccgcacattgcctaccaaccctgcggtacgaaccgatcccgggttctggcgacactgccaccgtcgtacttgatgtagatcctgaccgacgacgctttgatgcaggtcacgacgtgcaatggcatcccgtccctgcctcgagcggttttgaagcgtcttggacgaccttcaccaaattgaatggatttaacacgattggttacctgggaaaggtcagacccgatctactgcgggaaactctggaaggactcctagtgctctgccatgcaggaacacggacaggctacagctgcggcactctcacctccgtgaacgcagagcctgaatcaaatacctgcaatttccaaagctgcacgagcgattggattaaggtggaggacctagccggcccttacgatttgctatgtgatgcaggtgacagcggcggacctctggtttcggtggatcttgatgctgtggcgatagtgacgtctgcaaagaccaacggcagcgaaatcggagattgcgactatctgatagggatgtctcttgcgaaggttcactccgccataggtgtgactgttcgttga

SEQ ID NO: 501475 - DNA, 387 bp, Stenotrophomonas maltophilia
atgaacatgccctcgctgaccgccctactcatcgccctcgtcgcgtccgccagcgcgctgcctgcgcgcgccgccgatacccccgctgcggcgaacgccgctgactgcatccaactgggcggcgaccagcaactggtgcgcgccggcgcctcgcgcaacatcctgctgcgcaatggccaggaccactatgtcgtgcatttccaggacgactgctccgctgcggcccattcgcgcaagctgagcttcttcaccgatggccagcagggcctgctgtgcgccgccgggcgcagccagctgcgcaccgacgccaaccgctgcaccgtggcgcaggtcgaaccgatcgacgaggccaccttcaagaagaaagcccgccagcgcagccgctga

SEQ ID NO: 501476 - DNA, 1479 bp, Stenotrophomonas maltophilia
atgaagggattgaagcttgcaactgccgcggtcgcgtgcggcctgatctttgtgccacccgtgttggcttctggagatcagccggcaaaagtgcttgaggatccaggtgcctacgcggaggtggttgcgctgttggagcgtgaagctgcgaaccagctgacgcgtcatttgcaggagaggggtgagctgcgacaaatcagcgtcagcatccgtctggatgtgaaggcaagatcgatggtgatcagctttgggcctggataccttcccggcccggatcgcggttacgacgagctcttcctgattccgatggcgtctacgttgaggtactacgccgagaagtcgggactggatgtgaatgatattgacttcctgtttgacggaaaaacccttgaggaatactaccccgaggatctggccgttccgccgaagacgaaagagaagtcgacgcatacatcagctttggtgtcagcaagccatggctacatcagcttgcatcccagcggagaatggaagttccagcgcccagcgcctctcggcatccaggaagacacgctgagtccactgtttggtgacgaactgcaaggattgatcgaacaacgtagcggtttgacagtgcaccgggcacgcagccgctccacggaactccatccggagtccgggaagccatgggagcacatgtcatcccgctaccacctcaaggcgcttttccccgaacgcaccgacatgtggaatgagtttccgaacagcccagagtctgctcgcgaaaaggaagaggacatacgggctcgccccaactacgcaaaccatctgggtgtggatgtgatgctgagcctgcacaccaatggcagcgattcagccagcctgcgtggaaccgaggtctattatcatcaggacaaaccgcaggacaaggcgctggcggatagcattctctgtgggatgcgtgaaatcatccgagcgcaaccgggctatcgggatttcccgattcgcgagagttcgacctcggccaggcacggcgagaaccgcatcgggaagatgccctcggtgatcgtcgaaaccgcctaccactccaatcctgacgatgtggctgccttgcaggatcccgtcttccgctcggcgtcgatgaaaggggtggaaaagggctatcgcctgtgggctacgggaaagacgtgcgagcccttggcgttgcatccgattccagacaccgatgtgcccgttcaatcggccagggatgtcgaagtccgttatgccgggaacccccagtatccgctgtcggtggagctctcgctgacgacctgttccgaggtgggtgcgtgctcctcgtcgacgaggacctttgatgatccgatgcaaccggtggtgatcaatcttgcctgcaatggcgtcggcacgggcgtcgcgcgctggagtgcgctcctgagggacgcggacggggttgcgtcggcacctgtcgagttctcgcaggcgtgcgtgcggacgtga

SEQ ID NO: 501477 - DNA, 543 bp, Stenotrophomonas maltophilia
gtgattccagtttccggtagcgtcgcggcgctctgtgagcgcatctacaatggctatgggcgatctgacaaagtcggaattccgtattttatggaattccatcatgaactacgcaggcaaaatgcgattgaattcctggtgttcaacttccgagagtacccctacgtctattcgtccgaactgatgctgggaacaccgtttgtttgggcggactttacttcccaggaatgggttgcattgctccgggctggtagcccgcggccaaactcccgtcggctcattgaggaaatttcatcgttctgcgatctggaatttttggtcaagtgcctgagattgaatgcccttaatgtatacgcggccgatccggtgatatctgatctggataagatgaatgccgttgggtacttcaagcggttttcctaccttttggagcccgaggttgacgatctgctcgatggagtatctttgattggcattaaggaaattgagcgaattcgctccaggttggtggatgagggggtattctcacctctggttgactag

SEQ ID NO: 501478 - DNA, 2328 bp, Stenotrophomonas maltophilia
gtgacccgcccggcaccgttgcgccggcgcctgctgtcgatcggcctgctggcgctgctgcttctgcccgcggcgtcggccgaagacatccgctcgccgcgctggctgccgggcagcagcgtgcgggtagccaccgctccctcgctgcgtccggtgccgtcgacgctgatcgatgcgacagcgccgcccacgctcgcccatggctacgccaacctcgtcgcccggcacgcccagctccacttcctggagcatccctatccgacgaccgccgcctcgatcctcgccgtgtgccaccacgacgccgacctggtcatggtgttcgacggcgcgcgacacctgtcgctggcctgccccggcctcaccgcctccggccgtttccgcggcggcgccacgttggtggccggacgcgctggcgagtggctgccgcggcagatgggcgagctcgacgggcaggtcatcgctgtcgttgaaggcgggccttacgccggttggctgggcgcgcatcatccgcagatccggctgaagcagatgcctgaccggcacgcagcgctggcggccgtcgaatccgggctggcggacatggcgatcggcatcgagtcgacactgcgcccgctggtccgtcgccacttcaacggacgcctgcgcctgcagccattcgacagcggattttccaccgacctgtacctgctcgtccgccaggaagaccagcagcttctccagcgcatcgacgaggcattgcggcagatcacgctggaggagcatgccggactgctccatctctgggccggacagacgctgccggcggcggccgggagcgccctggactggatgtggtcagcgcccccgcgcggctggctgttgctggcgcccgtgctgatcgccctgccgttgctgtggcgcatgttgcggcatcggcaggcaagcggcaaccggcgcagcgcgcaggccatcggggtcatcagccacgagatgcgcaattcggcgcaggcggtgctgacctcgatcgagctgctgggacaatcgcccctgcacaaaggcgagcgcgatctgcttgcggctgccagccatgccagccaatcactgcgcggcctgctgaaccgcgcactcgatttttcgcgcctggccagcggagcgttcaagccacatgcgcatccctgtgatattgcccaggtctgccggcaggcgctggaggcgatccggccgcaggcgcagcgcaagggcctgacgctgcatctggatgcgccttcctccgcgacgacactcgtcctgctggatgccgatgccgtgcgccagatcgccagcaacctgctggccaacgcggtgaaattcagtgacgtcggcggcatcgagctgcgcctgcagctcacgcccgccgcgcggccgcgggaactgctgctggaggtgatcgacagcggcatcggcatcgagccgacccaggtcgccacgctgttccagccattccagcagggcagcggcggccaccagcgcggcggaacgggcctggggctctccatcgcgcgcgagctggcccgtgcgatgggaggcgacctgaccgtgcacagcgtgctggggcgcggcagccgcttcatcctgcgcctgccgaccggtccggcggacagcggtgaggacgtcgaggacatgcccgtcggcggcacgccgctggccggcgtgcagctgctgctggtcgaggaccatgcgctcaatcgccacgtgcttgccacgcaattgcagcgctggggcgcagaggtatgtgcgctggaggatgcagccagcgccctggccgaacagatgcgccagccccgcgctgccgcactgatcgatatcggcctgcgtggcgtcgatggccatgcgctggcgcgcgaactgcgccgccagggtgggcaaccgccgcgcttgatcgcgctgtcggcgcgcaccggccgccgtcaccgcgcacgctgccgccgctcgggcttcgacgcggtgctgaccaagccactgcgcgccgcccaactgctggctgcgctcggtattgcggcgccggaggggctggatgcagtgccgccggtggctgcaatggatgcggcctatgacgcggatatccgcgaagagctgaagaagatcgcgcaggccatcggccgcgccgacgcaccctgcttgggccaccacgcacatcgcctgcagggcacgctgcagatgctggggcgacacgcgcaggcgcccctcgctgcgcagctggtcgatctggcacatgacgcagcgccggactgggccggcgcacgtcgtctgctggacctgttgcagcccggacagggttcccgcggtgcgggaaccctgcaggcgccgtga

SEQ ID NO: 501479 - DNA, 2016 bp, Stenotrophomonas maltophilia
atgaacaacggtgcgcgcatgcctcgtggacatgtcctgggcatcctggtggctctcacgctgctcgactccggcactgcactgggttccagtactgctgcttcgcagcgcaccccgccagcgagcgcgagcagggctaccgaggacctcaaccgtcgcgttctctccgaactcgatttcagtgatcgtgcagacttcgactcggccaatcgcggattgatcgctccgtttgacgggatcatccgtggcgacaagggccaagtcgtatgggacatgcactcctacgctttcctgcatgaagaagcagcgccggccacagtgaaccccagcctgtggcggcaggagcgcctgaaccgcattgcgggactcttcaaggtgacagatcacgtttaccaggtgcgcgggctggacctgtcgaacatgacgattattgagacgcccaacgggctggtcatcatcgaccccctcgtctcaacggaaacggccaaagctgcgctggatctctatcgagcccatgtagggcagctgcccgtaaaggcggtgatctactcacactcccatgttgatcactacggtggcgtaaagggcatcgtcgacgagcgtgacgtccagcggggaagcgttcggatctatgcgccggcaggcttcatggagcacgcagtttccgaaaacgtctatgcgggcaatgccatgacccgccgcgcgcagtacatgtacggcgcgttgctgcccaagggcgttcaaggccaggtaggtgcgggactgggcaaaacgacgtcgcgcgggactgtaagtctgatcgcgccgaccgatatcatcggttccggcgggcaagcggtggaaagcgtgaccattgatggcctgcagctcgagttccagctgacgccaggtacggaggcgccagcggagatgaatgtctatgtgccgcagtatcgcgcccttggcatcgcagaaaacgcaacgagaacgcagcacaacgtgctgaccattcgtggcgcccaggtccgggacccaaaggtctggtcggagtatctggaccagaccatcagccgctatgcagcacgttcggacgtggtattcgcgcagcaccattggcccacatggggtggggcggagatcaccaccttcctgtccgaccagcgggacatgtaccggtacatccacgaccagacattgcggctggccaaccgtggcatgacgccactggagattgccgacaccctgaaagaactgcccgagccgctgcggaaacgttggtacagccgcggatactacggcacgctgtctcacaatgtgagagcggtctaccagcgctatctcggctactacgacggcaaccccgccaatctcaatccgctgccaccttcggatgtcgcgcagcgttacgttgatttcatgggcggcgaatcggcagtgctggagaaggcacggcgttcttttgaacagggcgactatcgctgggtcgctgaagtagccaaacacgttgtgttcgccaatccggattcgcgcgaaggacgcgcactcctggcagatgcgttggagcagatgggataccagagcgaggcgggcacatggcgcaacgccatgttgatgggagcacttgagctgcgcgatggcgtaccgaagggcggtgccaccaccgcatcacctgacgtgctgaaggcaatgaccgtcggcatgcttttcgactatctcgcgatacgcctggacggacctgcggcggcaagggcagggaacgcgaccattgcctggatcattccagattccaaggaccgctacttgatgacgctgcggtcgggcgcgctctcctatcggccgctcgctaaccaggaccaggcagacgcgaccgtagagcttccccggagcacactcaaccagcttgtcgtgggggcacagccggcgcacgagctgctcgccgggccggccgtgaagctgcatggcaagcgatccgcagtcgagaacctgtttgcgaacgtagaaacgttcgacgtcatgttcaacatcgtaaccccatga

SEQ ID NO: 501480 - DNA, 903 bp, Stenotrophomonas maltophilia
atgagcacctgcctccgtcccctggccgcgctcgctgttgcgcttgccgcagtcggggcgcagcccgacgcgcgcgccgatggggcgcgcgattgggagaacgttcccatagataccaacctgctgttcgtctactacacgtatgcgcgcaacgaaatcgctttcgacccgtcgcttccggtagatggcgcccagattgaatcccagctgggaatcattcgctatgcgcgcaccttcgctttgggcgaccgcatcgcgggcatccaggtcttggcgccctatggcaaggtaaccggcagtatcgggggcacaccgctgcgcacatccgcctccggcatgggcgatgccacggggatctttctggtcaacgtgttcggggcgcccgcactcactccgcaggaattccgggcctgggacgcgggcgcctacctgaccgcgtccgtcgccgtgaccgcgcccacgggcagctatgaccgggattccgtcctgaatctgggaaaaaaccgctggtcctacaagcctcagttggcgtatgggctgcctctgggtgaggggacgctgctggccatcaacggcaacgttcaattctatggtgatgcggaaaagcccggagaggctgcgttggagcagaggccgctctacgggttggatctgcatctaagcagggatgtgggcgaacgggtctggctgtcgttagatgccaattacgcacacggtggcaggaccggctccggcggcgcatggaaagacaacggccagcggaccttgaagatgggggtgagtggcaattacgcgttttcgactcgagtcgggttgagcgtatcggccaatcgcaccgttctcaggcgggatgtcacgccggcagcgacgactgtgtcggtcaactgcagcttcgtgttctga

SEQ ID NO: 501481 - DNA, 123 bp, Stenotrophomonas maltophilia
atgttcgctgagttcttgcgtgagccgcttgttgttttcgtgctgggcggcgtgctgcttaccggcctttattggtcgctggtgttcgccctgcgcggcaaaggggggcgcaatggcagttga

SEQ ID NO: 501482 - DNA, 303 bp, Stenotrophomonas maltophilia
atgaatgcctggaacccggctgcggtacgcatgttcatcccggccctgattggctggtgcctggcgctggccgcttgcctgcgtaccgaacagctgcacggcgaccagcacgcacaggcgttgttgcccgtgttgcagcggggagcgttcgcgctgctgctgctcagtctggcctgcacgtttgcggcctgcctgttgctgtggcggcatggccgctgtgatcgtgggcgtatcgcctccggcacgatgccagcgcggcatccatcagcacgcgccggcatggcgcgcgctggaaggcagtga

SEQ ID NO: 501483 - DNA, 1101 bp, Stenotrophomonas maltophilia
atgttcccacgcttggccagcctcctgatcctgggcctgtgcagcgccggcgcgcttgccgccgacggcacctatcgcccgtccttccagccggacctgctgaaaggaccaccgcccggccccccgaaccaggtgatggtgctgggcagcccgcatctctccggcctgccgaagaccttcacgcgggagcatctcgagccgctgctggagccgctgctggcgcgccttcaggcatggcaaccgacggccgtcgcggtggagaacctgtccggcatgcaatgcgacttcatgcgacgcaaccccgcgcgctacgctgacagtgtcgagacctactgcatcgacccggcaccggcccacgccgcgaccggcctggacgttcccagcgccaatgccgagatggagcgcctgctcgcggattggccgaaagccccgacaccggcccagcgccgccgcctcgcggccgtgttcctcgccgcaggcgagaacggttcggccgtggtgcaatggctgcgcctgcccagcgatgaacgtcgcgccgcagacagcctgacgccggagctggtgcagttcctcgacaggcgcttggccaggcgcgacgaggccggcatgatcgccggcgtcctcgcggcacgcctgggcctggaacggctgtggtcggtggatgaccacaccgccgacacgcctgtcccgaaggaccgggagaaggcctatggcgcggcgctccaggcggcctgggacaacccggcgaccacggcgcggttcgtcgccgacgaagcgctgcacgcccacctgtccaagcccgacggcctgcttgcgctctaccgcaactacaacgctgcggacacggcgatgaccgtctaccacagcgacttcggcgcggccctgggcgagccgtcacccgaggccttcgggcgcaattacctgggctattgggaaacacgcaacctgcgcatggtcgccaacatgcgcgacgtgctcggccagcatccgggcacccgcatgctcaccattgtcggtgcctcgcacaagggctactacgaggcctacctcaaccagatgcatgatgtgcagctggtcagtacggacgccgtattgcgctga

SEQ ID NO: 501484 - DNA, 1443 bp, Stenotrophomonas maltophilia
atgacgttgcgtgcggcactgtttttcatggtcgcgcatgcgctcgtcattgccctgatcggcccgcaggacccggtgggctcgtacctgatgctgatcaccgcgccgctgctggccgcgctggcctgcgtgcggcgggctcggggcagccgccgggcagcgtgcaaatggcggacgctgggcgctgccgtcagcctgttcgcgctcgccctgctggccctgctgtatcgcaacgtggccggcctcacccctgcgcagatgaccgcttcgtcgctgatcctgtacgtgttctaccggattccactgacctacgtcgctgccagcccgggtggcggcaaccgctggatccgtgcggtggacctgttgatcatcacgctgctgtggttgctgtacttcgtgcatgcacgcgcgatggcgccgttgaacagcgcgttgtggacacactgcctgcagacgatgagcagcgtgcagaacagcctggtgttctgcttcgcgctgatccgcttcctggccgaggatgacgccgatcgtcgcgatttcttccgcgcgctgtcgatctacgcgctgggctacttcctgctggcgctctacatcaccacctggcagccgcaggtgcccgacggcggctggggggacctgctgatcagcgcactgttcgtatcgctggcggtgatggctggcagcacacgacgccgaccggcgcctggcgtaccccgcaacctgcggcgcattgtcgacgccgccgggccgctgatgctgccgttgctgttgatgatggtggcgctgctggttgcacgcctgcagccgacgctggccaccgtgggtttcatcggcgcgatgctcggctatgccctgcgcagcgtgctgacccaggtccagatccagcgcgagcgcgacgaactggcgttgctggcccgccgcgatccgctgactggactgggcaaccgccgcagcttcgatgaatcgctcggcagcgcacatggccgtgcgcgccgccatggcatgggactggcggtgctgatgatcgacatcgaccacttcaagcggctcaacgatacgtacggccacccggtgggcgaccgccgcctgcaggcggtcgcggccatcctcgacgcctgcctgcaacgcggtgatgacctgttggcccgctacggcggcgaggagttcatcgcggcgctgcccacgcacggcctggaccacgccattggcctggccgagcgcctgcgcaccgccgtggaagccgctgccctgcccgccgccgaggcccgggtcaccatcagcatcggcgtggcctggcaggccgcgcatgaccagggtgacccgcgcagcctggtcgagcgcgcagaccaggccctgtaccgggccaagcatgccggccgcaactgcgtgcacgccgccccggccgtcgaggccggggaacaacaggtcgaccgccgcgcctag

SEQ ID NO: 501485 - DNA, 804 bp, Stenotrophomonas maltophilia
atgtcgagtgttgggccggtgccgatgccggtggtgttgatcctgatatgcgcgctgctggccatggccgtggcacacctgtggccgcgacggaagaacggcatggcagtgccatctgccgcaagcatggtcctggacatgttgctggtcggcctgctgtgcggacgtatcagcttcgtggccctgaacttcgcgctctatcgtcaggccccctggagcatcctgcagatcgccgatggtgggtatcacctcccggtcgttctggttgccgcgctggcatggggagcctggcgtctgaagccctggcgcccgttgtgggtcccggtgttggcgggcgcgctggcgggtggggtgctgtgggcgacgggcagccacctgctgtcagcgtggcaggaacggcagatgccgctgccggccgtgcaggtggctgatctgcagggacgtacggtcgacctgcagcagttccgcggcaagccggtggtgctcaatctctgggccagctggtgtggcccgtgccggcgcgagatgccggtgctggcctcggcacagcagacccacaccgacgtgcagttcgtgttcctcaaccagggggaaagcctggacgaggtacagggtttccttgccaccgaacggctgcggctggacagcgtgctgctggacgatagcgcctccgcatcaacggtactgggtgtacaggcctatccctcgacgctgttcttcgacgccgagggacgcctgcgtgaactgcaccttggcgaactgaccgcggcgggccttgaacacaaactgcgccggctgcggtag

SEQ ID NO: 501486 - DNA, 714 bp, Stenotrophomonas maltophilia
atgagtgaacggcgccaacactggcaggcgattgccatcagcatcggcctgcacctgttgcccttgctgctgttgatgcactgggtggcaacgccgccgctgccgccgccagctgagcaggacgtgcgcatcagcctgcgcctgctggcaccggctacgccgccccagccggtggaagagcgccaggccgacacccccagccaggcgcagcaggcgcgcgcgtcgcggccaaccaggtcgcccccgccaccgaagcccaccaccgcgcgcgagggagagttgaccgccagcgcacgcggcggttccggcgagcacgccctgccccccgccccggcggcgaccgtgaccgatacacctcccgtgccggcatcgatcacggccgcgccgcccactccggacgcaccaccggcggacgtccaggccggcgccgccagcgaccagtgggacgcccgcctgatggcgcggctggagcgctaccgctactaccctgccgccgcacgcgcgcgccgccagcagggaacggcctgggtcagggccagcatcggccgcaccggccgcctgctgtcattgcggctggagcagtccagtggccagccggagctcgacgcggccgcgctgcagacgttccgccgcgcccagccgctgccgcccattcccgatgaactgaaggcaccgcaggaacgggtggtgccggtggagtactacctgcgctag

SEQ ID NO: 501487 - DNA, 744 bp, Stenotrophomonas maltophilia
gtgcgcgcgcagccactgcccggcacggtgatcgatctggccagtggccagcgcctggacgaagccgcgttcgtgaagcgcgcagcgaatgcaccgcgactgctgctgggcgaacgccacgaccaggccgctgaccacgctgcccagcgctggctgctgcaggcgctgcaacagcagcgtccacacggtgcgctggtgctggagatgatcgccagcgagcgccagccgcgcctggaccgcgtgcaacgctggctggccaagggcaatcgtgccgacggcacgcgcctgcaggaacttctggactgggatgcacgctggccgtgggctgcctatggcgggctggtacaggacgccaccgcggccggcatccccctgttcggcggcaacctgtcgcgtgccgaggtcaatgcgttgctcgcctccaacgcctcggtgcggttcccgatgcccaccgcccggcaacgcctgtcggtcgtggtgctggcccagcacgcaggcgcagcaccgatgctggaaggaatgctggccgtgcaacaggcccgcgacatccgcatggcacaggtaatggccgcagcccctgcacccgcgctgctggtggccggccgctggcatgtactgcgcggtaccggcgtgccgggctacctgccaccggacgcaccggcactggtgatcgcgcttgcgtcacccggtgaaaccgtcgatgcggccgacgccgacctgctgtgggtgctgggcgatgagtga

SEQ ID NO: 501488 - DNA, 387 bp, Stenotrophomonas maltophilia
atggaaaccaccgcagaacatgaaatccaccacctgcatgacaagctgcaggcctggttccgtgccgacgtcggcaccgacgcgctgggtgatctgatggcgcatttctgcgcggacttcagcatggccggcatcgccgggcgccgattggatcggcaggccgtgcaggcgttgttcgccagtggtcacggcgcgcgccccgggctgcggatttccatcgacgccgtgcaggcggtggatgcgccgttgccgctggcggtgctgcgctatcgcgaagggcattcgatcgatgacggccagcccgcgtggcgcgaatcgctggcggtgctgaggcaggaagagggtcgctggcgctggctggcgctgcacgaggtggtggtggcctga

SEQ ID NO: 501489 - DNA, 1095 bp, Stenotrophomonas maltophilia
atgacgacccctgccgccgatctgctgttcacgcccacccgcctcggtgatatcgccgtagccaaccgcatcgcgatggcgcccctgacgcgcaaccgtgccctgcccgaccgcgtgccctcaccgctggcggtcacctactaccggcagcgtgccagcgccggcctgatcatcgccgaggccacgcagatcagcccgctcggccagggctatctggacaccccgggcatctacagccgtgaccaggtcgccgcttggaaaacggtcaccgatgcagtgcacgccgagggcggacgcatcgtgctgcagctctggcacgtgggccgcatttcccacaccagcctgctgccggaaggcgaagtgccggtggcgcccagcgcgatccgtgcccagggcaagaccttcaccgccaacggtttcgaagatgtatccgagccccgcgcgctgggcatcgaagagatcccggcgctcatcgaggacttccggactgccgcccgcaatgcgatcgacgccggtttcgatggcgtggaagtgcatgcggccaatggctacctgatcgaccagttcctgcgcgacggcagcaaccatcgtgacgatgcctacggcggcagcatcgagaaccgcacgcgcctgctgttcgaagtggtcagtgcagtagccgatgccatcggcccgggccgtaccggcgtgcgcctgtcgccggtcacgccggtcaacgacgcgcacgacagcgacccgcagccgctgttcaatcgtgcggtggaacgcctggatgcgattgacgggctggccttcatccatgtcatcgaaggcgccaccggaggcgaccgtgacaatatcgcgttcgactatgcgggcctgcgcgctcgcttctgcggccggtggatcgccaacaacggctacgatgccgcacgcgccggccaggccgtagccagcggctacgccgacatggtcgccttcggccgacccttcatcgccaatccggatctggtcgcgcgcctgcgtaccggtgcgccgttggccgagctggatgcggacacgctgtacggcggcggcgaacacggctataccgattacccaccgttggaccgctga

SEQ ID NO: 501490 - DNA, 624 bp, Stenotrophomonas maltophilia
atggcatggcaggggcgatgcttccatggtgggcgaatgacccacagcgcccctttcctccctcttgacccgctaaggcccgtgctgcgccgccatctgctgcacctgcaggccgcgcctgtcaccctgcgttcgttccagcgcaccgacctgccgcgctggcgcgtcttcgatgaccgccgccagcgcgtgcagcgacatgcgcccggcgtcgacgaagaagcacgcttccttgccagcgtctatcgttcgcgccttcagcaggacaacgatctgctggtgctcggcgtattcgatgacgccgagggcgccctgctcgaccagctgcatgtacgcctgcactccctgcactcgcgctgcgccgagctgcactcgctgcagcacggccaggcccatccgcaggccgcgttgcgggcgctgtgcccctttctgttcgacgacgtcggcctgcaccgcctcttcgtgctgctgccaccgggctgcacctccccgttcgcccaggcgctgcaggcccagggtttcagctgcgaaggcatcctgcgcgaccaccacctggatgcggccggatggcatgaccgccagctgctggcgctcaccgcaaccacatggcgcaacggccggtag

SEQ ID NO: 501491 - DNA, 1161 bp, Stenotrophomonas maltophilia
atgaccctccagttcgtccatggcggtgtcgaccgcgacggtgcgccgctgcagttccatatccaggacgggcgcatccgcggcctcggcagcgatgcagtgccggccgaaggggccgaacacatcgacctgcacggttttgcgctgctgcccgggctggtcgacggccacatccatctggacaagagcttcgtcggggaccgctggcatccgcaccagccggtgaacagcctgcgtgagcggctggcggtggagaaggccgcgatggccggcgccgcgccgatggtggaccgcgccgaggcattgatccgccaatgcagccgcttcggcaccgtggcgatgcgctgccacgtggatgtggatggcagcaccggcctgcgccatctcgaggcggtccgcgaagcggcgcggcgctgtgccgacatcatgcgcgtccagctggtggcgttcccgcaggccggggtaatgtcctgcccgggtaccgccgccgtactggagcaggcgctttccgcgggcgtggaagtgctcggcggcatcgacccgaccacgctcgacggtgatgccgaaggccagctggcgctgctgttcgggctggccgagcgccatggcgtgcggctggacatccatctgcacgagcccgctgaaaccggactggcgcagctgctgcgcattgccgcgcgcacgcgtgctgccggcctgcaggggcgcgtggcggtcagccatgcctattcgctgggcgatgtgccgctggcgcgcgcactgcaggtgggtgaggcgctggccaccgccggtgtcgccatcatgagcaacgcgccgggcgatcatccgttcccgccactgcgtgcactgcacgatgccggcgtgcgcgtgttcgcgggcaatgacaacatccgtgactgctggtggccctacggcaacggcgacctgctgcagcgtgcgatgttgctgggctaccgctcgggcttctacaccgatgccgacctgatgctggcgctggacatggtcaccacgcatgccgcgcaggtgatcggcctgccgcagcatggcatcgccgaaggcctgccggcgaccttcgtcgccgtacgtgcggaccacggcccggctgcggtggccgcggtaccggtggagcgccgggtggtggtcgacggccgctggctgtag

SEQ ID NO: 501492 - DNA, 411 bp, Stenotrophomonas maltophilia
atgaccgcttccgcctacccgcacctgttcgccaccctgggcgaggccgccacgcgcctgcccgatgacctggcccgcacgctggaagacaccttcgttgcgctgcagaccggtcacagtcctggcgccatcaccctgcaggcctgcctgcagtacatccgccaaggcgatgccgccgatggccagccgtggcccggcagcaaccgcacaccgggccagcgcctggccttggcgcgcatcgaccgcgccaatgcagggctcagtttcctgctggaactgctgcacgccaccgaacgcgtccgcgtggacggggatatcgaccagcacatggatgacggcgcgcgcgaagggctgttgctggcctgccgtgggctggccgaatatgtggatgtgcagttgcgggcggcgtaa

SEQ ID NO: 501493 - DNA, 771 bp, Stenotrophomonas maltophilia
atggagatcaacccgagcttcaccgggctgaccgcggtcggcaccgtgaactaccagggcgagacctatgtgacctatcagttcagcccgacgtctcctctgctgatcttcaggcacgcagggtacgcgggaggtggcaccggtggctccgggttccactatacgccgctgacgattggtacacgggtgagtatcgagggacttcgacggggcaccaacttagcgatcaactccacgttccatgtcgcggtagtctcgcgcggtggtccgatgcaggcagcctcggcgagtctcggaacgggcaccacgtggctgcgtgatttcccatcgctcgtcatgcagcaccccattcgcgttactctccagctccgtaatccaacctgcgcgctcagcgatgccggtttcagcatgaacgatgtttccgccgatgtactggacgcagcgggcagtagcagccccgagcagacgttccaggtgaagctgcagtgcgaggccgctggcgcgccgttgaaactgacgctgaccgacgccaatgcgcctacggccaccggcagcctgttgaggcccacagccaatgccaccgcgcagggcgtccatgtggaactgctgcgcaatggcgtgccggtggtgctcgggcagcagtggaaccacggcgtgtctggcgcgggtgcgcagagcatcgatctgcaagcgcgttatgcgcgggtggccggcacgttcaggatcggggtggtggaagggcaggcagtactcaccgccgactatcgctga

SEQ ID NO: 501494 - DNA, 504 bp, Stenotrophomonas maltophilia
atgaaatcctcctatctcatcgcatcactgctcatgctcggtgttgccgcgcaggcccatgccgattcggccaccatcaccgtcaccggcaaggtgctgcctggcacatgcaccatggccaatgtgccggtgacgctggccgatattgatgccaccgatctcaagaccgggcatgacaacgggttgaggccggcggtgctgaacttcaccggctgcgtgggcgtgaccagcgttgatctgacctttgaaggcaccgccgacgccgcgcaggacggccactggctcaaccaggccaccggtggcgccaccggcgtggccgttgcgctgctggatggcaccaccggcaacgatttcctgcagaagggcgcgaagaagacggtcgccgtcaatggtgccgccaccgccaagctggacatgcgcgccggctactaccgcaaggccggcacatcgctgaaagcgggcgatgtcagtacgcagatcactgtgacggcggattacaaatga

SEQ ID NO: 501495 - DNA, 2556 bp, Stenotrophomonas maltophilia
atgcgcctgacttcctccccctgtcaaagcggcgcgcagcattccctgcgccacaccgcgctggctatggccatcagcaccacgctggtgcttgtaggcgggctgcctgcgcacgcgcgcaccggtggcgaagtggaattcagcgaaggctttgcgaccggcttcggcagcgacgacctggcgcgcttcagcgtgggcaacccggtcgaacccggtcactacaacgtcgatatccatctcaacggcgagttcgtgcgccgcgatgacatcgaacttgtcgaatccgatacgccctatgtggcaacgccctgcgtgcccgcgcagctgctgcttgcactgggcctgagcgatgccgcgcgcgacgccgtggaggcgtccgggaacccgcagtgcgtcgatctgcaggcaagcatcaatggcgcacgcgtcacctacgacgacagccagttgcgcttggacatctcgctgccgcaggtggcgctgcaacgccaggcgcgcggcttcgtcgcaccggaattgcgcaactacggcatcaccgccgcgttcattggctacaccgtcaaccactaccgcagcctgggccagcagaacagctacgccggcattaccagtggcgtgaacctgggcgcgtggcggctgcgccaccgcagttccatcagccacaacgcgcagggtacgcacttcagcacgctcaacagttacctgcagcgcgacctgccgcactggaacagccagttcactctgggccagagcaacaccggtggcgagcttttcgacagcgtcggcttcaccggcgtgcgcgtggccaccgacgagcgcatgctgccggattcgctgcgtggctatgccccggtagtgcgcggcgtggcgcagagcaatgcgcgggtcaccatccgccagaacggcgcggtgctgtacgaaaccaccgtagcgcccggcccgttcgccattgatgatctctaccccaacgccggcagtggcgatctggaagtggccgtcaccgaggccgacggccgcgaggagcgctttaccgtcgccttctccgccgtgccgcaggcgctgcgcgaaggcagccagcgcttcagcatcaccgccggtgagctgcgcaacacgggcctgtaccagcaggcgctgcgcttcaccgaaggcacctatgcgcgtggcgtcagcaaccgcatgaccctgctgggcggcgtgcaggtggccgagcactaccaggccggtctggcaggcgcggcgttcaacacgccgttcggcgccatcggtgccgacgtcacctacgcgcgcgcgaacgtgcccggcgcgcccgcacaatcgggccgcagctaccgcctcaactaccagcgcagcgtggcgcgcaccggcaccaacctgggcctggctgcgtaccgctacagcaccgaaggcttccttaccctcaccgacgtctcgcagctgtcgttcgaccggccgcaggccgccgatgcgttcgtcatgcgcacccgccagcgtttccagatgaacttctcgcagcgcgtgggcacgcgcggccagctgtacctggccggtggccatgtgacctactggaatcgcgcgggcaagcacaacgacctgcagctgggcttccacagcagctaccgcagcgccaactacacggtttccgccacgcgttaccgcatggccagtggagcgcccgatacgcgcctttcgttcatgctcagcctgccactgggacgcgccaccaacgcgccgcgcgccaccgctacgtacaacgacagccgcttgggcagccagcaagagctgggcatccacggcaatctgggcgaggcccgcgcgctgtcctacagcctgtcgggcaatcgcggccagggtggcagcggctacaacgcctatgccagctaccagggaagccgtgccgatgtgagcgcgggcttcggccgcaccaacggcagcagcagtgtcaacgcgggcgccaccggcggcgtggtgctgcaccctggcggtatcaacttcggcccggcgctgggcgacagcttcgcgctggtagaggcgcagggcgcacagggcgccatggtcggcagcggccgcaacgtcactgtggcgggcaatggctacgcggtgctgccctataccagcccgtaccgatggaaccagattcatctggacaccgcccacctgccgcttgacgtcgacgtacagggtagctcgcagcgtgtggcacccagtgccggcagcatcgtcaaagtccgcttccagtcacgcaacgatcgcgtgtggctgatcgatgccagccatgccgacggcactccgttggcttacggcgcgcagatcaggcatgccgatgggcacaccctgggccaggtggggcaaggcggtgtgctggccctgcgcggactggagccggccggcttcgtgcacgtgcagaccgaagacggcatggcttgccgactgcactacgccatgcccgaggtgccggacggacacggccagtactgggcgcaggcacgctgcgtgaccattccgtcggcactgcgggttgacgacgcctcttcttcaacttctggagcttcccaatga

SEQ ID NO: 501496 - DNA, 513 bp, Stenotrophomonas maltophilia
atgaagagcctgaagaccccgatggccctggccgtcctgctggccgctgccccgaccgttaatgcggccgacctgaccattaccggcgagattgtcgagaccacctgcactgccaccatcaacggtggcgttgccgtggcaatgggcaagatggatctggaagatctgaagagcaatgaccgtatcggccgtcgcgacctggacgtggccgtggcctgcccaggcgccgctggttcgcacgatgtggcggtgaagttcagcggttcatcaacagcagatggtggtcttgcactgacggcagccagtgacgccgaaggcgtggcgtacaagatctatgacagcaccgatacgctgctgaagatcaacagcgcaccgacgcagttcgtcactgtcaccgatactgcaccgcaaactgtgaagcacagcgtctggtacaccaagaccggtgctgccgccgatgtggtggccggcacggccaacgcaaccgcgcagatggacatcgcctacaagtaa

SEQ ID NO: 501497 - DNA, 714 bp, Stenotrophomonas maltophilia
atgaaaattcgcgcatgcgcgctggcgctgatgctcgtctgtacaggccacgctttccccgccgcagcggcagtgactctgcagggcacacgcgtgatctacgacggcagcaagggcgcggtgacggtaaacaccaacaaccgcggcgacaaagtcgcccttgcccaggtgtggctggacgatggcgatgccagcgccaaggccggcagccagaagctgccattcgtgctgacaccgaccacgcgccgcatcgaggcgggcggcgcacaggccttccggctgacgtatgcgccaatggccggggcggcactgccgagcgaccgcgagtcgctgttgtatttcaacctactggacataccgcccaagcccgagaacgtggaaggccagaatctgctgcagttcgccatccgcacccgggtgaagctgttctatcgccctgccggcctccccggacatgcgcgtgacactgccgcagcactgcaatggcgtgccgaggggcaagccctgcaggtgtacaaccccgggttctaccacgtgacgctgagccgcctgacgctgcccgatggcagcacgatcgaggtggacatggtggcaccgggtgagcgcttggacctgccacttccgtcgggtgcatcggtgccgggaaccttggaattccagtggctggacgactacggcaccacgcgcgatgcccaggcaaaggtcattcactga

SEQ ID NO: 501498 - DNA, 450 bp, Stenotrophomonas maltophilia
atggatgagcgtcatcacaaacgctggatggccattgccggcctgctggtgggcctgcccgtcgtggcggcaggcggcacgggggccgtgctggggctgatggtcgtctgggagggcaagtacctgacgggcgacgagtacaccttgttgctgctgtggtcgtcggccggcctcatcggcctgctgtcatggttgtggctgagcggcctgttcctgtggcgcggtgttgccggcctgcgccaatcaccggctgtggcctgggtcggcctggcgctgggcagcctggccgcgtcgggcgtggtcgtcgccacgctgtacttcactatcagcaatggcgagatctcgaccttgggccttctcgggtttggtccgccgctgctgctgatggccgggcacctggcctggctgcgctgggcacgcgccgcatcgccgccacccgcatccggttga

SEQ ID NO: 501499 - DNA, 456 bp, Stenotrophomonas maltophilia
gtggatgagcgccgcgcccggtatctgtatgccgtcctggcggtgatcttcggcctgcccagcctggtggcgggtggtgccgcggcgacgatgctgctgctgacggggctgggccagttcggccatggcacgctggccgcggtgaccctgatgccgctgtggggcctggccggtattgccggctgcctggcctggttgtggctcagcgccgggtatctgctgcagggacgtgccgggctgcaggtgcatcgcctctggtggtggatgctgctggtcggcagtcttgccgccgtgcccctgctggggctagcgctgtggtggagcatcaccgtgcacgccgaaggcatcgccctgttgctgctgggcccgtcgatgctggtaccggccgcgaggctggtgtggatcaaacaccgcggccgggcacagcccatcgaaggaaacggaacgcatggatga

SEQ ID NO: 501500 - DNA, 798 bp, Stenotrophomonas maltophilia
atgaaacgtgaacagatcagcctgcgcaccggcttcctgctggcgttggccggttgggccgctgccgtctggctggccaccggcttcgggctgggcagccatctgcccggtgccggcggtgatgccgacgccgcgcctgcgctgccgtcattgccgccgctggcggccgagcgcatggccagcgccgacagctacagcgcaatcggcgagcgcccgctgttcgccgaagaccgcaggccgcgcccgtacctgctgggtggcagcgaacccgcggccagtgccgcgctgcgcctgaccggcgtgctgttgaccggcgacttcggcatggccaccttcaccaccgagcagaaccgctcgctgcggctgcgcctcaacggcgaagccgtggacggctggcagctggtggcgctgcagccgcggcaggcgaccgtgatcggccccggtggcaaccaggtccttgaactggcggtgttcaacggccagggcggagagccgccaaccgtgctgcggggtgccaatggcgcggtgccgccagcgccgggcagcggggcaccgccaccggtgcagccccccgcagcgccggtcgctgcaccggggggcagtgcacagcgcagtaccggcaatgccgctgccgccgccgcgccggccgcacccacgaacacgccaccggccaacaccaacgggcccagcgaagcgcagatgcaggccatccgcgaacgcatccaggcccgccgtcgccagctgcagcaacagcagcaacaaccgtcgccgcccccgggcgatggcaccaaccgatag

SEQ ID NO: 501501 - DNA, 1122 bp, Stenotrophomonas maltophilia
atgaccctgctgttcccgttgggcctggccgcgctcgctgcagggttgctgccgctgctgatccacctggcccgccgccatccgtacacgccactggatttcgccgcgctgcgctggctgcgcgctcagatccggccgcgccagcgcatccgcttcgatgactggccgttgctgctggtgcgcctgctgttgctggccgcgctggcagtactgctggcacgaccagcgttgaccgggcctgcgccagcccccactgcgtggacggtcgtggccccggggttggatgctgcggcgctgcgcggcaccgccgacgagggcaactggcattggctggcccccggcttccccaccatcgatcaggcgcccggtgcatccagtgcgtcgctgcccagcctgctgcgtgagctggacgcgcagctgcctgcgggcaccccgttgaccgtgcatgttcccgaccccttgcccggcctggatggcacccgcctgcaactgtcacgcgacgtgcaatggcacccgcagccgatgccggtcactccttcccggacggccgtggccattccgcggctgcgcgcgcacgacggagcgtccgccaccgcccagcactggttgaatgcactgcagcgcgcgtggggcgcgggggcgctgcccacatcgctgccggcgcagaccctacccgagcgcggcgagatcggcgtctggagccgcagcgacgcactgccggcggaatggcaggcatggctgcgcgccggtggccgggtgatgactgccggcaagcctgctgccgacgcccgcatcctcctgcgcgatgccgagggcgcccccctgctgtggcagcaacgcgtcggccacggggtcctgctgtctctgcccggcgactgggatgcctcgggcaacactgccttgcgcgatccacaggtgccgcgtgccctgctgctggccctgcaagcgcccccttcgccgcgcctcggcgatgcacgtgaccaggcgccgcaccgggccgcattgcctgctgcaacaccaccgctgcgcgagccgacgccttggctgctgctggccatcgtgctgctgttcgcgctggagcgctggatggccagcagccgccggcgcagggtggccgcatga

SEQ ID NO: 501502 - DNA, 1809 bp, Stenotrophomonas maltophilia
atgaacaccgccggcctgaatctgtggatcgcgctggcactggccctgatcgtggtcatcgccagcgtgcgccagctgcgtggcagcaccgcgtccccaggccgccgatggtggctgatcgccctgcagatcatcgccgccgcgctgctgtacgtctgcctggtgccgctcacccgccagcaacccgccagcggtctggtcgtgctcggaatcgatgccggcaaggccggcgcactgccggccagcgaaggcccgctgctgctgttgccggaagcggccgatgtgcccggcgcccagcgcgtccccgatctggccaccgcgctgcgcctgcacccggcctccacgctcaccctggtcggtgccggcctggccgcgcgcgatcgggacaccgcgctgccaccggacgtgcgctggcagccggcgccgccaccacgcggttggatcgcgctgcgaccaccggccgacgtcgcgcccggtgcgcgcttcgaggtacgggcgcaggcgcgcggcgctgcccgggcgaaggcggagctgctcgacccggccggcagcgtcgtcgaccgccgcgatgttgcagcagatggtcaggtgcagctgagcggcgttgcccgcgccgaaggccgcagcgtgttccagctgcgcctgcttgatgccgacggccatggggtggacagcgtgccggtgccgcagcagaccctgccggccgcgccgctgcgcctgcgggtgcgcgccggtgcgccggggccagaactgaagtacctgcggcgatgggcggccgatgccggcatccacgtgcaggtgcaggccgatgtcggcgccggggtgagcgtcggcgacggtgcattgccgctcgatgcggaatcactggcacgcatcgacctgctggtgctggacgagcgcagcctggccgcgttgagcacagcccagctggccaccgtgcgccaggccctgcgcgaaggactgggtgtattggtgcgcagtggcggcacgccttcggccagcgcgcgcctgcgcctgcgcgaactggggctgccggtgcagggcgatggcagcagccacgcgctcgaacttcccggcgacggcgacagcgcggtgctcgcggcacgacgtggcccgctcgccgcaggtacgctgccgaccggctacggcgaagaggcggaccgcagttcgcacagcgccgccctgcccacgctggaagcactggcgctgcaggcgccgggcagcaccgcgctgctgcacgatcgcaccggcagggcggtcggcggctggcgcgctgccggccggggccgcatcggcctgctgccactgaccgacacctggcgctgggtgctggcgggccgcgacgaccgccacggcgagctgtggagcggcgtggttgccacgctggcgcgtgcgcaaggcagcgccgatgcgctgtggtcgccacagccgatcagctgggccggcgaacggcaggcgctgtgcggcgtgcaggcaccgctgcaggccttcaacgcacgcggcggcggtgtgccgctgatcgtcgaccgcaccacgtcagacctgcgttgcgcgggctggtggccgcgtgaggcgggctggcagcgcctgcggcacggtgagactacggtctggcgctacgcattcgacccgaaggacgcgcccgcactgcaccggcaggcgatgatcgaggccaccacgcaggcgttggcctcacgtaggtcggcgaatacgacgctcatgtcgccggtgccgggctcacgctggcccgggtggctgggattcgtgctgtgcgcatcgctgctgtggtggctggagcggcggcgctga

SEQ ID NO: 501503 - DNA, 2409 bp, Stenotrophomonas maltophilia
gtgaatgccgccggccgccgcgccgtcgccgctgtcatgacaatgctgctgctgcccggcgtcgccactgcgtccagctgcacaagcccgttgcaggtggcatggcgctccgatcggccgccgctgtcctacagcgtgcagggcgacctcgcgggattggctgcagactatctgccgctgctgggcgagccggcggcgacggatgccaggccgctggctgctgcggcgctcaccgagggccaggtgccggccggcacccaggtgctgttggggtggccgcaggcacagctccccgccggatgggtggccagcagggcctacttggaggtgccacaggtgatcgtgcggcgcgagagcgcggcagccgtgctggggctggaggacctgcatgggcgcagcgtggccagtccggaccggctaccgctggaggcactgctggccgagcaggctccgggcgcgcagctgctggcccctgcgccgctggaccatgcgctgtcactgctgcgcgccgggctggtcgatgccgtgatcgccaatcttgctgaagtcgaagccgcgctccgtgccgggccgggtgacccgctggtgatcgccgcaccggcgggcttcggcgatgccctggtggtggcagcggtgccggcctgtgccggggtgatcgctgccttcgaccggcagttgcggcaggaggacgacgcgcatcgcgcatccgagcacagcgcgtggcggccggagcggccacgggcacaacccgccggcgcgacgctgcgttggctggtgccggcgtcgctggtcctgctcgcgctcgcgctggtccatgccttcggctattggcgcgtgcatcgtgagagcacccgccggcgcgtgctggagcagcgcttgcaggaggtcaccgcgaacctgccggcggtggtctaccaggcccgccgctcgccgaccgggcactacagcctgacccagatcgccggtgatgtgcaggcgctgttcggggtgagcgtggagaccgcgcggatcgatcacttccagctgctggccgccgtccatcccgacgaccgcagccgggtgatggcctgcatcgaagctgccgcgttggcgcgcggcccgatcgacgtcaccttccgcacccggtcggcgcagggctggcgctgggtccgctcgcaggggcgtccgttgccgtgcgatgacagcagcgtggaatggagcggttactggatggacgtcagcgaggcacaggcgcgggcgacggcgctggctgatgcacgccgcgcagccgagcaggcggcgctggccaagagccatttcctggcgaccatgagccacgagatccgcacgccgatgagcaccctgctgggcatgctggagcggttggcgggcgggccgctcgacgcgggccagcagcaggtgctgggcacggtggcggatgcggcgcagatgctgcggcagatcctcgacgacgtgctgcacagccagcgcctgcaacccgccccgctgcagctgcgcccgaccgacctggcggcgatggtgcgggcggtgcagcagctgctggcgccggtcgcgagcagccggggcctgcaactgcacagcgagatcgacccggcattgcaggcctggtcgctggccgatgggctgcgcctgcggcaggtcctgttcaacctggccggcaatgcactcaagttcaccctgcaggggtgcgtggtgttgcaggtccgcgtgctgcagcagcgcgagggcggccagcagctgcgcctgcaggtgaccgacaccggcgtgggcatcagcgtggaacggcaacaggcggtgtttgccgcctacgagcaggccgaggcgtcgaccacgcgccgtttcggcggcagtggcctggggctgtcgatctgccgcgagctggcgacgtcgatgggcgggcgcctgcacctgcgcagcgtacccggcaagggcaccaccgtgtggctggagctggacctggcggcctgtgcggcccccgcggcgggaccggcgacggcacgggccgcgcaacgaccgctgccaccggcgcgggtgctggtggccgaggatcatccgaccaacctgcagttgctggcacaacgcctgtgcgagctgggactgcaggtgcacgcctgcggcgacggcctgcaggcctgggaggcctggcaggggcagccgttcgacctggtgatcaccgactgccacatgccgcacatggatggcttcgcgctggcccgggcgatccggagcgacgcctgcgccacccgtgcgcgggtcccgatcattgcgctgaccgccagcgtgctggagcgcacccgtgaggcctgccgtgatgcgggcatcgaccatttcctggccaagccgctggaggcgcgcgaactgcgcgcgctgctggacgcgttgctgctgccggactcagtgcgccagtag

SEQ ID NO: 501504 - DNA, 822 bp, Stenotrophomonas maltophilia
atgtatcgcagcacctctttgttcatcggcctgttgttggccgcgtccgccgtacccgccttcgctgcgccacaggtgcgcgatgcgccgcgcgtgatcggcggcgaagcggcactcgccggcgagtacccgttcatggtcagcatccagggcatcttcgacggcgattcggatcatgaccgccacttctgcggcggaacgctgatctcaccgtcctgggtgctcaccgccgcgcactgcctgcagggcgagcagccgatggggttggcggtgctggggggccaggccacgctctccaccggtgccgcgccgcgaccgtccaacgtcaaggcgatccacgtccatccggccttcaacagcggcaattcgctcgaacacgacgttgcgctggtccagctgagcgcgcccctggagggcgcacagccggtggcactgcggctgcggcccgacgccagctacctcaagccgggccgcgagttcaccgtgatcggctggggcgacaccgacatcggcgatggccggatctaccccacccagctgcagaccgcgcaggtgccgttcgtgtccttcagcgactgccagcaggcctacagcggtgaactgtcacgcggcaaggtgatctgcgccggccgtgaaggcgtggacagctgccagggcgattccggcggcccgctgctgctgcgcctgcgcgagggctggacccagttcggcatcgtcagctggggcgaggggtgcgcgctggccggctatcccggggtttatgcccgaatcgccgaaaaacatgccgtagatttcattgaggcggtttggcaacgagactga

SEQ ID NO: 501505 - DNA, 528 bp, Stenotrophomonas maltophilia
gtgcatcccattgaaagcgaacgcctgcgcctgcgccggatcgatcctgaccgcgacgcggtgccgatgctggccttgttgaatgaccccggcttcctgcgtttcatcggtgaccgcggcgtgcgtacggcgcaggaggcacgcgactacgccacggcgcgggtgctgccggcctatgctctgcacggctacgggatgtatgccatcgagcgcttgtccgatggcgcgtggctgggcaacgccgggctggtgcggcgcgatggcctgccgggaccggatatcggctatgcggtgctgtccgaattcgccgggcaaggctatgccggtgaggcggcgcgggcggtgtttgcctatgcgcgtggcgagctgggcctgcgcgatctgtatggcatcaccgacctggacaacgtggtgtccggaaagatcctgctgggcctgggcatgcaggagcgcggggtggtccagctgccgggcgtggacagcccgagccggctgtatgccacgccgggtgcggccgacgtcgggtag

SEQ ID NO: 501506 - DNA, 903 bp, Stenotrophomonas maltophilia
atgatgcgtgggttgctcccggtcgccaccacgctggcgatgatcctgtcctctccctgtgccgccggggtatctctggaggagggctatgccaccgtgcagggaacgtgggaaagtctctcagggccggaccatgactggcgtgagcgcggagcccaggttgatcgtgcgtttgacacgggtgttttgcctcataccgctacgctgtcccgcctgagcacacccgacctgcgggtactgttgcgggcgacccacgcggccgccgtggcaggcaagcagccgcactactcggccattgcactgagcgtgggggtcgagctccgcaagcgtggtgaactgcagcctgctgacgcacgcgccggagcgaccattgccgttctgagccgtgatgccgctgcgttggccccggtatcgccgtggcgggccgctttcaatggccgccccgtgccccggtggccgcgcgtcaccaagccgttcgagtactggacgcccagtgcggatggcgcgagctttcgcgcggcgcacgccgacatggcgtcgttgaagatcattgtcatcgcgcatccagcctgcggcttcacgcgtgcggtggcagaagcggcgcgcgccgaccccgacgtgttgcggatactttcaggaagccgcgcgctgtggctgtccccgcaggacgggacgcttgatctgcgcatcttcaccgactgggccgaacgccatcccgatctgccgatccaggtcgtggcccgccagacggactttgcagacttcggctactggggaacacccaccttctacatcctgcgcgacggcagggtcgccgcgcgggtggtgggttggccgcgcggcggcaacaaagcagccctgcagaaggcgttcgccgacgcagggatcgccgcagagccctga

SEQ ID NO: 501507 - DNA, 723 bp, Stenotrophomonas maltophilia
atgtcgcaaatggacacacccgcactgcgggcagcggtcaagaagtgtgagcggcggcaagaatatgtctcagttgccgtgaacccgagcccgtgtcgatgcgctcggatggaacaggcgtacaaccgtagctaccggaatcttccgggcaaccggggtactgcaatgaagaacagaatgtcgcggatgaccgtaggcttggccatgctcgtgctgtcgatacaggcatctgcgggggtgaacgctgctgaagcagcaacaacgacgcttccggacgaccagcacctgcacctggagaagcggaccgcgtcgatcaccgatcagcgatcattcgacgcgtatgcaaaggcattcggggacaccgatacgtttcccctttacaaaatgacgcctgcagcgcgcgcgcggttcaccgcatcgctacggttcagtgcgctcggactgaccaccttcgattactccgatctggcacgggaactgggagcggccgatctccatcgcgtactcaaaccgtttgggttccagcacctggtggcggtcattcccgatgtcagggtcaattcggaagaagaccaacgggttctgcagatacagaacactgcgcgcagcctgcgttgtagcgtgggagaacattgcaacgaggcagactatcctggctacaagtgcatctcgcacgcgacatgcgaggaatcaacggcacacatatgcacgtccaactgctga

SEQ ID NO: 501508 - DNA, 1161 bp, Stenotrophomonas maltophilia
atgtcctgggatgcgatcatcatcggcggtggccacaatggcctggtctgcgcggcctacctggcacgcgccggaaagaaggtgcgggtgctggagcgtcgtggcgttctcggcggtgctgcggtcaccgaggagtttcatccaggcttccgcaactcggtggcgtcatacaccgtgtcgctgctgcaaccgaaggtgatcgacgacctgcagttgcatgcgcatgggctgcgcatcatcaatcgcccggccaacaacttcctgccattgcccgacgaccgctacctgctgtcggcaccgggccgcacccaggccgaagtcgccagattttccgagcgggatgcgcagcgcctgcccgcctacgaagcgcgcctggagatgttcgccgacgtgctccgcgcatgggccctgcgtgcaccgcccgatctgggcgtggccggcggttggcgtgccctgcccgcgctgtggcagatgggccgcctcggccgcgaactggcggtgctggatccatcgctgcggcaggaactgctggacctgttcacgctgtcggcggccgagtacctggaccgctggttcgagagcgagccgatcaaggccctgttcggcttcgatggcattgtcggcaactatgcaagcccgtacacaccgggcagcgcctatgtcctgctgcatcatgtgttcggccagtgcaatggcgtgaagggtgcgtggggccatgcgatcggcggcatgggcgcaatcagccaggccatcgccgccgctgcacgcgctgctggcgcggaactgcaggtggacgccggcgtgcgacgcgtactggttgaacacggcagtgccgtgggagtggaactggccaacggtgaaatcctgcgtgcacgcgcggtgatcgccaacgtcaatccgaagctgttgtacgagcagatgctggccccggcacaggtaccggacgcgacccgcgaacgcatggcaaactggcgctgcggttccggcacgttccggatgaacgtggcgctgtcgcggctgccggacttccgcgccctgcccggccccggcgatcacctcagcgcggcatcatcatggcacccagcctggactacatggaccgcgcctggctggatgcgcgccgcgacggctggtcgcgcgaaccgatcgtggagatgctga

SEQ ID NO: 501509 - DNA, 828 bp, Stenotrophomonas maltophilia
atgaaactgcattggctttcgccactccctctcctggtcgcgttggcctcgccggccatgctggcggcggcgcctccagcgccttccagggccccgctgcccagcgatccaaccgatgatccgctgatgatcagcgcgggcttcctgaacggtcatcccgacctgcgcttccgcatgctgggcatggaaaaacagcgcgccaacgacctgtccgctgcatttgcgttcttccagcgcgccggcttctacggggacaaggtctcgcaggcaagggtcgctgaaatgctgtggaacggcactggcacggcggtcgaccgcccgctggcctacgtctggatggacctggctgccgagcgtggctacaagggcttcgtcgaactgcgcgaacgctactgggccgcgctggatgaacaccaacgcaaccaggccatcggccagggcgaagcggtgtatgcacggtttggtgacgctgctgccgagccacgcctcgcattggcaatgcggcgtgaacagaagcgcatgaccggcagccgcaccggctttgcgggcaacgtcaagattctcgtgccgggcccgaatggcaccactgaacagattgatggcagcaagttctacgacacccgttactgggacccgcagctgtaccggcaatggcaggacagcatctggtcgacaccgcgggtgggacgcgtggaaattggcaacgtggccccggtttccaccgaaaaccaggcgcgtagccgaatccccgatgttgctccacaggttgacgcccccgagccggtgaccggggacgaaccgccccagccgacccctggcctgcgctga

SEQ ID NO: 501510 - DNA, 1995 bp, Stenotrophomonas maltophilia
atgaagaagacctcgctgttgacgccgttggccctggcgctcgccgccgccctccccgctgccttgccggccgccgctgcgggcgcggcgacgccctattcgatcgaagacttcgccaggcacgccagctacagctcggccagaatctcaccgagcggcgcctacctggctatcagtgtcgatctgggcgaccaggacgtgctgaccatcctgcgcaccagtgacctgaaggtactcaaggtcaaccagctgccggacaagaagagcgtgggcagcttccactggatatcgccggaacggctgatgttcaacgcggtgaaaaagcagggcggctacgcccagcccttccccaccggggaatggttcgcggtcaacgccgacggcagccaggcccgcccggtgatcttctacggcacccgcgatgccacccagcgcagcaagagcgtgggcaacgaatcctattcgttgctggacacgctgcgcggcgatgaccagaacgtgatcatgcaggtccgctacccgcgctcttccgaaggcgcaggcacccaggtggtgagcgtggacaccatcagcggcaggcgcacgcccttggcgcgcgcacccaaagagaactgcgacatcgcactggatggcgccaaggaaccgcgcttcgcggtctgcagttccagccgcgatgagagcggcgaatatgatgagcgcagcgagctgtaccgccgcgacggcaccacctggacgttgatcaacgcctccaagtccgacggccagcatctgcgcgtgctgcgcaccagcgccgacggtaccgtctacgccgaacaggatgatggcaaggtcccatcggcaatcggcacgctggacaccggcagtggccagttccagaagctgttccaggatcctgtcagcgaagtctcgcagatgatgtggagcactgatgacaagcgcctgatcggcgtggtcaaccaggccggcagccccaaggtcaccctgctggatgaggatcaccccgatgccgcgctgtaccagtcgctggcccaggcatttcccgggcagatggtgcagttctccagttccaccgaagatggcaaccgcatcctggtgtcggtttacagcgacaccaatccaggggagctgtacctgttcgaccgcaagaccggccaggcccgtttcctgctgcagggccgcgactggcttgatcccaagcgcatggccagcgtcaccccgttcaccgtcaaggcacgggacggccagctgctgcatggttacctgaccgttccgcagggagcgcagggcaagcgcctgccaatgatcgtcaacccgcacggcggcccgatcggcccgcgcgacaactggggcttcaatcccgaggcgcagctgctggcgagccgtggctatgccgtcctgcaggtcaacttccgtggctctggtggctatggcaaggccttcgagaacgcgggtcaccggcaatgggccgacggcatccagaacgacatcctcgatgccacgcattgggccatcgaccagggggtggctgacaaggaccgcctgtgcatctatggcggcagcttcggtggctactctgcactgatggcgcccatccgcgagccaggcctgttcaagtgtgctttcggctacgtcggggtatacgacgtggacatgctgttcaagaagggcgatatcccgcagcgcgagtccggtcagcgctatctgcgccgcacccatggcaccgacgtggccgaatggaacaaggtctcgcccgcccgccgggccggtgaggtcaggattccggtattcctggccgcaggtgcccgcgacatgcgcgccgtgcccgaacagaccgagctgatggccaaggcactcaccgacgccggcaaccctccggaaggcgtgatcatccagtccggtgaaatgcatggcttctacgacgttccggcccgggtaaatctgtactcgaagatgctcgacttcttcggccggcatatcggcacgcccgcacgctga

SEQ ID NO: 501511 - DNA, 2907 bp, Stenotrophomonas maltophilia
atgaccatccgcaaggcactcatccgccacccgctgagctttgcgctcaccacggccctcctggcaaccggcatcgcccccgcgttcgcccaggaagccggcaacgaggcaggcggcaagaacagcagtgccaccaatcttgatcgcgtctcggtcgttggctcgcgcatcaagcgcgccgacgtcgagggcccggcaccggtcacggtgatcacccgcacggatatcgaccgtgaaggtttccagaccgttggcgacatgctgcagacgttgacccagaacaccacctcgtccttcaccggcgacctggcggtgaccggcttcactccgaacgcacaggtggtcaacctccgcaacctgggccccggctacacgctgaccctggtgaacggccgtcgcccggcgcagtacccgcagccgtacaaccgcgacaacaatgtcgccaacatcaactcgatcccgagcagcatcgtcgagcgcgtggaagtcctgaccggcggcgcctcggccatttacggctctgacgccgtggccggcgtggtcaacatcgtgctgcgcgagcattacgacggcaacctggtccgcctgaccaccggcaccaccgcagaaggcggcggcgacacggtcaacctggaactgaccggcggccgtaccggcgatcgctggagcgcggtttgggccctgcagtacagcgatcgcgaggctgtctacgccaaccagcgcaagttcctgtcggatctgcgtgagggcccgctgggttcgaccgcaaccccgggcctgtcgctgatcgcgatccgcggcctggcctcggccaatggccgggtcaaccagaacgcctactatccgggccaggccaagtgcgatgcactgggcttcaccacggtgaccaccgccgcccgtggcacctactgcggttcgtacgacagcaacgcggcgcgctcgatctccaaccagcgccagttctactcggcctacggctacggcaccttcgacttcaccgacaccacccagggctgggccagcgtcaactattacaccaccagcgccaaggccagcgccggcacggagttctggggcacctcgggcgacaagttcaacatcctgtccaatggcaccaccagcgcgtactactacgatgccggcctgcgcgacatcgtgcagttgcagcgtgtcttcaccgccgccgaactgggtggcaatgaagcggccagcaccaagtacgacgaatacacctacgacttcgctgccggcgtgcgtggcaccttcgccgaccgcttcgactgggaagccaccggtggctacggctactacaactacaagatggaccgcccgcgcctgctcgcgaagtcggtgcatgactacttcctgggaccggtgctgggctacagcaacgccaccggcaccggtgcaggtgtctacccgatccaccgcctgaacctggatcgctggtcctcgccgatcaccccggagatctaccagtccttcgcgacccgcgtgatcaaccgctccgaaaccagcgtggcgaatgccgccttcaacgtcagcggcgacctgttcgaactgccggccggcgccgttggcttcgccagcgtgctggaatggaaccgccagaagatggacatggtgagcgacccacgcaccgaccagctgcgtccgatcgacggccagaccatctacaacctcaccagctccggtgagacccacggcacccgcgaccgctacgccgtcggcgccgagttccgcgtgccgatcttcagcaatctgagcgtcaacgctgcggcgcgctatgacaagtacgacgacatctcgtcggttgatgcatccaccacttacaacctcggcctggaattccgcccgttcagcaacctgctgctccgcggcagctatgccaccagcttccgcgcgccagacatgcagctgatctacgccggcggtgccgcgtcctacacgaccgaactggacgaatactcctgccgctccggtaccggtccgggcgctgcccaaggcccgcgtacccgcacccagtgcaacacgccgacgagtgacccgaccaagtactcggtgcagaccctggtggccggcaacccgaacctgaccgaggaaaagggcaagtcgtggggcgcaggctttgtgtgggacgttacggatggcatgtcgctgacggtcgactactaccgcatccgcctggaggacgccgccgcccagctgagcaacgactacctgctgcgcgctgaggcggcctgccgcctgggcaccgccagcgacggtcgcgcggtccccagtgcttcggtctgccagaacgtgctgggcctgatcacgcgcaccaacctgcccggctcgccggacgatggccgtatccagcgcatcaacaacgcctacatcaacaccgcactgcaggacaccagcggtatcgatgcaacctacaagtacgcgctggacaccgaccgctggggccgtttcaacgtcgacctgggttactcgctgacgctgaccaacaagtacaagcagaccgccgacgacgacctgatcgattaccgcgacctgccgccggagtacttcaatcccgagcgcagccgcgcccgcggcagcctgacctggaccaagggcgactgggccaccaccgtgttcggcacccgctacggctcggccttcagctatgccgaagctgatggcaccaacagcgcgggcggtgcctactcgcgtcgcctggcgccgtacttcctgtggaacctgagcgtgggcaagaagttcggcgagaacgtgctggccaccttccaggtcgtcaatgtgttcgacaaccagtatcgcaaggacaacagcaacacgacgtacccgttctacaacccgttcatcggcgcagacccactgggccgtcgcttctacgtgagcctgcagtacaagttctga

SEQ ID NO: 501512 - DNA, 504 bp, Stenotrophomonas maltophilia
atgaaactgctgcttccgctggccctcgcagggctggcaaccatcgccgtacccgccgctgccgcagatatccgcaccgcacagccggttcctttcgcggactcggcgatcatcgccgacgccatcaggaacgagtgcagcatcggcaccacgctggcgcagtcgctgtccacccatgccactcgtcacggcaataccgtcgtgcccggcccggtgggtgccgagagcggcaacggacgttcactgaagcttgagctggttgaagcgcagagcgcaggcaacgccttcgtcgggcatttcaagtccgccgccgtgcgtggcgtgctgttcgaggatggccaccaggtcgcgaccgtcaccgcacgccgtgtgtcccgcggcggggcgttcggcggtttcaaggggtcctgtgccgtgcttgatcgcaccgtcagcgccattggcgaagaccttgccggctggttggcggcgccgacggacaacgcgcgcctcggcgatttctga

SEQ ID NO: 501513 - DNA, 522 bp, Stenotrophomonas maltophilia
atgctgctgcgcacccagccaacccggtgccgtatgagccgcttcgccgtcttcctgccgctgttcatcgtcgcgccgctgtccgccgccagcaccgatccgcgcgaggtggttacccgcctgtacgctgtcgtccaggcgccagcgtcggacgacgcggccattgcgccgctgctgggcgatgccctgcgctcagcggtcgaggcgcagcgcgcttacgagcaggcgtgtaccgcactggctgcgcctgacgagaagccgcacatgctcgaccagagttcctacctgatggcgccggatcgaccacagacggtgagcgtgggaatgcccgggtccaccggcaacgccacgtgggtcccggtcgatctggcggtgggtgactatcgctggaccgaccgggtcctgctgcagcggcagggccaggactggcaggtcatggagatccgctgggggcagggcggcaacctgatcggtcggctgcaggcgttctccgcgttccgctgcacgccttcgcgcagctag

SEQ ID NO: 501514 - DNA, 348 bp, Stenotrophomonas maltophilia
gtgagccgtgacccgtggctggcgctggaaagccagcgtcagcgccggcattggaggcagtggccatggggcctgatcgcgctgggcctggccgtgctgttcaccgcgggcatgttcgggctggcgctgatcggcgccgcgtccgtgcgcccgccgggtgatggtggcagcggcttcaacctgcgcgcctgcttcatcgcgctgctgatcggggagttggtggcggccgtgggctgcatcgctgccgccggactggcgtggcgcctgaaccgtggcaaggtggcggccggcctggcgatcatcctgctctcgctgtggctcggcgccctgttctacgggctgctctga

SEQ ID NO: 501515 - DNA, 135 bp, Stenotrophomonas maltophilia
atggcagccagccccgctgacgccttggcgatgctgctggcccgcgagccgccggcgagggaggcttaccgggccagccgcgcgctgaacatcccgcagaacaaccgcaaggacctgctggtgcaactcgagtga

SEQ ID NO: 501516 - DNA, 1233 bp, Stenotrophomonas maltophilia
atgctggaaacgctgggcatcgccacgctggctgaagtcgcccgcggcggccgccgcggccagctgctggatctgcgaattgatcgccagcaggctggccttggctgcgtccatcgattcgtgcaggatcgcgcggctgccgggcaggcggcgtgcatccggggcgaggttgccgattgcgtactggttgagtacttcaatggcatcgacgattgcatcgaggtgttcgaagatcaccgtattgatgccgttggccagctggccatacacgcccgggaaatcctccggaatgcggtgactgatgtccgggccggcgtgcatctgcgccatcagctgggtctgctcgctgaagcggcgcagcatcgtggtcatctcggcggtcgccgcgagcatcttgccggcttcgtccttgctggtggcctgggtgctgacgctgaggtcaccccgggcgacggcctggatggcatgcacggccttgccgagcgggccggtcaccgcgcgcgagatgaccgtggccagtgcggccgccaccagcgacagcagcaccacgcaggcaatgatggcgatcatgctggtgcgatgggtggcgttggcgtcggcaatcttgccgtccatctgcccggcgatgtgcgtgcccagcgccttcatggcggcgaacaggtcacgccgggccgggcgcgactgctcgtcggagatctgctgtgccagcacgccatcgcccgcggccacggcttcgcgcatggctttgttgacggcgaaatagcgatccagctgcgcgctggcggcgcgatacagttcacgctccttggccagcgccggcagcgcggcgtaggcggccagctcgtcatgcacgcccttggcggtgtcgtccatgcgcttggtgtagtcggccaccttgtccggctggtccagcatgctcagcagcgccagttcgtaggtgcggaattcgcccagctgcgagcgcgcttcgcccaggtgctgtaccgaagggatgtcgttgccggccatctcgcgcagctgcgcgttggcctcgctgaggcgcagcagggcgaacgcaccgaggaccagggtcatcagggtggtgagggtgaacccgagggccagcttgcgggcgatgggcagatcgtggaaccacttcatgcagggtgctccaggtgggcagagtaccggcgacggtgcgccggatcgggggtggttgcagagcgaacgggggtgcccggtggggttcggtga

SEQ ID NO: 501517 - DNA, 261 bp, Stenotrophomonas maltophilia
atgtgcgcgcacgccgtacgccctacgccagacccgattcttgccccgatccgcgaccgcctgcagcaacagttcgcgctgcatcggcgcggtgcattgttctggaccgcctaccaggggctgcagctggaactggcgcgcagccatccgctggagcatgagcgcctgtgcaacgccatggccgacatggccgaagacctcggcgccgtcgagcatgcgcagctcataggcaatcgcaacgccggctccacatcccgctga

SEQ ID NO: 501518 - DNA, 324 bp, Stenotrophomonas maltophilia
atgaacgcacgttccgtccgtcgccctgcaactgaacgcattgtcgaacccgccgacccgcgcctgctgcgtggcgtgcggcagctggccctggccgggctggcgctggtgctggtctggccggcggcacgtggcaacagcacgtggctgggctggctgccgatgtggctggtgggcatgccgctggtggcctggtgggcgctgctgcgctttccactgccgcgcctgtcagggctgcggctggcgcggcgtaccggtggacaggcgcggcgcaggcctgttccggcctcgcgtggccggcgcagcccggccgccacggcctga

SEQ ID NO: 501519 - DNA, 300 bp, Stenotrophomonas maltophilia
atgaagcgtccccacaacggcatgcgcgccatccatcctggcgagatcctgcgcgaagagtttctgctgcccctgtcgctgagcgtgaatgcgttggcgaaggcgctggatgttcccgcaacgcggctgcacgccatcgtccacggtcagcgcagcatctcggcggacacggcagcgcggttggcacggcatttcggcggggatgccgcttcctggcttgcgatgcaggcggcctacgatctcaagacattgccaacacgcagcgagatcgaacgccgcgtgcagcctcgggcggcatga

SEQ ID NO: 501520 - DNA, 897 bp, Stenotrophomonas maltophilia
atgaacgtgcaacgctccccttcgcgcgcggtggcctggatggtcgctgcggtcgcctgtttctcgctgatggacgctggcatgaagcagctgtcggccagctaccccaccctggaagtgaccttcctgcgcggtgcggcctcgttgccgttcgtgctggtgtgggtgctggccagcgcggggccgcgttcgctggtgccgcgccgctggggcctgcacctgctgcgcggggcgctgggcatggcgatgatcggctgcttcgtgttcgccctgcgcgacctgccgctgtccaccgcctacaccatctacttcgtcgccccgctgctgatcgccgccttgtcggtgccgctgctgggcgagcgggtcgggccgcggcgctgggtcgccatcggcatcggcctggtcggcgtgctggtggtgctgcgtccgggcgtggacggcttcatttcggtgcccggcctgatggtgctggcggcggccaccgcctatgccgtggcggcgatcacggtcagcctgctgacccgcaccgatacctcgcagtcgatggtggtgtggttcctggtcatcatggccatcggtgccggcctgctgtccattcccggctgggtgccgctgcagctggcgcatgcgccgctgatcgccggcatgggcctggccggggccctgggccagatcgccctgaccaaggcgttccagctgggcgaggcctcgatgatcgcgccgctggagtacagcgggctggtctgggtgatcggctgggacctggccttctggggccagctgcccgacggctatacctgggtgggcgccgcgatcatcgtcgcctccggtctgtacctgctgcaccgcgagcgggtgaaccggcaggagccgccgaagccgctggatcatccctga

SEQ ID NO: 501521 - DNA, 483 bp, Stenotrophomonas maltophilia
atgccttccttcgacgtcgtgtccgaagtcgacacccacgaactgaccaacgccatcgaccaggccaaccgcgaactgagcacccgcttcgacttcaagggcgtggatgcccggttcgaacgcgacggcgatgtgatcaaccagaccgcgccgaccgagttccagctcaagcagatgaacgacatcctgcgcgcacgcctggccgcgcgcggcatcgacgtgctcagcctggagttcggtgacatcgagaccaacctggcccaggcccggcagaagatcaccgtcaagcagggcatcgagcagaagatcgccaagaagatcgccgctgcactgaaggatgccaagctgaaggtggaaagccagatcaacggcgacaagctgcgcgtgcagggcaagaagcgcgacgatctgcaggaggccatcgcagtactgaaagccggcaagttcgaactgccgctgcagttcaacaacttccgcgactga

SEQ ID NO: 501522 - DNA, 1098 bp, Stenotrophomonas maltophilia
atgatggccacgacagtcgggcaacagcaggtggtggcggcgcgtgccgccttcgccgagggcgatgcgcagtcattgaagctgttgccgttgcccctgcagcggtcgtggcagcgctcgcgtgcggccggcctgcagccgggacaggagccctgctatccaccgctgctcggtgacggccgccacctgtcccatcccgatgaccggcgcctggcgggctgcgtgcggcccgagctcgaacagctgtgggccgcgttcggtgggcgcggctggacgatgttctgcgccaaccgcgatggcatggtgatcgcgcagcaggcgcatggcctggaagacgctcccctgctgcggccgatccaggtcgggcggcggctcggcgagagcgtgatcggcaccaccgcaccggcggtcagcctggccgacgacctgcctgcgctggtgcgtggcaacgagcactacctgcagcgtttcgccccggtgttctgcctgagtgagccgctgcatgatcccgatggccgggtctgcggggcgatcgacattaccggcctgggcgagcgggatccgtccttgctgcagggctatttccggcaggcggcgctggccagcgagaatcgcctgttcggtgcgctggccgacgtccacctgctggcggtgcagcatgatccgcgctggttgctgtcgccgctgcaggggctgctggcagtgcaggaggatggccagctgcgcgcggccaaccgcgttgcgcggcgcctgctgggcctgcccaggcgcgggccgttgcccttgctggacctgggcgtgctgtttgccggcgccagtgcggcacagcggcgccgcctgctgcaacccggtgcaccgcatcgggtccggctgggcgagggcagtgcggtctacctgcagcatctgcaggggccgcggtgcgcggcgcggcgcggtacgccgcgccgtgccagcaacaccaccggtacgccactgctgcgtcagcagcagcgcgaggcggcacgccgcgcggcgcaggccgcggacggcaatctcagcctggctgcgcgccagctgggtatctcgcgcaccacgctgtacaagctgctgcgcgattga

SEQ ID NO: 501523 - DNA, 1128 bp, Stenotrophomonas maltophilia
atgaacaacgacgctgcatcccgtgagatcaccgctgccgttgtgcgcggcaaggaacagcccttcgtcatcgagcaggccacgctgcgtggcgtgcaggatgacgaagtacgggtgaaagtggtggccgccggcctgtgccacaccgacctgatcgtgcgcgaccagtactacccggtgccattgccggctgtgctcggccacgaaggtgccggcatcgtcgaagcggtcgggcccaacgtcaaggcgctgcaggtgggtgaccacgtagtgctgacctatggtgcctgcggccactgcaatccctgccgcggcggtcacggcgcctactgccgggacttcttcgcattgaatttcggtggcgacgatggccacggccataccgcgatcaccgatgcgcgcggccagccgctgcacgaccacttctttgcacagtcctcgttcgccacctatgcgctggcgcgcgagatcaacgcgatcaaggtgcccgacgatgcgccactggaactgctcggcccgctgggctgtggcatccagaccggcgccggtgcggtgctcaacgcactgcaggtacggtccggcagcagcttcgccagctacggtgccggtgcggtcgggctgagcgcggtgatggcggccaaggtggccggcgccaccaccatcatcgccatcgatgtggtgccctcgcgcctggaactggcgctggagctgggggccacgcacgtggtcaacagtcgcgagactgacgtggtcgaggcggtgcgtgcgatcaccggcggcggagccgactatgcgctggaatcgaccgggcgcccggaggtgctttcagccgggatcgaggcgctcggcggacggggcatgatgggcgtggtgggtgcgccgaagctgggcaccgctgccagcttcgatgtcaacaacctgctgctggggggccgcagcatccgtggcatcgtcgagggcgacagcgtgcctcaggtgttcattccgcagctggtggccctgttccagcagggacgcttcccgttcgacaaactggtgaagttctatccgctggaacagatcaaccaggccgccgaagacagcacccgtggcatcacgctgaagccgatcctgcgcatcgcggcatga

SEQ ID NO: 501524 - DNA, 1467 bp, Stenotrophomonas maltophilia
atgactgcaacttccccgtggctgccggatgcgctctggtccggcaccttctttgatggccgttggcaggccgccgtgcagcggcagccggtgatcgagccggccaccggccgggcgctcggcgagatcggcctggccgacccggcgcaggtcgcgcgttcggcagccgctgcggcgcaggcccagcaggcctgggccgcggctccctatgagcagcgcgcacaggtgctgcgcaccgccgcgcggctggccgaggagaatatcgacaccctggtggaatggctggtccgcgaaagcggatcgacccgcctgaaggccggcttcgaggccaaggtgaccgtcaaggcgctgcacgaggccgccgcattgccgtcgcgcagtgtcggcgagatcctgccctccgaacccggccggctgaacctggcgcggcgtcgcccgctgggcgtggtcggcgtcatttcaccgttcaattttccactgtatctggcgatgcgcgcggtggccccggcgatcgcgctgggcaatgcggtggtgctcaagccggacccacgcacggcggtatgtggtggcgcggtgattgcccgcctgttcgagcaggccggcttgcccgcgggcgtcctgcacgtgctgccgggtgacggcgccgccggcgccgcactgaccagcgatccgaacgtggcgatgatccagttcaccggctccaccgcggccgggcgcaaggtcggagaagccgcaggccggcacctgaagaaggtttcgctggagctgggcggcaagaattcgctgatcattcttgatgacgccgatctcgagctggcggtggccaatacggcatggggcgtctacctgcaccagggacagatctgcatggccaccggccgcgtgctggtgcacaggaagatccatgatgcgttcctgcagaagctggtggccaaagcggcgtcgctgaaggtgggggatccggcgcgcgaagacgtggcgatcggcccgttgatcaatgccggccagcgcgaccatgccgtgcgcgtggtcgagcaggcggtgcaggccggcgcttcgctggaagccggtggcacgtaccacgatctgtttttcgcaccgaccgtgctcggcaacgtcgacgccggcaatcccgcgttcaacgaagagatcttcgcgccggtcgccgtggtggtgccgttcgacgacgacgaccacgccgtgcagctggcaaacaacagcgagtacgggctgtcgatggccatcgtctccagcgatgtcggtcgcgcgctgaagctgggtgagcgcctgcgcaccggcctgctgcacatcaacgaccagacagtgaacgacgaggtgatcaatcccttcggcggcgtgggtgcgtccggcaacggcaccagcatcggcggcccggccaacggggaagaattcacccagtggcagtggttgaccgtcaagggcgaagcgcccgcctatccgatctga

SEQ ID NO: 501525 - DNA, 2031 bp, Stenotrophomonas maltophilia
gtgaccgttgccaaccccctgctcgatttttccggcctgccgcgcttcgaggcgatccgccccgagcacgtggcgccggcgctggacgtgctgctggccgaggccgaagccgccgtcagcgcggtcgagcaggtgcagccggtgcgctgggacaccttcgtgaccccgctggacgatgccaccgagcgcctgtggcgcgcctgggggctggtcggccacctgcagggcgtggtcaacacgcccgaactgcgtgaggcctacaacagcaatctgccgcgggtgacccgcttcgccagtgcgctgggccagaacctggcgctgtatcgccaataccaggcactggccgccagcccggaggcagcacgctttgatgaagcccggcgcaaggtgctggacaacacgctgcgtgacttccggctgggcggtgccgagctggcgccggaggcgcagcagcgtttcgctgcgatcaaggaggaactgtcggcgctgtcggccaagttctcgcagaacgtgctcgacgccaccgatgcatggtcgctgttcatcgaggacgaagcgcggctgcagggcctgccggaagacgtgaaggccgccgcgcgcgctgcggcagagaaggacggcaggaccggctggaaactgaccctgcagatgccgtgctacctgccggtgcagacctgggccgaagaccgcgacctgcgcgagatcctgtaccgcgccagcgcgcagcgtgcgtccgagttcggcgacgaggccctggacaacagtggcaacatcgaccgcattctggccctgcgcgccgaactggccgcgttgctcggcttcgattcgtacggccattactcggtggcgaccaagatggcgcaggacccggccgaagtgcttggcttcctgcgcgacctggccgcgcgtgccaagccgttcgcggcccgcgaccgggccgagctggagcagttcgcacgcgcgcagctgggcatcgacgacctgcaggcctgggacctggcgttcgccgccgaccgcctgaagcaggcgcgttacagctattccgagcaggaagtgaagcagtacttcaccgaaccgaaggtgctgggcggcctgttctcggtgatcgagcagctgtatggcctgcatgtgcaggaggacagcgcgccggtctggcacgaagacgtgcgcttcttccgcctggtcgatgcgcagggcgcgctggtcggccagttctacctggacctgtacgcacgcgagggcaagcgcggtggcgcgtggatggatgactgccgcaaccgtcgcgtgcgcgccgacggcagcgtgcagacgccgctggtctacctggtgtgcaacttcggacgtggcgccaacggcaagccggccaccttcagccacaacgaagtgaccacgctgttccacgagatgggccatggcctgcaccagctgctgacccgcatcggcgagctgggtgtggccgggatcaatggcgtggaatgggatgcagtggaactgcccagccagttcatggagaacttctgctgggaatgggcgcacctgcagggcatgaccgcgcacgtggacacgggcgagccgctgccgcgcgcgctgtatgagcgcatgctggccgcgcgcaacttccacagcggcatggccaccgtgcgccagctggagttcggcctgttcgacatgctgctgcacagccagttcgaaccggcacaggacagcgtgctggccctgctggaccgcgtgcgcgccgaggtggcggtgaaccgcccgccggtgtggaatcgcttcgcgcaccagttcagccacatcttcgccggcggttatgctgccggttactacagctacaagtgggctgaagtgctcagtgccgacgcctatgccgcgttcgaggaagcaccccaggcagtggccgaaaccggcgcacgcttccgcgatgaaatcctgtcgcggggtggcagccgtccggcagcggagaacttcaaggccttccgcggtcgtgccccgcagatcgacgcgctgctgcgccactcgggcatggcgtaa

SEQ ID NO: 501526 - DNA, 1203 bp, Stenotrophomonas maltophilia
atggacatccgccccatcctcagcaccctgcgccggcacaagaccgctgccgcgctgatcgtgcttgaaatcgccctgacctgcgccatcgtctgcaatgccctgttcctggtcagccagcgcgtggagcgcatcagccggaccagcggcatggccgaaaacgagctggtcctggtccgcgtgaccggcgtcggcaagcagaccgatgccgccgcccgcacccgcgaggacctggcatcgctgcgcgccatccccggggtcaccgcggtcagcgtgatcaaccaggtgccgttccgcaacagctcgtccaacaccagcatttcgcgcgaaatgaaccaggaacggccgacggccagcgtcggcatgtacacgttctccgaagacgccttgcgcacgctgggcctgaacctggttgccggccgcgacttccagccggccgagtacttcgacttcgacaacctgagcaaggccaacggcacgccggtgatcctcagccaggccgccgcgcacaagatggcgccggacggcaatgcgctgggcaagacgtactacatgggcaagcagacggtgaacgtgatcggcatcgtcgatacgctggccacgcccaatggctggggcaacaactgggatgacaccatgatcatgccggtgcgccgcgtcttcggcgatggcatctacatgctgcgcaccgatcctgcgcgccgcgatgaggtgctcaaggccgcactgtccgccctggaccgcaacgatcccaaccgactgatccgcgagaagcagtcgttcaccgaccagcgcgaggacttcttcaagaacgaccgcgcaatggtcggcctgctgatcaccgtctgcgtggcgctgctggtggtcactgcgctcggcatcgtcgggctggccagcttctgggtgcagcagcgcagcaagcagatcggcatccgccgcgcgctcggcgccacccggggccagatcctgcgctacttccagaccgagaacttcctgctggccacgctgggcatcgtgctgggcatgctggccgcctacgcgatcaacctggcactgatgaacctgtacgagctgccgcgcatgccgctgctgtacctgccgctgggcgccctgctgctgtggacgctgggccaggtcgcggtgttcggcccggcgcgccgcgctgcggcggtcccccccgcagtcgccacgcgcggagcctga

SEQ ID NO: 501527 - DNA, 606 bp, Stenotrophomonas maltophilia
atgaccctgcccgcacttgtgcttgccgcgctgctgcagtccggggcaggcctgatgcccgatcctgaccgtccctcaccgttccccgccagcgacagcgaggctgacatcgccgcaaagatcgccgaactaagggcgttcttcggcagcagcgagcgcgacactcgcaatatcgtcgccactgcccaacaacgggcgctgatcgagcgcctggaagcgcgacacgcggcacgcctggccggtatccgggtggacaacgcaacgggctggaacgtcgtggtgcgactgaccggcgccgtacccgcggccgatgagacacatccaggggcggctggcccgcaacacgtgcactacgtcactggcgccgcgatgaccgaagtggagatgaggcgccgcctgcacgcacagcaggactggctgcgggcccagctgccggacctgttcggctaccgcctggatgtcatgaccggggagctggaggtggagctgcgggaaccagcgaaccgcgcgacgacaatcgccgtgcgcgaccgcctgcagatgcgactgggctacccggtcaggctgcgctggtaccctgcgacatcgcagcagcggtcgccctga

SEQ ID NO: 501528 - DNA, 516 bp, Stenotrophomonas maltophilia
atgtctttgcgccgggaaatcggcttcaccttgatcgagctgatggtcaccatcgccgtggtggcggtcctggctgcgatcgcctttccaagtttccagagcacgatccgttcgagtcgggtgagctcgaccaacaacgaggtcctgggcctgctcagtcttgcccgcagcgaggcgatccgcagcaaccgcggtggcggcgtctgtggaagcagcgacggtgccagctgtgatggtggctggtcgggcggcatgctggcctttgccgatgccaatggcgacggtgcgctgtcggcaggtgaaaccgtcctgcgcttcgtcagtggcaatcccaagctgaagatcactgggccggccacggagatcgccttcgacgggcgcggccgtcgccgcgccagcgccgagcaggatgtacggctggagccggatgtctgcagcaagggcgcagtgcacaagcgcacactgacggtgaacgcctccgggcagatccgcagcaccaaggaagcctgtccatga

SEQ ID NO: 501529 - DNA, 1161 bp, Stenotrophomonas maltophilia
atgcgcctgaaccgacgtgccaccatggccggcctgtcgctggtggaactgatgatcgccctggtaatcagcctggtgctgatgctgggagtggtgcaggtcttcatggcctcgcaggctgcctcacgcctgtccgaaggggcctcgcgcgtgcaggagaacgcccgtttcgcgctggatttccttgagcgcgacatccgcatggccgggcacatgggctgcgtgaacgaccaggcccacgtggtgaagaaccagggcgatccggtatcgcatctgggtgcatcctcgggcgatggcagcccgcttgatttcagcgtttccatccagggcttcgatgcaccgggaaccgcgccgggcgggaggctcgcactcggagcgacatggtccgcaccgtcagcgctgccggcagcgatcacccggctcagccctgcgccggcaggcggaagcgatgtgctggtgctgcgctacctggcccctgaaggggtgccggtgaccggcatttcgtccagcggcggcaatgcgctgctggacatggacagcacccgggtggcccggctcacctcggggggcgtggcggcaccgaccttgttcggcatcgccgactgtgcccatgcggacatcttcgccggtacgttgagtgcggcccgtgtgaccgcgccctcgctggacctgtcgcgctatgccgcgcagccgaccgggcagacgatgctctatcgcgccgagtcgatggtctattacgtcggcatcaatccggagaccggtcagccgggcctgcgccgtgcgcgcgccaacagtgctggcgcctatgcggtcaatgaagaactcgtggaaggcatcgaaagcctgcagctgctgtatggtctggacagtaccgccaacatcagcctgggcacgccaccggccggcaacatcaccaacctggccgccgcaactggcgtcagcagtaacgctaacgcggccggtgccgcgcagtggctgcgggtggggcaggtgcaggtggggctgctggcacgcagcccgacgccgtcgtcttcgagcacgccggccaacccgctgtcggtactcggcgtgggctttgccagcagtgacaggcctgacggccgctaccgctccagctatgaagtctcgattgcactgcgcaatcgcctgttcgggaactga

SEQ ID NO: 501530 - DNA, 516 bp, Stenotrophomonas maltophilia
atgacgaccttctcacgttcgttcaggcccgcttccgctcgcacccagcgcggcgccgtgctctatgtcgcgttgatcatgctcatcctgctggcgctgctcggcattgcgggcatgcaggtggccggcatgcaggagaagatggcagcgaactaccgcgccgccaaccgggccttccagaactcggagggcgtggtgcgtgcggctgaacgctcggtggagaaaatcgccaaccgtcaggatgtggggagcgacagcctggtgcagtccagcactctgtcgcgggtctgcgatgacggcttcgatccgaccatctgggcggaaagccaccgcaaccaggcgcgtcctgcggtcaatgtccgccagattgacagctgtgtgatgggcgaatcgtcgctcgacatgggccgtccgctggaagacgtcacgccgatctaccagatcaccggcttcgcgaccgacgatgccgatgcgagctcgtcgtcggtggtcatcgataccgtattcaaactctga

SEQ ID NO: 501531 - DNA, 3747 bp, Stenotrophomonas maltophilia
atggcttcgcgcaaattccgtttcatggtcgcaggcggcgccgcactggtgctcgggggaggctatgtcatctacagcctgatggcggcccaggcccagggcacgctggcgcaggcaccgctgaacatccaggtgcagacgccaccggccttcctgatggcgctggatgattccggctcgatgctgtgggaaacattgaacaacacgcgcgatggcgtgtaccgctgggatggcagtggcttctacaaccagggtaccgtcaacggctacgatgggtctgggcagcgctacctgtacgtcttccccagctatggacgcgacgaccaagtagccatcccgccgctcgacagcttcggtttcgcccgatcgccggacgtcaacccgtcctactacgatccgcgtgagatctatcctggctggaagaccggcttgtccgatacagcccttgccaactatctggacatcagggcgtccagcgcgccgctggacccgcgtccgggcaatgcaccgaacaagatcgccggcgcgctggacctgactgtggactcgctgttgaccagcatcgacaccggcggccggaccggcgcgaactggcgcttccgctttcgttccggcatgacgctgccggtcggaacccgtattgagcgtgggcgatgcaacctgagcgggggggctgtccggcaggaaggctcattcgacaacgtgacgcgccagactaccatcagcagctcaagctgcgatgctgcagtcgccttctatccggctacgttcttcctggcagatccgtctacactgccggcggaatatgggtacaccgcggcacctgttgccgttgcaaatcctccgggcggccgtccgggtacgttgtacaagtacgaaatcaagattgcgaacttcggcaacaatcaagcgaagtacaacgctgccatgcagagcttcgccaactggttcagcctgtaccgaacgcgacgcgaagcgctgatcggtgcggccacgaatgcgctgtacgacactaccaatctgcgcgtgggctggttccgtatcaatggccgtcgcgcggtgaccatgttcaacatgaccaacgagccggagaagcagcagctgctcagccagatcatcggcgaaatgcgggccagcagcagtacgcccaatcgttccgccgcacagtaccttggcgaacaattccagcgcacggatcagaacgcgccggtactcctgtcatgccagaagaacgcgggcatgctgttcaccgatggctatatcaatgagtccggcaacacgacgctgatgaaggatctcgtagcgccgtactacaacagttctctcgtgccggacaaggagaccaattccgtgccggtgccggccgagtgcaaggggccgaatccaaatccgtcgctggattgcaagacccacctgcacatgaatttctacggcgtgacgctgggcacgcagggcaaggagttcggcgtccggtacctgccggatccgctgcgcccgtgggtgctcagccccgacccgtatgtcgtcaagcccaacttcccgacgacgacgcaggacctcaagcccgaagccgttgatgagctgtggaacgcggtctatgacacccgcggtgaaatggtcaacgctacgcgcccggccgaaatcactgcagccatgcgccgcatcatcagcaacgtcgcccagggcgccacgccgtccggctcgcgttcgctgaccggcgcacgcatcggcgtcggctcgttgtcggtggagccgttctacgaggccaccaacaacggcaccgactggtacagcaagttgcgcgccttcaagctgagcgtcgagccgtccacccgcaagatcgtttcggaagaggcctgggaagcatctgcgaagatgccggcgcctgcatcacgccgcatccggttctggcgcaacggcgcgctggaagacttcaccggcagcaatgtcagcctggccaatctgtgcaccaagtcgtcgacgctgtatccgggcatcctgatctgcagcgcgtccgagctggccggcctgacaacggattccaccacggccgtggcctacctgcgtggtgaaacctccggcgagaagcgcaacggcggcaagctgcgtgatcgcagcacggtactaggcgacatcatcacctccaccccggtgctgagttcgcctctggatgactatgggtttggccgcctcccgggcacgatgggcagcagttacgccgcctacatgaccaccaagcgcaatggtcgccgctacatggtctacgccggcgccaacgacggcatgttgcatgccttcgatggtggcatgggcgccgacggccagatggacgccgacggtggcaaggagcggttcgcctacattccctcgaccgcgttgggccacatgggcaacctgttgctgcccaacgacccgaccaaccagaacgcccagcgtttccagcaccgttactacgtcgatggcccggtgacgatcagcgacacctacggcagcaacgggtggaccacgtcactggtaggcacggccggtgccggcggccgcagtgtgttcgcgctggatgtgtccaatccgggcaacttcggcgccagcggctccctgttgtgggagatcagtgacctcgatgcttcgcttgacgatgctgtgcgcgccaacatcggccatgtgctgggcaagccggtgatcgtgccggtgaagaacgccgacggttcggtgggcttcaaggcgatcttcggcaacggctacgagagcaggagtggcaaggcggtactgtttgtggttgacatggtggcaggccgcacgccgacccttcgcatgatcgaggcgatcgagtcgggtaccaacctgccgtcgggcagcaacgggctgggcaacatcgtggtggttgatcgctggggcggaaccgggcagaacgcgcgggtgcgcgatggcctggccgatacggtctatggcgccgacaagcgtggcgttatctggaagttcgacctgcgcgggaccaccgcgccaaccgtaccgttgttcaccaccgatacccatgtcgatcccgccgaccgccggacctaccgccagccgatcaccggtggcatgacggtgaccaccggaccgtccggtggcgtgatgctgatcttcggcaccggcagcttctcctactacggtgacgagagcgatacggcggtgcaggcgttgtacggtatcaacgacaccgcagcgggccagccgacgacgacgctgacctcggcaaacctgagctcgtatacggccgagatcggttccggcgtgcggacgttgcgtgccgggaccgtgcctacggtcagccgcggctggaccgtggtgctggccaacaaggagcgtgccgtcggtaatccgaggatcgtgtccggcgtggtcttcttcccgacctatgttccgtccgacgctcagggttgctcggtggacggtgcgaactggttgcttggcctgcaggccagcaccgggcaggcagcgatgtcgcaggtgcgcttcggtgcccccgacggccggtcgccgggagcgggtactgccggcgttgctctcaacacgggcggcaacgcgccggtgagggatgtgacgacgtcggtggtgccgcgcctggcgccgccggacagtactccgggcaacccgccgccgcagccgccaggtgaggcgtgcctgatgcagatctcggtggctggtgctgatccgatgtacctgccgtacccctgtggccgccaatcctggaggcagatccaatga

SEQ ID NO: 501532 - DNA, 423 bp, Stenotrophomonas maltophilia
atgcgccaatctttcgcgacgggtcgcctggcccgcggtttcaccctgatcgagctgatgattgtggtggcggtcgtggcaatcctcgccgcgatcgcctacccgagctacagcgaacatgtgcgcaagtcgcgccgggcccaagccaaggccgacctggtggaatacgcacagttggccgagcgcttccacacggtcaacaacacctacgtcggtttcaagttcccgggcaatgccgactcgatcaattccccgcgcgagggcggcacggcggcctacactttttccatgcagaccgcgcagtcgacattcacctttaccgccaccgcggtcaacgcgcaggcgaaggacaagtgtggaaacttgacgctcaaccaggccaacgtgaagaccgccaagaccacgctgtccgagtgctggtga

SEQ ID NO: 501533 - DNA, 537 bp, Stenotrophomonas maltophilia
atgtgccctgcccacacttccagccgcgccgcgtcgcgcggcatgcacctgatcgaaatcctggtcgtcacggcggtactggccgtgctgctggccgccggctggccctcgctgcaggcgctgctgctgcaccaacgcgcggaagccagccggttcagcctgcaggccgccctggcaacggcacgcacccaggccatcatgcgtcgcgaactgatcggcctctgcgccagcgcggacggccagcgctgcggggacgactggagccagggctggattgcctaccgggccgcaggcgcgtggcagcccccatccacgcccgatgccattgtcctgcatcagggcggccgtccggacgtcacgatcaatgccgccagcagcagcgggcgaccgcaactctatttccagccggatggccgcagccccggcagcaacctgacgctgcgcgtctgcgtgagggggcgcgagcacgcgcggatcatcgtcagcaacagtgggcggatgcgttcgtccaccacgcggactggacaagcctgttga

SEQ ID NO: 501534 - DNA, 309 bp, Stenotrophomonas maltophilia
atgccgatgcttgccctgatcctgctgttctccagcctgttcggcgacggcgatggcggcggtcccaccgagaacgccctgcgcagccagatcctgcgcgttgaggccgcgcaggatgcgcacggggccgagccgctgcagctctatcacctgcgtccggaccgtatcctgcgcctgggctgccagcggctgcctgacccgcacagcgcggcgcccgatgccgggccggtccaggtccgcgtggcgcagctgtgggagcgcgtggatgggcgatggcagatccggcgttcgatcagcatccaccgctga

SEQ ID NO: 501535 - DNA, 141 bp, Stenotrophomonas maltophilia
atgagcgatcacgtcccggtgtccaggcccaatccactgctggagggcctgtttggcggcaacatgctggaaggcacgttcaaggccgtggcctgggtcgcgatcctgtgcgtgctgctggcgtggagcacgctgcgctga

SEQ ID NO: 501536 - DNA, 2400 bp, Stenotrophomonas maltophilia
atggccgccgagcgtttcccgtctcccttgctgggcagtggctgcgctgccgcgctgacgctgggggcgttggcctgcgtgcagctgccgcaactgccgccgctgtgggtctgcacggtgatggtcgtgcttggcatggcggggtggggcctgcgctggcgcgggcgcctgccggcggtcgtgctgttcggtgccggctgggcagcgctgcacgggcactgggcattgcaggaccagctgccaccgggccagccggctcgggacgtggtggtcagtggccgggtcatcgatctgccggatcatgccgaggcgcgcacccgcttcctgctgcaggtcagtgagagcagcgaactgccatcgctgcgcggcaagcgcctgcaggtcacctggaacgacggctggcagggcaggtccagcgccgctgccgagggacggcgcaggcaggtcctggccggtgcgcagtggcggttggcggtgcgtgtgcgggcccctcgctcgcggatcaatcccggggcttttgacagcgagcgccatgcgctgctgcgtggcgtggctggcactggaacggtgagggcgccggccagtgcccacgcgctgcagtctgcgcgcggcctgccggcatggcgtgagcgcaccagcgccgccatcgccctgcaggtggcccatccggccgcgcgcttcgtgcaggcgctcgccctgggcgatacgcgcggcctgtccgacaccgattgggatcagttgcgggcgctggggctgacccacctgatcgccatttccgggttccatgtcggggtggtggcggggctgggggcgttgctgtgccgagggctgtggtggctgtgccccctgctggcccggcattggccgcgtccacaggcggcggcctgcgccgcagcgctgtccgcggcgggctatgcagtgctggccggcggtgaattgccgaccgtgcgcacggcgctgatgatcgggttggtggccctggcgcgtagcgggcggcgcccgctcggtctcgtgcaaggactcgcgctggcggcgctggcgctgctgctgccggcgcccctgtcggtgctgtcagcgggcttctggctcagcttcggcggcgtgctgtggctggcgtggtgcctgccacagggacgtccgcgcgggatggccgccaacctgcgtgggttcctggccgcgcagggcgtggccagcgtcggcctgttgccgttgggcatcgccctgttcggtggcaccgcctggctggggccgctggtgaacctgccggtcattccctggtggaccttgctggtagtgccgctgtcgctgctgggtaccgccctgcaggtgctgcatgacggggccgggcgctgggcctggcgtgcggcggcgtggctgttcgaggtcagctggcaggccctgcagcccctgtcggcgcatccgcaggcgatgtggtggttggccgaggcaccggcctgggcagttccggcggcgctgctgggggtgttctggtggctgttgccacggggtgccggcggcgggctcgctggactgctgttgtgcctgccgctgttgtggccgttgcgcgagcggccggccgagggggagctggagctgctgctgcacgatgtcggccagggcacggcggtgttgctgcgcaccgcgcggcatgcgctctggtatgacgtcgggccgccgagcggcagcgaagggagcgagcggactctggttccggcactgcgggcactcggccaggcgccgcctgaccgcgtattgctcagccacgatgacctggatcacgtgggcaacctgccgggtctgcggctacagctgccggcactgccactgctggcgccgccgggcagctcgatcaccggagcggggcgttgccagcggggcctgagctggcgctgggacggggtcgatttccaggtgctgcatccggatcccggcagccggcgggccgaaaacgaggacagctgcgtgctgcgcgtggccagcgcccatggcgtggtcctgttgcctggcgacatcggccgtccggccgaacaggcgctgttgcgggcgtctccggcggcgctgaaggccgacgtggtgctggtgccgcaccatggcagcgggggcagttccagtgccccgtgggtggccgcggtggcaccacggttggcgctggtctcggccgggcaccagaaccgcttcggccacccgcgtcgggacgtggtccggcgctggcaggcgcagggcgccgaggtggtgtccaccgcggagtccggggcgatccgcgtatggcttggcgcacaagggctgcagctgcgtgaacagcgcatccatgcatcccggtggtgggatgccgctgggcgggcgcggtcggctgctatcctatcgtcgatcgaacaagcggccgttgggccggagggttga

SEQ ID NO: 501537 - DNA, 1299 bp, Stenotrophomonas maltophilia
atggtcgaaggtttgggcaggatcggcttcggcctgttcgggttggcggtgctgatcggcatcacctggttgttttccaacaacaagcgtgcagttgactggaagctggttgccaccggtatcaccctgcagatcgcctttgcggcgctggtgatcctggtgccgggcgggcgcgacgtgttcgatgcgctgggcaagggcttcgtcaagatcctcagcttcgtcaacgagggctcgggcttcatcttcggctcgttgatggacaccaagaactacggcttcatcttcgccttccaggtgctgccgaccatcatcttcttctcggcgctgatgggggtgatgtaccacctcaacgtcatgcaggcgatcgtgcgcgtgatggcctggtcgatcaccaaggtgatgcgcgtgtccggcgcggaaaccaccagcgtctgcgccagcgtcttcatcggccagaccgaggcgccgctgaccgtgcgcccgtacatcgccaggatgacccagtccgagctgctgaccatgatgatcggcggcatggcgcacatcgccggcggcgtgctggcggcctacgtgggcatgctcggcggtggcgacccggcgcagcaggccttctacgccaagcacctgctggcagcgagcatcatggccgcaccggccaccctggtcgtggccaagctgctgattccggaaaccggcaccccgctgacccgcggcacggtgaagatggaagtcgaaaagacctccagcaacatcatcgatgcggccgctgccggtgccggcgacggcctgaagctggcgctgaacatcggcgcgatgctgctggccttcatcgccctgatcgcgctgctgaacgccccgctgacctggttcggcgaggtgaccggcctggccgctgccatcggcaagccgaccaacctgtcgaccatcttcggctacgtgctggccccgatcgcctgggtcatcggcacgccgtgggccgacgccaccaccgtcggctcgctgatcggccagaaggtcgtgatcaacgagttcgtcgcctacaccgagctgtcgcagatcgtgaacggccagatccccggcgtgagcctgtccgccgaaggtcgcctgattgccacctatgcactgtgcggctttgccaacttcagctcgatcgcgatccagatcggcggcatcggcggcctggccccggaacgtcgccacgacctggccaagttcggcctgcgcgcggtgctgggcggtaccattgccaccttcatgacggcgaccatcgccggcgtgctcacgcacttcagttga

SEQ ID NO: 501538 - DNA, 1053 bp, Stenotrophomonas maltophilia
atggccatgcccgattcgacttccacactgcgcttctggttgatcaacaccctcggttgggcgctgttctgcgcgctcagcctggcgatgaccagcaccttcggcggcggcgtcagcagtggtggcacgctcatcagcgtcggcctgggcgtgctgctgtggggcatcagtgcgggcgtgcgtgcactggccctgcggcgccgctggtggcagcgggagttcagcgcgctggtactgcggcttgcgctggcggtgctgctgggcgcgctgctggcacagctgctgctgatggccgtgctgcagccggcgctggcactgggttgggtggatttcggtgggcagccgggtgacttccgcccggtggcacggctggcctatctgctaaacaccgtgctgctgctgggcctgtggaccgcgctgtgggccggcctgcacagcctgcgccaggcgcgccgcgcggaactcgaacgcctgcgtgccgaagccgaacgcagtgcgctggaacgtgatgcgctgcgtgcgcggctcaatccgcacttcatgttcaatgcgctgaataacctgcgcgcgctgatcctggaagatcccgagcgtgcgcgcgacatggtcacgcggctgtcgcgcacgctgcgccaggcgctggcgcacaaccgcagcgagcaggtgacgttggccgaggaactggcggtggtcgacgattacctggccatcgaggcggtccatttcgaacagcgcctgcaggtgcggcagcagatcgatgccgatgccacgcaggcgcagctgccggcgatggcgttgcagttgctggtggagaacgcgatcaagcacggtatcgccagccgccccggcggcggcgaggtacagatccgcgccacgctggacaatgacgtgctgcggttgcaggtggagaacccacgtgcaaccggcagcgaacccacccatggccatggcgtgggcctggcctacctgcatgcgcagttgggcacgcgtggccgattcgtgctgcagccggtcggcgaccgcatgcaggccctgctggagattccacaatga

SEQ ID NO: 501539 - DNA, 927 bp, Stenotrophomonas maltophilia
atgaagatcttgctggcactctggtacgcaatgaacgctctggcccggctggcgatgatcggcatggcgatggccgtgctgggctccggttccgcacatgccgccaccggcgcgagcgctggcaaggtgcaggtcgaggtggtcggcaagggccgcccgctgctgatgatccccggtctcaacagcagcgccgaggtctggcgcgggacctgccgggccctcaaggaggtgcagtgccacctggtacagctgccggggtttgccggcgccgcgccggcagacccgcggccggcggatttccttccggccatgcgcgaccagctgctggcctatgtgcatgaccagaagctggaccatccggcggtgatcggccacagcctgggcggcgtgctgacgctgcagatggcggtggaggaaccggacgcactggggccgctggtcatcgtcgattcgttgccgttctatgcaggcatgcagaacccgcaggcgaccgcacagagcgtgcagccgatggccgaaaggatgcgcactgcgatgctggctgcagacccggccagctaccaggcgcaggccgaagcggcgctggccccgctgaccagcagcactgcgcgcctgcccgaactgaagcgctggggccatgacagcgatcgcgccaccaccgccgatgcgatgtactcgatgctggtgaccgacctgcgcagcgaggtggccggcatccactcgcctgcgctggtcctgggcgcctgggcgtcctaccaggcactcggtgcgaccgaatcatcggcgcgtgcgatcttccagtcacagtacgccgcgctgcccggcgtgcgcatcgaactgagcgcgaccggccaccacttcctgatgtgggatgatccgcagtggctgcgggggcaggtgcaggcattcctggacagccaccgctga

SEQ ID NO: 501540 - DNA, 480 bp, Stenotrophomonas maltophilia
atgcgccgcatcctcatcctgctcgccacccacctgctcaccctcggcctgggcttcggcctgggcatctacctcctgccgatcctgatcgcccccgatgacccgccggtggaacaggtacaggccgccatgaaagacgccgcctaccgcaccaccttccgccgcgacctgaagggcagcgacgcagtgcactgggccgaaggcaaggtcagtgtcagtgccacccaggtcgccttcgacgggaagatgggaccgggcccggattacaaggtgtacctggtccgtgacttcgtcgacaacaaggccgacttccttaagatcaaggcgcaggctcagcgcatcggcgaagtgaagaccttcaaccgcttcctggtcgaggtgcccgcgaacgtggatgtggacgactacaccaccgtcgtggtgtggtgcgagcgcttctcgcagttcatctccgccgggcagtaccgcacgccgggctga

SEQ ID NO: 501541 - DNA, 393 bp, Stenotrophomonas maltophilia
atggaacgcaacagcgttgaagatctgcacgagccccagttgatggcgctggagcagcgcctgtgcacggcactgctggagaatgatcacgatgcgctggccacgctgctatcgccggccctgttcatgatggatggccacggtggccggatgcgcgacctgccgtggctgggagcgtggcatgccggaggcctgcaggtgcggagcctgcgcctgcacgcggtggaaacgctgctgtgtggccgcctggcgttgctgtccggcgatgtgcacggggtggtgcattggcagggccgggagcgcgagttgaaactgcgcctgctgcgggtgtggacctgcagttccggagacagcggcgcccggttgttatcgatggcggtgttggccgcgtga

SEQ ID NO: 501542 - DNA, 351 bp, Stenotrophomonas maltophilia
atggccgtcaagcgcgtcgtcgccaacatcgccacgtctgatccggcgcgtgcggcagcgttctacagcgaactgctggacatgccagtggtgatggaccatggctggatcgtcacccacggcgggcagggcagtgcccccgcccagatcagcttcgccagcgaaggcggctccggcacaccggtgccggacctgtcgatcgaagtggacgacctgcaggaggtactggagcgcgtgcgcgcgaccggggtggcggtggagtatggccccgtcgacgagccctggggcgtgcgccgcttcttcgtccgcgacccgttcggtcggttgctgaacatcctcgcccacgcctga

SEQ ID NO: 501543 - DNA, 642 bp, Stenotrophomonas maltophilia
atgcttcccgtgctcaccgcctttgccaactcccccgaccgcggccagggcctggcccgggacatgcgcgtgcgctgggcactggaggaactggaagtgccctacgacgtgcacctgctcaccttcgctgagctgaagcagcccgcgcacctggccaggcatccattcgggcagattccgacgtggcaggagggcagccagaccctgttcgaatccggcgccatcgtcctgcacctggccgaacggcacgccggcctgctgccacgcgagcccgacgcccgcacgcgcgcgatcatgtggctgttcgccgcgctgaacacggtggagccgccgattgtcgaacgctccatggcctgggtactggagcgcgaacagccgtggtacgcacagcggctgccgatgctcgatgagcgggtccggatccggctggcgcagctgtcgacgtggttggccaggagcccatggctggacggcgaattcagtgtgggtgacctgatgatggtctcggtgctgctgcggctgaacagcagcgggctgctcgacccgtacccacaggtggccgcctacgcggaccgggcgacgcagcggcccgcctaccagcgggccttcgccgcgcagctggcggtgttccagaacgcctag

SEQ ID NO: 501544 - DNA, 408 bp, Stenotrophomonas maltophilia
atggcagatgatgcaggcatgacgatcgcgcccagggccctgtacaccgccgcagccgcggccgtgctggtcagtctgctcgcctgggcggtggaatggagcgggatggcctatgtctgcccctactgccgggtgcagcgcacggtgatcggcattgtgggcgtgctgacgctgttcgcgcgaccgggcggcatcgtggtgccctggctgtcgtacaccagcggcgcgttcgccttcgtggtggcggcgatgcagcacttcaacggctggaaacgcatttccgcgggcgacttccgcttcaacgagcagtggtacatcgacccctggctgctgtcgggctgtgcgatgctgattctgatggcgcagttgatgctggtgcaggcggcgtgccggcgcaggctgcagtga

SEQ ID NO: 501545 - DNA, 831 bp, Stenotrophomonas maltophilia
atggctacggttaccacccgagacggtgtcgagatcttctacaaggattggggtccgcgtgacgccaaggtcattcatttccatcacggctggccgcttacctccgacgactgggacgcgcagatgctgttcttcgtcaacaagggataccgcgtggtcgcgcacgaccgccgcgggcatgggcgctccagccaggtgtcggatggccatgacatggatcactacgccgacgatgttgcggccgtggtcgagacactgggcacccagggagcgatgcatgtcggccattccaccggcggtggccaggtggtccgctacatcgcacgccacggcgagaagaatgtgtccaaggccgtgctgatcagctcggtgccaccgttgatggtcaagactgcagcaaatccgcaaggcacgcccaaggccgtcttcgacgatttccaggcgcaactggcggccaaccgtgcgcagttctaccacgatgtgccggcaggcccgttctatggttacaaccgcccgggcgcgaagccctcggacgcggtgatctggaactggtggcgacagggcatgcagggctcggcgaaggcgcactacgacggcatcgttgccttctcgcagaccgatttcaccgaagacctgaaaggcatttccattcccgtcctggtgatccatggcgacgatgaccaggtggtgccatacgccgactccggcgttctttccgcaaagctggtaaagaacggcaagctgatcacctacgaaggtgcaccgcacggcattccgaccacgcacgcggaccggatcaacgccgacctgctggccttcctggaaagctga

SEQ ID NO: 501546 - DNA, 312 bp, Stenotrophomonas maltophilia
atgaccctggtcatgatcgacgggaaagaggatcgtgagcactacctctttgatgcagaggcgttctatctgcagcggggcgcggtgcccacggcggttcctctcacgcagatcattgcggtcaggcgaacctccgacgtcatctacggacgctatgtctggcaggtggatttcagcagcgcgtcgggcaggcgcagtgtgcgcttcaccaccaacctgacactgttcaaccgcgatttcctgttgttcctggaggcggtgcggaaggccaatccactcgcaactgtcgaacaagcgggcctcttcttctga

SEQ ID NO: 501547 - DNA, 1470 bp, Stenotrophomonas maltophilia
atggcactctcaaaggcatcacatccgcagattgacgcgtcaaacccttgggcaggggatcccttggcgaggcagcccgagggagaggttctagccaaccttatatcaacactcggcgactctccattcgtaatttcgcttaagggcggatggggtaccggaaaatcaatctttctgcgcaggcttggcgcccaccttcaaggggccttaaagataccggttattcatatcgacgcgtggcaatctgattacgttgacgaccccctcctaataatggctagcgcgctaggtgacagactgggggaaatacaagatggccgtatcaccagggggctgagcacaattatctcggggcttgcagggtctgccggaaagatcactttgccagttctatcagttcttgcttctgcgcttctccctggcggagcaaaagcagtagagcttgcggcggcaatgccccagatcgctcagaacttcctagattgggatggcgagagaaaatctgctgaatccgactttcgcgccagcctaataaaagctaaagaaaagctgcacaagtctctaagaagtgactccgaactacccgttgttgtaatcgtagacgagctcgaccgctgccgcccagactttgccatcaagttcctagagcgaatgaagcatttctttagcgttgacgggatctgctttctgatagcgacagactatgagaacttgccaaacgccgttgaatccgtctatggccccaaggtggcgggagaactatatctaagaaaattctttgacttcgagttcaacctccctccccccgcagccgaagaccacgccacttatcttttcagcaccttccctggcgccgccgatccagcaagggccactgcggctaggaagaggctgctcacaatgggaggctaccaagaattgttcagtggcccacgcagcattctagagcaagcggaatacaccctactctttggctggactgcttccgcaatggagttgcagctacgcgacacgctgcaagcccacaccctcctgatggcattcgtcagaagctacccgaaagattcaatgagattcccctttgtagattgctttattgcttgcatgcgcttccgagatcccgaccatttcagaaagctcgtaacaactcatgcggggcagtactcaatttcggctgagcttacctcaagcggcaagatctccggcgcggtcttgggcgccttaaatcgcttcacagccatccgcctcgattcgtccctgttcaaatttgataacgaggtttctcgcaagatctacgataactcgaataatcctatacaagctcttgcatacgaatctcttttgaggcgaggcaaagcgacggcgaaccacagtgccgggattctcaccatagacgttgagaagtacatacgcgacgttataaaactttctgcggcgtttagccaagatgacccaatggccgatccctaa

SEQ ID NO: 501548 - DNA, 390 bp, Stenotrophomonas maltophilia
atggaagagaacacaggtacagctactttcaccgtcacgagtgcggaaaaccgtcttcagcacgtcaaggcccatgggcatcgcactgagtatgtttcgggcgctttcgcggccgacgtaggcggtggtcccactcaggtcgtgctatttcgcgacgtggtcccagatgtagttgaagtcattaatgtgaagaaggacgccgacggcaagcccgtttccatggcaactcggtccatcgaactgccggggggccccaggcgtgaagacgtggtgacgctcatcttgaccgatgaggcactcagaaatgttcacaacgtgctggcacagcatttggaacgagtgaataatcggaaaggggtgcaggccgcaccaaaatccggtcaggagtga

SEQ ID NO: 501549 - DNA, 1053 bp, Stenotrophomonas maltophilia
atggggccgaccgagttgcaagtgcggttgagcatccagccttcaaccacaataacggcgcctcctgagacactactgttcgtcagtcaggtcatcgaaactttggcaaatcccaaagagaccattggcagtagcgtggtgatctcacccattgatgagatgacgggtgacacgcttctcactacgaccgtgagttctcagctgttggacgtggaccacccaaacctgcctgaagtgaagtgcgcttcgtcttcagaagacgggcaagagtcgtgcgttgtccacgaacctacaatgggtgaggaggaaccggacgttgcctccgctcgtagaatggacgatacggagcgacgctctgatcccgatccagcaatgaacaagggcaagccacccattgactctgccgaacaaggtcccaatgatgggagcatgagcactccttcccgcgatgaacttgagctgcgattccagcttctggatgagcgactggagaacagctttagtcgctcgaatgagcgaatcgcaagtctcctagattctcagcagcgtttacaggaacggctggagcgacaagttgaatctatggcaagcttgaacgctaccgcacgcattgaatttgccaaagatcttaaattcgccgagaaggaaatagcggaaaaaaacgccaacgcacggattgaatttgcaaaagagcttaaagacgcagagagaaatatcgccgacaggctccaagcgtcaaactcgaatactgtcgatcaaattaaagccgaaaacaagtcactaaaatcgacaatcatcgtgacggcgatagggaccgtgttgacgattgtaatcggagttggagcattcaacgcaactgttttgtcaaacatggttgctagcttcgactcgggcaagagcgtcgcggaagacctgtcaaaaagctctaacgatctgaaggatgcaaccaaacggcaagaagagattgggaacgcacttcgggaagcagcggaaacccgggatagacagcctcaacccagcacccccaaagctgcgcagccggcaaaacgctag

SEQ ID NO: 501550 - DNA, 615 bp, Stenotrophomonas maltophilia
atgagcatcctcaacgttctgctcactcgcgaccacttggtcgtcgcggtagacactctggcagaggatgcccggacaggggcgcattccgcgggggcgaagctgctgctgatccctcagcacaacctggtactggccactcgcggttccactcagttcttccttcgcatatacgaattggcactgcaggccagcttccgtgcagatttcacaatagagcagctatctgccgagctggggttggtcttggaccagctatggccagactacgagaaagcggcagccgaagccggcctaccgcgtgagcagctcgggaccgagctggtgctgggtggatggtcgccaaagaacgggcggatgatggccactgcgtatgccaagagcgacagttcccggccctccgtcgtccagtccttagatggaggattggcctctcctggggagcctttggttggaaggccagacagtcttgcccccgaagacgtactcgctgcgggccggatccaagcggcttggctcaacaaacaggtagggaggcaggtggcaggtggccgcctcttggccgcagtactgcgcgaggggcaggcggtagttcaggacctaggaccgatctag

SEQ ID NO: 501551 - DNA, 270 bp, Stenotrophomonas maltophilia
atgaccaccgaaatcacggaaatcctcgatcgcctccactcctgcgaggctgccatcgaggtccatcgcggttacctgaaagccatggaatacgcgctgcgggtgtctgtactgacccaccccgcgccggagcaattgaccgaaacgtggatgcagctgctgccaggcatcgcagcgaagcatagaggcgacggaggcgagctcttcgctgccgccttcgagcagtcactgagacttctcaccgagcaaatcggcgacgctcgcccctaa

SEQ ID NO: 501552 - DNA, 2994 bp, Stenotrophomonas maltophilia
atggctacccttcacgagaccgcctacccgcgactgaagcctgatcccaccgccaaggaactggaggagatctataccccgaccgccgctgagattgcattcgccaagcagctgaccacccagccgggtccgcagctggcggtactgattcatctcaagctcttccaacgcttgggctacttcacgctgttggccgacgtacccgagcggatccggaagcacatcgccaaggccgcccgactcgggcgcgtattggacaccgaccagctcgaacgctacgacgcttccggcagccagcgccggcatatgccgcagcttcggcaattcatcggggtacgtcccctggataaatcgggcttggcttggctggacacagtggccaccggagcagcccagaccaagcacaccatcccggacatcgtgaacgtcctgctcgaagagctggtgcaccatcgctacgaactgcccggtttccgcactctggagctggccgccatcggcgcccgtgagcgggtcaatctgggctactaccgcagcatcagccacgcgctgacgcctgccacgcgcacgctcatcgacgaactgctgcgcgcaccggaagggtccaggttcaccggctggcaatcactcaagcgcgagcccggccggcccaccaacaaggaagttcggttctacctgcagcacatccgcatgctgcagcagttggccgaccagctgcctcccatcgatgtgccggtgcccaagctcaagcagttccgtgcaatggctcgggcctatgacgccagcgagctggccgaactggctccggacaagcgctatgcgctggccaccatcttcattcgcgcccagcatgccaagacactggatgatgcagccgagttgttcatcaagcaggtgcgcgggctggagaacacggcccagcagaaattgctggcctaccagctcgaacatgccaaacgggccgacttcctcatcggccagctcaaggaaatcctgcaggcctatcagctagacggcagcgatagtcagcgcgtggatgccatcgacaacagcctggaagcggaagtgtcgaccttgctggccgaatgcgaagaacatatggcctacgccgggaagaactacctgcctttcatgctgcagccctatggcgcggtcaggccgctgctgttcaatgggctggagctgatgaaacttcgggcgaccagccacgacgccggcatggagccgctgatcgcagcggtgctctcgctgcgcaaccagcgccgtgagctgatcgaggtcgcctccctcggtttggacccggaaaaggactttgactggatgtccaagctctggtgtcagcacgtgttcggcaagcgggccagtgcagccggcgccggctggatgcaccgtaagtacttcgagctggccgtgctggtgcaggtcaaggacgaactgaagtccggagatctcttcattcccagcagcgaacggtttgatgactaccgtgagcagctggtcgatgaagccaccttggcccaggaactggaagcctacggccaggtgtcaggcctgcccaccgacgccgagtctttcgtggcgggattacgtgcacaactgacctccctggccgatgaggtcgacgcgcgtttcccggagaacgtacatgcggacatcctggatgggcgcctggtgctgcggaaggggcaacgcgccgaagtctccagcgcgattaccacggtggatcgcctcatcgccgaacggcttccagaatccagcatcgtcgatgtcctgatcgatgccagccaatggctggatctgcaccgtttcttccgcccgatcgccggcaccgagagccaggtcgaagatctgccccgacgtgtgatcaccacgctattctgctatggctgcaacctggggccgacgcagacggcgcggtcgatcaagggcttcagccggcgccaagtcgcttggctcaacctgaaatacgtgaccgaggatgtgcttgagaaggccatcgtggaggtcatcaatacctacaacagattcgacctgcctggctattggggcagcggcaagagcgcatcagctgatggcacgaagtggagcgtctacgaggacaacctgctgtcggagtatcacatccgctacggcggctacggtggcatcggctactgccacgtgtccgacaaatacgtagcgccgttcagccacttcattccctgtggcgtgcacgagggcatctacatcctcgacggtctgttggccaacacttccgacatccagcctgagatcgtccatggcgacacgcaggcccaaagctatccggtcttcggcctggcccacatgctgggcatccagctgatgccccggatccggaacatcaaggacctgacattctttcggcccgaaccgggtagggcttataagaacatccaggcactgttcggggacagcatcgactggcaactgatcgccacccatctccacgacatgctgcgggtggtgatctcaatccgattgggcaagatcaccgcgtcctcgatcctgcgccggctgggcacctacagccggaagaacaagctgtacttcgccttccgggaacttggcaaggccgttcgaacgctgttcttgctgcgctacattgatgacaatgagatccgcaaaacgatccatgctgccaccaacaagagcgaggaatacaacggcttcgtgaaatgggtgttctttggcagccaggggatcattgctgagaacgtccaacacgagcagcgcaagatcatcaagtacagccagctggtggccaacatgatcatcctccacaacgtggaaggcatgagccggaccttggccgagatgaggaaggaggggattgaactgacgcccgagatcctggccggcctgtcgccttatcggaccagccacatcaatcgcttcggcgactaccacctggatcttgaaagggaagtggcgccgctgagctacacagccaaggtgcttgaacagaccccatag

SEQ ID NO: 501553 - DNA, 198 bp, Stenotrophomonas maltophilia
atggcgcgggagtcaggcagccgagtcctgccctccgatgagtgcgcgccgggagaggaacccgctgccattgcggagctctggcagaggttcatctacgcaccggcccctagcgccgcattgatctcagcgaaggccttctcaaagcgctccagcgtttcattgatggccgtagtttccgcggccagcacgtgctga

SEQ ID NO: 501554 - DNA, 597 bp, Stenotrophomonas maltophilia
atgcacagcctgattgtcattgcccacccggaacccggttcactcacccacgcgatcgcgcatcgcatcggcgacgccatctgcggcgccgacagccgtaacaccgtggcctacgccgacctgatcgccgaaggcttcgatccgcgcttcaaccgccacgaccaggcattgttccgcggcaccggcgcggtgcctgccgatgtcgcggccgagcacgctcggctggatgccagtgatgcgctggtgctggtctatccgctgtactggtggtcgttgccggcagtgctgaagggatggatcgaccgcgtcttcacccagggctgggcctaccaggatggcgccgacggcaaagtgcagaagaagctgcagcggctgcgcgtgcacctggtggccctcggcggcgccggcgcggagatggtcgaacgccgtggctacgctgcggcgatgaagacccagatcgacaggggcatcttcgattactgcggtgcgccggtgctgtcgtccgatctgctgctggacgccgataccggtgcggctgacgcgcatctgcagaccgcgttggcgatcggccgtaaaatcggcgctccgacgcactga

SEQ ID NO: 501555 - DNA, 534 bp, Stenotrophomonas maltophilia
atgcacgcacgcctgtctgcgctgttgctggccctgctgtgggccgtgcccgcatggccggccctggccggtgaactgggcccggccgaatcggccgccctgcgccaggatgcgcaggcgatgatggcggcattcgcgcgcggcgacaccgacctcatcatcgcgcgcacccatccgagcctgaagcagctggccggaggcgacgaggcctatgcacagatggcccgcgacacggtcaaggcgctgcgcagggccggggtcagcgtcatcagcgatgaagccggcgtaccgggccgcacctacgcggccggcgacgaagaagtctgcttcgtgccgcgccagtcactgctgcgcgtccgcgaagcaccgatgcgcagcacctcgttcctggtcgccgtgcgccgcaccggtacaacgcaatggcgctacctggacggcgcggcgatgctggacaacccggcactgctgcggcagctgctgccggcgctggagccgggcgtgccgctgcccagcggtgggatggaagcgctgtag

SEQ ID NO: 501556 - DNA, 765 bp, Stenotrophomonas maltophilia
atgtccgagccgaccccgccgcgccgtcccctggccaccttcctgcgccccgcgccggaaggcgaggccgcacctgagaccgacgcgcgcacgcccgaaccggcaatgcatgacgttgcggcgccgccccgcgacccggtcgatgcgcccgtgccgcccagggcagagacacaaccgttcgacgacgccgtcatcgccgacgaggcggtcgtggtcgaacccgtggtggcggccccggtgccgcaggcggtggccagcgatgcgccaagcttcctgggcacgtcacgcccccgcgtactcccggtgccgcgctggcactgggggctggtcgccgcgctggcactgctgctgatcctgcagagcgtgctggccgatcgtgaccggctggccgccgacgccggcaaccgcgcctggctcggcgcactgtgcggcgtgctgcgctgcagcctgccggtgtggcacgagccgaccgcgttcaccatgaccagccgcgagatccgccccctgcccgggcaggccggtgtgctgcaggtgcaggccagcatccgcaacgatgcgcgctgggcacaggcctggccggacctgcgcctgtcactgtccgatgccgatggccgggtgatcggcagcggcgtgttcacgcccgcgcagtacctcggcgaaagcccgggcacgaccgtgctggaaccgggccagagcgcgcgcatcgcgttccgcgtgcaggagcccgccgcgtccaccgtcgcattcaccttcgacttcctctga

SEQ ID NO: 501557 - DNA, 1170 bp, Stenotrophomonas maltophilia
atgacccgcacgcccctgctgctcgccctcggcctggtgccgatccttgccacttccgcctgcaacgccgccgacccggccgccaacggcgcccagaccgcagcgcccgcagcttccaccgctgccgaccagcgcccgttcaccgccaccgaagtcagccgcttcgaccagccatgggcgatgaccttcctgcctgatggcagcctgctggtcaccgagaagcgcggcaaactgcagcacctggacctggacagcggccagaagcacgagatcaccggtgttccgaaggtcgcctatggtggccagggcggtttcggcgacgtgatcctgcacccggatttcgcccgcaaccacgttatctacctcagctatgccgaggaaggcacgctggatacccgcggtgctgcggtggcccgggccaccctggcgctggatgccaacggcggtggccagctgaaggacctgaaggtgatctggcggcagagccccaaggtcagcggcgaaggccactacggccatcgtcttgccttcggcccggacggcaagctgtggatcagttccagcgagcggcagaagttcgatccggcccaggacatgggcagcaacctcggcaagatcatccgcctgaacgacgatggcagcctgcccgccgacaacccgttcgcttcgcagggcggggtggccgcacaggtgtggtcgctgggccaccgcaacatcctcggcatggccttcgatgccagcggcaagctgtgggctcacgagatgggcccggccggcggtgacgaactgaacctggtcgtgcgcggcgccaactacggctacccgatcgtttccaatggtgaccattacgatggccgcccgattcccgaccacgacacgcgcccggaattcgccgcgccgaaggtgacctggacgccggtgatctcgccggccggcttcgtgatctacagcggcagcctgttcccgcagtggaagggcagcggcttcatcggcggcctgtcgtccacctcgctggtgcgcgtggcctttgacggcgacagtgcacgcgaagccgagcgcttcaacatgggcgagcgcatccgcgaagtggaacagggcccggacggcgcgctgtggctgctggaagacggcagcaaggcacgcctgctgaagctcacgccgaagacctga

SEQ ID NO: 501558 - DNA, 237 bp, Stenotrophomonas maltophilia
atgcataacgagagcccgctcccgatcggtagagtcgagccatgttcggcggatgagaagcagccgaccagcggtcggctctacaacaatgaagagcagccgaccagcggtcggctctaccagggcggaagcatcgagcagcagcgccagcgtgcgaagcgcacggcgatgtgggtcggcgccatcgccgtactggtctatgtcggcttcatcctcagcggggtgatcgggcgatga

SEQ ID NO: 501559 - DNA, 933 bp, Stenotrophomonas maltophilia
atgtgctattccgcccagatcaccgccgcctatcagaagctggtcaggatgaccggcgccaccctgtcgctgcaggagttcgccgcgctctacgcgcacgacccgggcaagaagcggcccaagacgccgaaggccatggatgacgccttccgggccggcgcgagcccggcggagcttgcggtgtgggccgaggtcgagcaatggaacagggccgaggccaccatcctggagcaggagctgtttgccaaccgcaagcggctggccgacgctgagcgcgcgctgcaggtgaaggagacgaagaaggcccgcgaggacgtgcggattgccggcaacaagatcgagcgggccaaggcgcggctggcggatctgcagcgcgtcgagccgaaggaccgcgacagccgcatattccccggcgtctacgccccggtgatcgtctccgatggcgggaagttggtcatcaagccgatgcgctaccagtgccgcctggccgggaagccggccaactacgaccagcgcttccccggcacctacaatgcccgtcgcgacagcctggagaagttctgggcgccggcattcggccacacccacggcctgatggtggtcgacaccttctatgagaacgtcgagggcccggacgggaagagccaggtggtgcagttcaccccgcgcacgggcgagccgatgctcgtggcgtgcctgtggtcgcactggagggacccggccggcaaagagccggatctgctgtcgttcgctgccatcaccgacgaccccgagcccgaggtggccgccgccggccatgaccggaccatcatcaacatcaagccagagcacgtggatgcctggctcaatccggattcggccaacctggccgcgctctacaggatcttcgacgacaagcggcacccgttctacgagcaccgaatagctgcgtag

SEQ ID NO: 501560 - DNA, 468 bp, Stenotrophomonas maltophilia
atgtaccaactcaccggaaatcccgacatcattcgctgtgtcgagaccggcgccttcattccgcgcggtcactacctgtggccgacggaatggctggagcagaacacgcctctcccggcactgcccggcctgggctttgagctgcacactcccgcgcactaccgctacatccgcgaccaggcgttcgcgtggatgcgcgccgaagcggttgagcgtggctacgacagcatcgagtcgtgcgcgagctactacaacagcggcgtggcccgataccgcgcggaggcgcgggcgatggttgcatggcgcgattccgtgaaccaggcgctggagcagctggtgctggcgccgcctgatggcatcgagacctgggagcaggtgcgcgcgctgttgccgcagccggagacgttcgcctggccggagaaggcggagttgccgctggatggattggcaccgcagcccgtgacttga

SEQ ID NO: 501561 - DNA, 1242 bp, Stenotrophomonas maltophilia
atgccgcagaaactcatcgatcaaaccaccatccagccggacggccgccccggcgacgacgcgttcaccgcgttcgcgacctgcaacgagaacttccaggacactgagcagcgcctgacggcgttgggtgcccgcatcgatcaggaggccgccgaccgcgggcagcacgttgaggctgagtccacgattcgcgcagctgcggactcagcactgtcccaatcgattgccgcagccagtgcacgcatcccaggtgacaactacctaatcaacggtcagatggacgtgtggcaactcggtgatactttcacttgggcagagtctcgccgttacactgccgaccagtggatcgcgtgggccggtggtggtaagcagctgttcgtggaacggcgcaacatgttcaacatcggtctgcctgccgcagtcgaaagtgtgcggccaaagaacgccatgtatatcgaagttagtgttggcgggacaggcaacgatgcttttgcccttatccagcagcttgttgaaggtgtacacaaactcagcgatagttctatcactaccagcatggtggtatgggctgacaaggcaacaaaaattggcgttggccattggcagaactacgatgatggtgcacatgttaccgtggttccgccgacgctaatccaattgcagcctgggtggcagtatgtgcaagtgacaaagcaaatgcctgctgtttctaaaacctacacccacggacctaacagtcacatttcgttgaacatttggctggctagtggttcggcggctggcgcacccggtgctggcatcgaagcgttcgctatgtggctgactaacgtaaaaatggaagcgggcactgccgctacggcgtatcgcccgcagcgggagtccgatgttttggtgcagtgtcagcgctatttcgaaaagagctacaacctcggcactgccccgggcactgctacgcgggtgggcggccacgcggcaggactgcaaaccgggtatctcctgagcgccccggtggtgcggttcagtcagaggaagcgcacctctcccgccatcatcgtttacaacacccaagatggcgctgcgggccagatgtcggagaacgacgttagcgggcagcaccggataaaccatccggccctgctcgacgccatcggcgcgatgtcgtttgaggcatacgtggcaaacggtacgggtacgcctaacaacgtcgcccgattccagtggacagcagacgcgaggctctaa

SEQ ID NO: 501562 - DNA, 4719 bp, Stenotrophomonas maltophilia
atgggcctgattaaggacgcgccgctgatcatcacaccgcacccggtgacgctggagggccagcgtaccctggcggcgcagttacaggagggtgagcggctgggcggcttcctggcacgcgtggtgcctgactactccagcgacctgtgggaggtgcgcatcaatggggtggtcgtgccgcatgaggtcatggaccgcgtgcgcccgaaggacggaacggtgatcgaggttcgaggcgtggtcaagaagaccgcgctgatgatcgttgcgctgatcgccctgaccgtcttcaccatgggtgtcggtacggccatcgtggccgccggctacagcgcagccgtcgccggcctggcgcagggcgcgatctacgccgcaggggcgctgctgatccagaaagtgctggggcccaagcggcccaagcccagcgccagcgatgccagcccggtgtacaccatcggcgcggccaggaatcagccgcgcccgtaccagcccctgccgctgctgctgggcgggccattgcgcatcgcgccggacgtggccagcaacccctatacctggtacgaggccgacgaccagtacctcgccatgaccctgacggcgggcatcaacgtggggcgcgtggaggccctgtacaacggcgatgcgctgttgtcgtccttcgagggcgtcacggtgtggcacaacggcttttccgagatgcccagcgaggccatcccgctgtacagcaatgccgacacgatcaacggcggcgcgctggaagcggagaagggccaggccagcccgtgggtgcagcgcaccagcagcccgaacacgatccgcctgaaggtggacgtggacttcatgctgttcgacacgaccagcaagggcaagccgaaggacaaccgggagacgattgagatccagtaccgcgccgtcggcatcgccaactggagcttcttcgggtcctattcgatcgtcagccgatcgcagaagcagcagcgccgcagctactcccgggatgtgccggaggggcagtacgaagtgcgggtccgcattgccggccacaacaccgacggcagcggcgccaccagcgacttcacctggtccaccctgaccagcatccagaaggacaccgccgactacgccggtctggcccgaatcggcatccggatcaaggcaaccgggcagctcaacggccaaccggatgagatccgctgcgtcgcctacgccgagccggcaccggtctggacggaggcggggtgggcgacgaaggagaccaacaacccgggcgcactgatcctggcctatgcccgcggcttcagggacgagcacggcaagctgatcgccggcatcggcctggacgatgtccagatcgatatcgaggcgctgaaggccttcatgctgttctgccaggccaatggctacggctactcgaactacatcaaggacgtccgcaatcacgacgacgtgctcaatgccgtcgcgctggccgggttcggccagatcacctgggccggcggccgtctgtcggtggtgtgggccgggtcggagcagccgctgtccggcgtggtcaacatggcgaccatcaagaaggggcaattccaggttgactacaccctggccaacgccgccgacgggatcgagtacagctactacgacgccaccgactggacgaccaagaccctgcgcgtggccgcgcccggcgtaaccaccatgctcaacccggccactgtggagggcgagggcatcaccaacgaggcgcacgccgcgcggatggcgcgctaccacctggcgcagtccctctaccagtacaaggacatcacctacagcacggacatcgagcacctgagctatcgtcgcctgtccctgctggccctgcagcacgacctgacgcagtggggcgccggcggtcgaatcgtttcggccaccgcggccaacggcgttgtcacgctgcggctggacgagccggtccaggcaccgaccaacggcaacgcctggatcggcctgcgcatccccggcgaacgggtgtaccgcgtgttcggcgtgcagccgttcaccggcaccagcgacaccatccgcctgaccggttcctggccaggcgatgcgccgctgcctggcgacacaccggataacccggctcacgacaccatctggatctacgacttcaagcagacgccggggtaccgggtccgcgtggtcggcatcgagcccgagagcgacctgaaaggcgccaaggtgtccgtggtgcccgaaccgccggagttctggaactacgtgctcaccggcgaatacgtcccgccggtcaataccaatccgatcaccagccgcccgattgccagcggcctggccatcactgagcagcaggtggtgcagggcgatacggtgttcaccgagctgaccgtcaccttcgagatcagcggcccggtcggcaacatcgtggtgctggccgccggcagcgacggtgtgctctccgaggtggcccagaccaccacccgtacggccacctggcgcatcagccatgcggaccagtacaccgtggtggtccgaccgttcagccccgacggccgggccggcgtcgcagcgtcggtgacctacatcacggccggtgcggatgtcccgccgcgcctggtggacttcttcgacgtggacgagctgtccggcggcgtgcgcatgtacacctggggcttcctggccaacagcatccagtcgccagactttgccggcgtcgagatccggtacatgcagggtgcggtgctgcgaccggaatgggagcagatgatcccgatcgggggcagcggctaccacgcagtgccattcgaagccgttgtgccggagtcgggcgactggactttcgcctgccggagtgtgaacacgtcgggggagctgtccaccgaggcccgtgtcatcaccaagaagctcggcgccaacctcggccaggtgatcgacaagaccattcaggagctcatcgacgcgcagcagcgcatcgaccaggagaagatcgagcggttcaacgaggatgcccgtgtcgcgagtgaagccgcggccgacgcaacaaagaaggccaacgacgcgatggcggcggccattgcgcacgccgatgccatcggagcgatcgtcgcggatctgaccgaggccgacgaatgggaggctgggaagacctacccggtgggcgacttcacccggcacgacgggaagctgtaccgggcgctgcgcgagaacaccgacgccgagcctggcgcctccccggctgattggcagctggtgggcaacttctctggcgtgggcgaggcgttggctgcgtcgatcgacatggcctaccagaacgcttcagacctggcggccgaggctggtcggatcaacgccattgtcgcgcgcatgccagcaggtgatggcaaggtggcgtcggttgaggcggtcgacgcggtcagcggccgcgtggaggaaacggaagagggcctgcgcgcggtcggagaccgcacgtcgtcgctggaagcgcagatgacgtacaagcacgccggcgaccgcgattggaacgcgggtgaccggaacgtctacgccggcgtgcgcacctggcagtcggtcatggtccagggtgatcgggcggtggccaagaccgtcgattcgctcaacgtcgagctcggcgacttcaaggccagtgccacgaagtccatcgagctgatcgctaccgagcaggccagccaagccgaacagatcgagcacgtgggcgcagagctggagggcaaggcatcatccgactacgtggagcgcattgacgcccgcgtggctatcaccgagaacggcatcgaggccgtcacgggccagcttgcgtcggtgaaggcggaggtgtccggcaaggccagcgccgaagtggtccagggcatggaggcccgcgtcgtgcagaacgagaacgggctgacccaggtgttggcgcgggcgttcctgaacgtcatcgccaacagcggcgccggaccgctgatcggcggcatggtcatcgacaacaacggccaggtcatcaacacccgtttcgccagcaacacgttcgaggtcatctcgcccggggccagcgagggcatggagtggcgcgacggcttcctgcgcgtctggaagggcgccgcccaacgcatcatcggtaccaacttcggcgctgccggcgacaacctggttgactacttcgggccgaacgtcggcgccggggccgcagcgaagtccaacgcggtcatgtggatggacgccaacggcagtgcctacttcggtggccagctgtcggcgggcatcctgcgtaacgcggtccagacgacgaccacgcagaccgtcggcgtggagctggtcaacggcccgttcgccaccaatggccgcgtgcggagcgtcaccgtcagcttctcccgccggcatatccggaccaagaccacctacggcagcgacggctttgtcgcgggcgcgggccagaacacggcacgcgttgagatctatcggcgggtgggggagggggctgaatcgctttggcaggtactgaacgtcagcggttcggtgatgatcctcaacgagcaggacggcccggacaacgccacgtccacctggggtgggtcattcaccgtgaacgacaccagcaccagtgcgcagacgatgacctaccgcgcggtgatcaccagcttcaccgagcagaccgtaacgcacacctccggctccttccagcagcagtccatcacgcagagcctgtcgatcatctcggtcgagaactga

SEQ ID NO: 501563 - DNA, 393 bp, Stenotrophomonas maltophilia
atgcggctggcagatgtagaagccttggtgggcgtgccgtactgcgagcacacgtgcgattgcgccgatttcgtggtgctggtccaacggcagctgttcgggcgcgccgttcagctccccaacggtcgcccgagaggcgtggtgggccaggccgccattggcgagctgtcgaggccgtatgggaccgcggtggccgtgccaacggacggtgacctggtgctgatggtcgagcacgggcagaagcgcgccggccacgccggcgtctacttccacctggcccatgaggggtgggtgctgcattccaacgaaaagaacggctgcagcgtactgcaccgcgttcgtgacctgccggagttcggcttgaggattgagggttactacagatgggcctga

SEQ ID NO: 501564 - DNA, 462 bp, Stenotrophomonas maltophilia
atgagcagtttcaccgagcgcaagcagcgcatgaccgacaccagtgggacgctgctgttcctgtccatcacctcgccgtcgcttccgggtccgctgcgcatcgtcaacgacacccaggactgggtaagccagggcattccctacatgggcgtgccctttggcttcaaattgcccgatgacacccgcggtcagtccccgcgtgcccagttggtgctggacaacgtcgggcgcggcatctccgaggacctggaggcgctggggccgaacgagctgatgatggcgcggctgatggtgtcggaccgtgcagaccccaacctgtacgagcgggattactacctgccgatcaccagcgtgtcggtggccggcgccaccgccaccgctcagtgcggtgtcgactacctgatgcggcagcaggccgtgcgcctgcgcgccaacccgttcacgctaccggggatcttctga

SEQ ID NO: 501565 - DNA, 276 bp, Stenotrophomonas maltophilia
atggagcgcggcgcgcccaagcagcgcttggagaacagccaggtgctgatcaagcaggccatgacgctctacttcgccagcatcgcggacgtgaacaccttcgatgcctggtacttcggcgagatcaagcgcattgggtggttcacccttgtgcacccttacacgggggaggtgatcaccgcgcgcttcgagaatggcgccctcggcgatctggtgcccgaagagaagctgcccgaggactacaggatggatgtggtcgtggagtacatgagatga

SEQ ID NO: 501566 - DNA, 2772 bp, Stenotrophomonas maltophilia
atggctgatccttcagcaaatctgcgcgtccgcatcagcgcggacctggccgacattcggcagggcttgggcgtgctcactcgccagctgcgcgaggtgcgcaccgaggcggccaggccgctgccgacgaagaacaacatcacggagctgggggtctctgcagggcagacggcgcaggcgatgcgccagctaccggcgcagttcaccgacatcttcaccagcctgcagggcggcatgcccttcttcacagtgctggtgcagcagggtggccagatcaaggacagtttcgggggtgttgagccggcattgaagggggtctcgtcggcgctgctggggatggtgaatccgtataccgtggccgcggcggctgtcggattggtggtctacgcctggtatgacgccgagcagcaggcccaggcctacacgaaggcacttgtcctgtcgcgcaatgaggcggccgcgacgaccctgacgctcgtcaccatggctcagaagaccagcgacgcgctgcaggttgccgccggcgttggtgccgaggcggctcaggccgtcggctcgaacgggaagattgccgggcagaatcttcaggacgtggccaatgcagccgtggcgatgaaggaaatcagcgggcaggcgctcgatgaaaccatcgccatgtacgcaaagctggcggaagacccggtcaaaggaatgcagaagctcaacgagcaggtcaacttcatgaccctggcgctctacgagcaggtgaaggcgttgcaggagcagggccggaatcaggacgccgtgactgtgatcacccgtgcagcagcggatgaaaccgtcatggcgctcgctcgggtccgcgccagccagaacccggtgatccggggattcaaggacctgtgggtcgaggccacgaaggcgtggtcggcgatgcaggtgaacgtcggcctcgggcctgctgccgcacagatgcagcagctggtggcagaaaaccagcgggaactcgagaagctgaacaatctggccaacggtacccagcgcggcctaccgctggcccgtaatcctattgccctggcggcgatggagaagtccatcaaagaccggtcggagaagatcaaggcattggccgctgatctgatcaaagagcgcaaggatgcggaggtaaaagctgctcaggctgcatcgaccgatttcatttcggagatggattccatcatcgagtcccaggccagcaaggaagagaagaagcggcaagaggtagagcgtgtcaatggtgaagccgcagcggcccggcgcaaggcccaggcgtcaggcctcattgcagaggcggaggccatcgagaggcggcgcgccgccgcagtcgcggccattgagaagaagtaccgggaaaaggcagcgaccggcaccggcgcagcatcacggtccgccggcctacgcggtttcaaggatgatctggtagaggaacaggcgcagatcacggcgagcacgcagatgctacgtgcacagtactcagcacgcgagattacggcgtccgagtactacagccgtatgagggagctgctgcagcagggaaatgacgcgcaatctcgctcgcttcagcgccagattgaattcctgcagaagcagggcgttagcggcaaagatgcaatcaacgtcaaccgacagatcggcgagctggaagcacgactggccaagttgcgtatcgaaggcgccgctgcagtggaggtgcttgcgaaagaggaacagtcggctgccaaggcgcgggagaacgcagtcaaagcctacgccagtgcactggatgccagtaatgaggcgctacggcgccagctcacgacccaggcgcagcgtgttggcatgggcgatcgcgagtatgaaatacagcagcggatcaacgaagccatcgcggacgaggcggagaagctccgagaactgagcctgcagcggaacgcggatcagatcgatcagatcaccttcgaagaagaaagggcgctgctgcatgccaagacgctagaccgtcttcagatcatcaagagcggctacgacgagctgcagcaggccgagggaagctggctggcaggcgccaccgctgcctgggcgaactaccagcaggaggccggcaatgccgctcggcagatgggcgacgtggtcggaagcgccatcggtggcttcgaagacgcgtgggtcaagttcaccacgaccgggaagctgagcttctccgacctcaccaagtcggtcctggccgatctggcgcgcatcggcgcgcggcaggcggcaatgggaatagtgaacatgttcgccagtgcctggggtggcggtgtcaccgctgcgggtaaccaggcggtcacctccggcaccagcagcatcaataaccagctgttccagaacatgaggggcggctactccaccggcgggtacacgggtgacggtggtgttcttcagccggccggggtagtccataagggcgaggtggtctggtcgcagagggatgtggcgcgcgcgggcggtgtcgaggtggtcgaggcgatgcgcaaagggctgaagggctatgactcgggcggagctgtggctactccggtcggttccggaatggccgccggcgcgatcaatgttcgcgtgatgaacgcgccagcgggcaccaccgccagcgcgtctcgcaacagtcagggcggcttcgacattgaggttctgctgggccaggtcgacagctacatcggtggccaggtcgccagtggtcagggatcaacgtatgcagcaatggggagccgattcggcttaaaggactcggtgtga

SEQ ID NO: 501567 - DNA, 195 bp, Stenotrophomonas maltophilia
atgacctacaccctggcacagctgcgagccttcaccgccgcagctgcgcaggttgagcgggaccgcatcgcggaattcgccgtggccacgcgcatggctatggccgccccggctgccgactggcagatgtacctggctgctctgcgcggccaggccccggcacagcagcgacaaggaatatcgaacgatggctga

SEQ ID NO: 501568 - DNA, 411 bp, Stenotrophomonas maltophilia
gtggccgatgatgacgtgatcgccccgccgacgcgcacggttcttgtacgtggcgagaaggtggttgtgggtcccctgcgcctggaacagatcggtccgttcatcacggccagccgcaccatcatcgcccgagtggcgatgatggccggtgtggtcgagggcgccgatcgtgctggcgtcggtgccatcctgctcgacctgctcgagcaggacagcaacgagatcgccgcggctttgggggtggcaatcggacgcgaggcggaatgggttgcgggggcaacgctggacgagatcgctgacttgctggaggcggttgtcgggctcaacagggattttttcgccctccgcctgcggcggcttctgctgcaggcgaagcttccggcggaagagagtacggcctcgccgacctga

SEQ ID NO: 501569 - DNA, 756 bp, Stenotrophomonas maltophilia
atggccgaagactacagctacctgggcgcaggaatcgtcctgatccgtgagtggaacaccgctgatccgttcttggagatcggcaatatctcagcctataccgtggcgccgcagaccaataccatcgagctggccgactaccagaaccccggcggcggcacggccaaccgtgtcgatcgcgtgaccggctacaacctcaactacacgttccacgacttcaacccggagaacttcgcccgggcaactcgcggcaaggccagcagcatcgccgcgggtaccgtcaccgatgagccggtgctggccgtgccgggcagcttcgcgccactgtcgcgcctggccacggaggtgaccaccgtgaagccagcaaccggaaccaccgcctatgaggccgggaaggactatcgtttcgagcgcggcatgctgttcatcccggtaggatctgcgattgcagcaccgtccgcggccggcaccccgaacatcaaggtcacctacaagaacgcggacctgggccacgttgaagctgcggtcacctcgcagaagttctacgagatgcagttctacggtgccaacgaggcacgcggcggcaagttggtccgcctggtagcgcacaaggtggccggcggcgtcatcgagagcatgggcctgatcggcaatgagttcggcgcgggaagcgtgcccggcgcgctgctcaaggactcgtcgaaggccacgggcaacgacaagtcggcctacttctactggcagcaggagaagtaa

SEQ ID NO: 501570 - DNA, 333 bp, Stenotrophomonas maltophilia
ttgaaccagaaagccttcatgcaggccttcgacgcagtcgcgttcgatgccttccgcgcagccggcgtcgccgatgctgcccagtacaaagaaccgggcggcacggttgaggtgccgtgcacagtgctgctggacgaagccgtggagcagttcacgcccgacgatgtggcgcccatcgcgaccaccgttgatcgggtgacgctccagttggccgaaatcaaccctcgcgcgggcggtgtggtgcggattgagggcaccggccgccggctcaaactggtccagaagatccacgccgacgaatcgacggcggtgtgggaggtggccaatgtctga

SEQ ID NO: 501571 - DNA, 216 bp, Stenotrophomonas maltophilia
atggcatttaccaaagaacaggtcgcgaagctggaggcagctatctcggcgggcgtcctgagcgtccgctacgccgaccgaactgtgacctaccaaagcctggactcgatgcggcggctgctgaagcagatgcgggacgagattggccaagcatcaggcgcgccacggcgccgccgcatcgtgcgcctctaccagtcggggaccggaaatgtctga

SEQ ID NO: 501572 - DNA, 288 bp, Stenotrophomonas maltophilia
atgcgcgtcatcgtcgttacatccgctgcgctgctggccgcctgccaggccgcgccggtccagccgaacccgccgccggcagccgtcatcacaatcccggtggccacctacgtgccgatcgatggccagctgcgcaagcgctgcaagtgggagaaggaggcggagccgtctgccgtgttcgaggtgagcaacggccggaagcgttgcctgctgcagtacgaggcgcagctcgacgccatcgaccaggtgcaggggaagccggcaggggacggcgcgggcggcggctga

SEQ ID NO: 501573 - DNA, 456 bp, Stenotrophomonas maltophilia
gtgactgagcccgtgagcacactgaaaaccatcgtcgggacgttcactgcggctgttgtggcgccggcaacggctgatgcgctgcgggaggccgaacgggtgatcctcggcgtaccgcagtccgtgctgttagttgccatggcgggagcgctgatcggcgtcctgctactgccagagaaggacgcggagcgggtagccgctgacgccagccgccggcgcggccatcgcctcctgcagaccgccgcgcgctgggctgccttggctgtggcggtcgtcgcctacgccatcgtggccgcatgggtcatcgcggttgccgcgtccatctggccggcgctggcgggcgccccgcagctgcccttggccggcctgtccggcgtcctgatccgccggctgttgcccggctacgtgcgcatggtggagcgggccaccggcgccatcggaggcgataagccatga

SEQ ID NO: 501574 - DNA, 489 bp, Stenotrophomonas maltophilia
atgacgcagatcactccccatctggctggcggcgtgaacgtcgtggcctttctcgacatgctggcctggtccgaagggacggacaacggcaggcagcccacgaacgaccgcggctacgacgtgctggtcggtggtggcttgttccggggctacgctgaccatcctcgcgtgctggtggacctgccgaagctcaagatccagtcaaccgcagccggccggtaccagctgctgcgccgctactacgacgcgtacaagaagacgctcggtctcaaggactttttgcccttgagccaggatctgattgcgctgcagcagatccgtgagcgccgcgcgctgccgctgatccaggcgggcaagatccgggaagccatcaaggcggtcagcaacatctgggccagcctgccgggcgctggttacggccagcacgaacacaagattgccgacctgttggccgtgtaccgcaaggccggcgggacggtggtgccgtga

SEQ ID NO: 501575 - DNA, 1347 bp, Stenotrophomonas maltophilia
atgaagatcagaaaggttaaatggaaggaccatccaattctcgggaacttgtctctagatttcacgaatgacagtgaccaggcgtacaacaccgtagttttcgctggtgaaaatggcacgggaaaatcgacggtcctcgcgcacttgagctccttcttaagcagaggccccttcgagttcttcgaattcatcgagtacgaagttgacgaactgaggtatacagcgagacctcccacttataatcatcatccatttttcttttcagtcacagcccctgattacaatgtcattgatataaattgggaccgccacaatagtccacataaaattgatgagagtgattacgatcccagaagatatggctgcgtctattcgaaagcacgcgccgattacaaaaccggcgggataaccaatatctcaacaagctcgattgactccgagaagtatgacattgacgagaatgatgatttcacgagcttaaagcagctactggtcgatgtaaccaattccgaccagacatcttatgccataataaatcaagatcgtgggcccaaccctttatcttgggacgaattctacactaaatccaagctgtacagatttaaagaatcattcaacaatttttttgacaatattaagttctacaatatcgtcgatgaaaacggtcaaaagcaaattatttttgaaaaatctagtaaatatatatcgatcgacaaactaagcacgggcgagaaacagattgtgttccgtggcgcccatctgcttcgaaatagccgcatattactcgatggcgttatttttattgacgagcccgagttaagcatgcacccaaaatggcaagctaagattctttcttactatagaggccttttcaccggcaacgactcaagtcaggcgcaaatgttcttcgccacccattctgatcacgtcgtaaaggccgccatgtctgacagcagcacagccgtagtcatcactttatttagggatggagacgaggtggcttacgaaaagcataacagttcaacgattctgccttcaatcaccagtggcgaggcaaactacaaggcgttcgatttactgaccacagattttcacattgaactttacggacacctccaagaaaaatattcaaaaatttccgtgaaatcttgtgatgaattaatcgcccagagcactcactatgatgtacttttgcatcgaaaaccgtcttcatttggatccacatcctatgagacgctgccgacgtacattcgcaatgcgattcaccaccctgacaatgggaatgattacacggatgttgaatttcgcagatccatcgaattactttgcaagttgtgctcgcaataa

SEQ ID NO: 501576 - DNA, 762 bp, Stenotrophomonas maltophilia
atgtcggcggtagccgcgcccgcagcggccctgacgccgtgcggcaactgcggcagtgacgaagtgcgcatgcgcgcgcggggcagcgccagcagccggcgcaccgcgcaggtcgtgtgcgcgcgctgcagcgcccagagtgagctgtgcgtcggcgcagatgcggaagctcaagcggccaaggcgtggggacacaaacaccacgcgcctccggcgccgccagcaacgagggtggtgcgcgaccgtataccggtgccagaacccaccctgcagcgtgacccgctcgagctgatcgcccgcatgctggtcggcgggagcttccgcgagccatcggacggccggtcaagcatgccgccgcttacgtccgccgatatcgccggtgccgtcggcatgatgggcaattccttggccaaacagatcgtgctggcggtggcgctgcgcgggcagggggtgtcgctgcccgcgctggggcgctccctggcaaggcgcgtgatgcggcagattcagtggcaacggcgaagcggcgtaaagcccgcgctgcgaatggatgacccggccgaccgctggcgcatgaggcttgtgctacaggacgcgctaaacgagctggtgtggccggaagggaagatcgccgcgcaggatgctgccaaggcggccaagatgcggaaggcggactacctgcgtgtgtacgggatcgctgtgtccacaatgcgacaagcactcgaggaaggtcgaaaagaattctgtggcaggttgtttaactaa

SEQ ID NO: 501577 - DNA, 243 bp, Stenotrophomonas maltophilia
atggctgaccatccgagccttgcggaccgcgcagtgcatgcgctggccgaagttgcggcaatggatcgagacgtgcgcagcaatgatccggaatgccttgtcgtgtggaacctgaaggacgaggcccaacagactttggccgaggccttcacccgcgtggctcgccttgcctctctggcccaagcggtgcgcagagacatgcgccaagcaattgaggccgcgcagcggccggagggggagtga

SEQ ID NO: 501578 - DNA, 531 bp, Stenotrophomonas maltophilia
atggagccggctgaaatccgcgcctaccagcggcagctgctgctgttctgcttgggcatccacggcgagagcactgcagcggaggccctggagctgatgggcaacgccgcgctcgagtcaggcgcgccgcgcgaggtgatgctgctgagcacggccgccgtggctggccttttgcgagagctggacggtgatggcctggtgcgcaggtgcgagaaccgcgacagtggccgcgatgggcggccggtggcgacgtgggcggcgactgaggccggccgcgtagagcgtgcgccggcgccgccctcgggtcagcagcagctggccatgccaatgctcgcgccaccatcggggcagcgcacgcgcggcgggttgtccatggaacagctgatggcactgcttaacgtcgaattcgactgcatgctcgagcagatggaccgcgagcaccaggccgcgcagcaacgcgcccggcaggagttcgacgcattccggcagcgagcaatgcgcgtgtggagcgctatggaggcatctgcctga

SEQ ID NO: 501579 - DNA, 615 bp, Stenotrophomonas maltophilia
atgtcatcgacgtcgagttcgaacccgtccaccactgagcccgaccagcgcgcggtgagcatgctgtggacagtgtgggaacggatggccggcatgtttcccgggaagtgggtgcgtgagaacggctcagccccagtgaacaacgcgggcagcctgaccaccgccggtgaattgtggttccaggtgctggttggcatcacaccgcgacaggtagccgacggtatgggcaactgcctgcgcagtgcgctgcagtggccgccgaaccccgggcagttccgggccatgtgcctgggcgtgccgtcgctggcagaggttgatggtcagatgcgacccggccaagcacatagcgggttcaccgtgctggtgcggttgaatctggacctgcacgcctacgccacggccgagagcggcgcgcagcagcagcgcatgttggccaacgcctacgacagggcggtgaagcacgtcatggacggcggcaccgtgcccgaggcgatggctgcattgcctgcacccaagccagagctgcacgtggtgcgcaaccgcgatgccgcgcgcagcgccatggcgcaggccgcggcggatctgggtttcggaggcacgcatggagccggctga

SEQ ID NO: 501580 - DNA, 1002 bp, Stenotrophomonas maltophilia
atgatctacttcgagatgtatccgggcgactacctcaaggacacgacccgactgtccctgaccgaccacggcgtctatttcaagctgatgctggcgtactactcggaagagcaggcgctgccagagagcctggccgagctgtacatcatcgccggcgcaatcactgcggcggacaaggccgcggtcaagaaggtcgccgaccgctacttccccgtggcagaagacggattgcggcacagcaagcgctgtgatgaacaaatcgccaaggcccaaggccggattgcggagggccaaggtcgccgtgatgcccgaaagagcaacgaaaccgagcgtcaggcacggacccgagcacgcagaaccatgctgttcgaagacctgcgcgctgtcggcgtcgtgccggacggcatggtcacgatggcacagctgaaggcgctccatgtcacacatgtcacgggcgacgagcgcgtgacactcgaccagttgtcacgcgtgacatgtcacgcagagtcacgtgtgacaggtggtgtgaacacaggtgtgaacacgggtacccagaccccagaccccattactactccagatacatcacatctcactcaaggatctctgggaggcgtgaccgacgcggggcgtgcgtgcttgctgatgcgcaaggccggttgccattccacgaacccgagccaccccgacctgctggccgccctgaaggagggcgtgacgccggagacgctggggcacacggtcgctgaagggctggcgcgatcgccaccggtcacgaacccgttcccttgggcaatcaagaccgcccgcaaccgccatgcggcaggcgcaatgcccgcaatccccaataccaccggaggcaccaatgcaagccatcagccaggttctgccgatcaggtcacagagcagcggcgacaattcgagcagcgcgcgggagctggcggctttggcggaacgggcggcgatgtcatcgacgtcgagttcgaacccgtccaccactga

SEQ ID NO: 501581 - DNA, 387 bp, Stenotrophomonas maltophilia
atgaacatcagtccgaccctcggtctgcgctgtggccctgcgctccgcaccgctccggttcagcgagagccgaccgtagctccggtagccgccgcgatgtctgaaaagaagcagcggcgcagcgcgccccagcacgcccttgccggctacaacaccaccaggatcgtcatggaattcatgcgctgggcagtcgagctcagcgatttcccaaccgtcgaggccattgtccggcacttcggcgtgagccgcgccacagcgtaccgctggcgcaacagcctgggtgagacataccggctggagacgttgccgcccaacgagcatgagctgaccaggattggcagctccggtgctgcggcacgcggcaagcacggtgccggggaaccctga

SEQ ID NO: 501582 - DNA, 327 bp, Stenotrophomonas maltophilia
atgagcggcggtgcaatggtcagctgggcaatcgccgtggtcagcgaattcgacagtgccggccgtcgaatccccgagagtgtggtgccgcttctgcccatggtggatgtagtcctctgggcaaaagagcagccgcagccggtgcgtgttgatgcacttcagaagcgattcggcctttcgcgcgcgacggcttatcgctggcagctcgcgctgcaggacctcaacgatccggcggccgccaggcggcggcttcccggcctgcggcagctgagcaccgcgatggggcgtgaggttcccgtatcgggtcatgcgggggcgacaggatga

SEQ ID NO: 501583 - DNA, 273 bp, Stenotrophomonas maltophilia
atgaacgagcccaaccaccccgtggtaccgatccaaaaggccatcgacgcggtaggagggcagggcgcactagcgcgcctgctcaaggttcaccccgcgttggtttcgcaatggcgcacaggccgtcggccggttgccgcgcaccacatcctgtcgatcgaggcgatgacccaagtctcgaggcatgaattgcggcctgacatcttcggcgaactcccctgctcggagaccgacccagacgctgaccggatcgtgccggtcgacgcggcgtaa

SEQ ID NO: 501584 - DNA, 405 bp, Stenotrophomonas maltophilia
atggatctcgatcaggagatggacaagctggctcagctgatcgcgctgcgcgcgcagcggaagatgggcgacaagcccaagctcacggtggtcggaagcgtaaagccggctgagctgccggctacagcacctgatggagtcagcaggaagatcacgcactcggcggtccgcatggacgtcgtacttcgtgagtcccactgccggatgatccggcactttcagagacgttggggctctcccatgcagctcctgatcgaccaggcttgtttcggttacatgtgcatcgaacagcttccggatgatgacttgatccagctgcataaggacttggagcgcgccgaagattgcctgcgggacggcgtcagctttgaagatgccggcttactccgcagccgctatggttaa

SEQ ID NO: 501585 - DNA, 411 bp, Stenotrophomonas maltophilia
atgaggaagtatttttctgccgctgggatcgtggtgctcgccctttgtgggtgcgtcaacgcaagcaaccctagcaacgatcctgcgcgcgccgcagctgcccgtgcttctgcatcggcagccgaggctgcgacaaaagctcaagaggccatcgacacgctcaagggatcaacggccgaactgtgcgaaggcgaatctactgctgccgagcgcatcatgaaggcaaggcagatgggcacaccgatggctaccgtcatggctactgcaacgaagtatggtgagccgtacgtgggcttcgtccacaaggcctatgaccttcctcgcttgaccagtgaggccgccaaagacttggtcacgggggagtttagagacgctgcatacagcgactgcctcaagcgttgggaattctga

SEQ ID NO: 501586 - DNA, 270 bp, Stenotrophomonas maltophilia
atgggatctgttggttggatgggctacgtgaccttcgccatcgcgctgctcggcgcggtccttggtgtgatcaacaccgtgatcgcctaccgccgtggagccgtccgttggaaggtcattccgcgcttgcagatgggtaagaacggatcgctcgagctctttgtcgatctcgtaaacaccgggcgcatacccgtgtcgatcgaaaaggtgagcttggccgggggtgtgaaacttcagacgcggtcggaagggctcacggacaagtactga

SEQ ID NO: 501587 - DNA, 516 bp, Stenotrophomonas maltophilia
atgcccctgaccctcagcaccaagcgcaccgcccgcgtcggcatggccgccttggcgtgcttcatcgccctcggcgtcgttgcctgggccaccccaaccgatgcacccgccgcggctaccgacgacgcgccagacggcctcgtgatcaccagcccccgcatctgcgccgccctggctgtgtatgagctggccgccgggaacgattgggcactgcgtgccaccgtcgccaacacgacgctcaacgccttccgcgatgcagaccgggtgcccgactgtgcggcaggcgtcactgcggcgctgacgcaaaacttcgagccggcgcgctggcagctttccctcgacgcggccgatgccgtcctgagcggctcctatgagatttccccggcggcgtgcgtccgggccaatgcggttgtccccctgtcgaccgcagacggcaaagagccgagcacctccccggtgctggcccgggcgcagtgcgtcatgcacgaactggccttcgtggaggtggcgccgtga

SEQ ID NO: 501588 - DNA, 246 bp, Stenotrophomonas maltophilia
atggacggcctgcatccgatcggcggcggcctggacgcggtgatcgtcagcacggccacgccgacgcctgaagagaggctgcagcggtacgcggcggcagttgctgcccacccgtgccgctggttttcgctccgtgtgcagttcggccagatcctgcagcgctcgctcaagaacggcacacgggtgggctacgcagcgtggcaacggcagatgccggccctctggccccgcgtacacatcaactga

SEQ ID NO: 501589 - DNA, 225 bp, Stenotrophomonas maltophilia
atgccgactatcactgtcgacgtcgaccttgatgaattcgacgaccaggacctcttggaggagtgcagggttcgcggtctcaacgtgctgcccactgcccctgccgatgtgcctgttgcggagctggttgttgagcgcgcctatctcgcggctcgcgccatgaccgaacttccgcaggagctgaaagacctgttctgggtcgtgcatggccgcgcaatcgcatga

SEQ ID NO: 501590 - DNA, 453 bp, Stenotrophomonas maltophilia
atgaaacagcctcagcccagcgaagccaaatcttcaactccgatccccgacagcgcgattgaagcgttccgcgctgcctacgccactcacggcgccccaaagggctacgcggaagccatccgtgccggcctcgccgccgcagcgccactgatcagccatgacgccatgctctcgctcgagcaggatgcgcaggcctacctggtgcgccagctggacattgccctgaatggtgaagccgccgcagcgcgcgagccggtgctggctgatcttctgagccagtgtcagcaggaggttcgccgccgcagcggtccaattctgaccacgcttccgatcggcgtgcagcaccacctacgacaggtgttcagcgatatggccgaccgctcgcgcctactgaccgacgtcgccgtacgtgaagtcgtgctgatgggcactacggaggtgcgctgtggctga

SEQ ID NO: 501591 - DNA, 363 bp, Stenotrophomonas maltophilia
gtggctgagcagtcgaccgccggtgccctgccggaagccgagctgcacatcctccgccacgccctaggcgtcggcgagcacggctgggagcggaactaccgcaatcatttcgtcaccggcccaggcggcgccgaccaccagcactgcatggcgctcgtcgcgcgcgggttcatggtccagcgcgcggggaacgcgatcactggcggcagcgacctgttcaacgtcacgcaggccggccgagccgcggtgcaagaacaaacaccgccgccgccgaaactgaccaggtcgcagcagcgctaccagcagttcctgcgctacgacggtggcgtgacgttcggcgagtacctgaggcgctggcgatga

SEQ ID NO: 501592 - DNA, 690 bp, Stenotrophomonas maltophilia
atgaaagcgatcaccaaagacaccaaggcgcgcaatgggaggtgcatgcctatctcacagtgctgcgcttgcggtgacctgctacgccttcgcagctctcttgtaatcggaggcaaggtcaagaaagagctgtgttgccttacgggcatctctcgcccattcgtcacgaagcgcagcgtcactgtgcgcggctgtatcgagattgaccagtcttttggactgacgaacaacgtactcagcaagcgacgtggcattggcgagcaacagcgcgtcaccttcttcgagctggtggccggttcctttaatggcctccatggcagccgtgaccctttggatctcatcctcgacattcggaaggatgagatgagcgtcagcacgaatgaccgagcccagggatgtgaccgcagcttgagcttcatggacgtggggataaagcgcgatcttcgatcgcaatgcgtcgtgcttggctttgcgatgacgcgctttcgtctctttgagagcaagagcgagagcaagcccagttgctgctgccgtggcgatggcagaccaagcatcccaatcgattacacaagatcggctgagcaaccagcactggcttactccatccatcatgctcatcccgaactccattcgtggtgtggccggcattctgccacggctcgtgtccactcggtggccacccatggctga

SEQ ID NO: 501593 - DNA, 228 bp, Stenotrophomonas maltophilia
atgaccactcgtggctttcatcgaaccctgcgcggtttccacgatggctaccatttcgtgctgaccatcacgagcagcgtggatcacgttttctcgtacacagccgaagtcgacggcatcgctgtcgagttgcgatccgagggtgtgatcaggagcaagggcgacgctatgcagctcggcatggctgcggttgagcgccacgtggccggtctcgcgtccaggcgctga

SEQ ID NO: 501594 - DNA, 1023 bp, Stenotrophomonas maltophilia
atgacattgctcccgcgcctgtttgcagttctggttgtttccttctctgccctcaccggtgccgccgcggccacagatccgcgccagcagggagccacgctgaccgcgcagttctatgaaggccacatcgacgccctgtgggaacggatgacgccacagatgcgggcggggctgcagtccccgcagaacctggtggcgctgcgcgagcaggtgctggcaggctggggcgcagaaaccgagctggtcagcgagaaggtcgagaaggctgagggatacgacacctatctgcggcaggcgcgcttcgccaagagccaggccatcatccaggtgctgtgggccatcgacgctgacgggcggatcggcggcttctacatccgcccgctacagaccacgcctccgcaggccgcggcgagcgggttccttgactaccagacccgcacacggctgcaactgccgttcaaagatgaattcttcgtgttctggggcggccgcagtgtcgaacagaactaccatgcggcccacgccggccagcgcttcgcgatggacctgctggtggtccgcgatggccgttcccatggtggagagggtcagcgcaacgaggactatttctgctttggccggccaatcctcgcgccggccgacggcacggtggtggaggtggtcgagggcgtcgccgacaacgtgccaggccagatgaacgctgcccagctcaccggcaaccgcgtcatcctcgatcacggcaatgacgagtactcggtgctggcgcacctgcgccagggcagcgtgcgcgttgcacaggggcaggtcgtccgcagcggcacgcacctcggtgactgtgggaacagcggcaattcctccgaaccgcacctgcactaccagctgcaggccgggcctgcgttcggggtcagcgcggcgctgccggcccagttctccggctatgtggccgacggccagccggtcgcgcgcggcgaaccggtcaaggggcagcacattcggcctggcggcgctgcacacatcgaatag

SEQ ID NO: 501595 - DNA, 336 bp, Stenotrophomonas maltophilia
atgacccgcttgcctgattcgcgcgcgctgctccagctcgaccgcctgatccacgaaccggcgcgcctgctgatcctgtcgatcctggccggcgccgagtctgccgagttcggctttgtggaacatctcagcgggttgagcaagggcaacctgtccagtcacctgagcaagctggaggcagccggcctggtcgccatcgagaaatcgttccgtggcaagcgcccgctgaccaccctgcagttgacgccactggggcgcaccgccctagccgagtaccgcacgcagctggcggcgatcgtcgccggcattcccgatccggatcggaaggacgcctga

SEQ ID NO: 501596 - DNA, 657 bp, Stenotrophomonas maltophilia
atgcagcagccgtccgtcattgatccttcctcgcgcctgcaggcgttgacccgtgagtactcgcgttactcgcgcagtgccggtggcctgtcggcgatcgcgggtggtgtcgcctgtctggcctccttccttgcgggcgcgctgttgccgaccacgctggcactgcgcgtcgcactgatcgccgtcccggtgctgtggatcgtcggcaagcaatggctggcgcgccgctactaccagcggctgggccaggtcgaggagcaggtgacgccggccgagcgcaacttccagcgcttcttcatcgccttcaccgccttggtgagcgtgctggtgatcggcagcgtgctgcccaggctggcgccgatgggtgaattgccctgggatctgcgcgcaatcggctacctggccgtggtggcgctgctgccctgggtagtgtggcgctggctgcgtacaccgctggagttcatcgtgggtgtgttcctgctgtgccaggccgcgctggccttcaccgggcagacctacggtttcgggctgagcactgcggtgttcccactggcgtccattgcgctgatcgtggtcggctggcgtgaccaccagcggttccaccgcctgcaggcggaaatgcgcgcgttcatggccggacggacgttcgtcgaatga

SEQ ID NO: 501597 - DNA, 327 bp, Stenotrophomonas maltophilia
gtgaaccgctccctgccatccgatgacaccctgcgccgcctgcacgcgcagtcgctgcaggcgctgtcgccggccacgctggcgcggctgcgccaggcgcgccacggcgccacggccatccaccgcgggcgcgggcgctggtggctggccagcgcctgttcgctggtggtggcgctggctgtcggcgtgcagttcagcggcctgggcctgcattccgggcccgcgaccgtagcgccgacggcggcggtggaagacaacagcgcgctgtacgacgagaatcccgatctgtacctgtggctgggcgataccgacctggcgatggagtga

SEQ ID NO: 501598 - DNA, 672 bp, Stenotrophomonas maltophilia
gtgatcgaactgctggacctgcaacagaccctgcatgccttcgccgcctgcaacgatgacgatgaggtgcgggacaccttcggctgggtgatggccagcgatgagaacctgctggaggcgcggctgtggctatcttcgtccagcgatgaagcgctggatgacgacggcgagcgatcggcctcttcggcagcgatggggctgtttccgtacctggaaccagccacgttcgccgacgtgcttgacgtgcagaagcggcagcgcccgctgtcatccttgcaggactacgcgcaggcgctggcgtactacgctgaattcgatgcgttccagcaggtcgatggcatcgacgtagccctgggagaggcgacggccgaagaccaggcagtggcgcgggaggcaggcgtcggcgcagacatctttgcgtccttcgacctggtgctgggcgcctgtctggagctgcaggtcaaggcagcagcccagcgcgtggcgcgcctgctggagattccggtgggcgaggcgttggcgcgctgccgcgcgttgccattggtgctgggtgaagcgctggatcgtcgccgcgcgcaggcgatcaaggatgacttcgacgccatcggcgcgacgctgcaggtgcgcggctacaagccgttcccgtggatggacgcgcccgtactgcggtag

SEQ ID NO: 501599 - DNA, 6735 bp, Stenotrophomonas maltophilia
atgagcagtctgcgcgatgcgatgagccacgcagcactgggctgggtcaagcccgagctggacgagaccctgcgccaggtgcgcaacgaggtcgagtactacgcggaagacccgagcgatgccagccgcatgcgcatctgcgccggctacctgcaccaggtgcagggcaccctgcgcatggtcgagctgtatgccccggcgatggtggccgaagagctggagcagctggccaatgccatcggcgccggccaggtggccgaccgggacgaagcctgcgcgaccctgatgcgtggcagcgtgctgctgcctgactatctggagcgcctgcagaacggccatcgcgacattccgatcgtgctgatgccgctgctcaacgagatccgtgcgtcgcgcggcgaagaaggcgtcaatgacagcgtgctgctggcctttgcgccggacagcgtcaccgccaccgaggccgagctggaccatgcccggggcagcctgagcgggcgcaaccgcgaactgctcgacacggtcggcagcgcggtgaaggaagaactgctgcgcatcaaggatgcgctggacctgcacctgcgcaccggcggtgcgccggaacagctgcagacccaggccaacgagctcggcgccgtggccgacacgctgggcatgatgggcctgggcgtggcccgcggcgtggtcgtgcagcagcgcgacgcgctgcgtggcgtggtcgaaggccgccagcagatcgacgagaacctgctgctggatatcgccggtgcgctgctgtacgtcgatgcgtcgctggacgatcaggtcgcccatctgggcgccggcggcagtggcgaggacgacccgagcgcggtcgagaaccggcgcacggtggaggtgctggcgcatgaagccatcgccaacttcgccgccgcgcgcgagcatttcgtcgccttcatcgaaaccagctggaaccatgccgagctgcaggatgtcccacgcctgctgggcgatgtgtccggcgcgctgcgcatgcttgacctgggtactgccgccgactacctgcgcggcgtgcagcagtacatcgaggccgagctgatcggccgccagcgcgtacccagcggccgccagctggacaccctggccgatgccatggccagcctggagtactacctggaagccctgcgcgaccgccgcccgggccgcgaggatattctcgaaatcactcgcagcagcctcgaggcactgcgctactggccgctgcccgaacgcaacgccgccgcaccggaagcgccggcactgctgccggttgaacgcgagccggttgcgttgcaggccgagccgctgcggcccgagcgcatcgaggtgccggtgcagcctgctgcgcccgcggccggcgacgtgccggtaccgctgccggacttcaccttcgatccgccgccggccacgccggcaccgagggtgcccgacaacagcctgatgttcggcgcgctgcgcaccgcaggcgtcgtggccgccagcccgttggatgctggtgcctcgccgctgccaacgcaggaagatgccgaggcagcactggtctttgccgcgtccagcgcacctgcgccggatgtcccgcagtgggagctggcgccgttctaccccgaagccgaagcgctcgcgatcgccgacgaacgcgcgccgacgttcgccagtttcgatcccgtcagcttcgaactggccgacagcgatcacgccggtgcaccgcagtggtcgctgtccgaggcgccacaggtgcttgaggatgtcgatgcgcctgccagcgacgagtcgaccgacgcagtgctggcctccgtagccgagttcgatgctgcaccggtgttcgatccggtcgccgcggaacaggatgcagttgcggtggccgatgacgtggtgttccgcttcgacgccgatgcactggacaacgctgacgatgtcctgtcgctgcatgcgatggagacgctgtcgctggatgacgacgccgggttgccggcttcgctggagtttgccgatgcggtgatgccgccgcaggccgatgccgtgccggcgacggagcccgggatggatgcggccgcggatgagccgccggcaccatccattgcgctgccgacgcccgaagaggcggctgcgacttcagaagcgtccgctccggccgtgtcggtgatcgatatcgacaccatcgcgccgatcgatttcagcgaagccgatgcccagttcttcgccgagctgagtgcggcggctgccgatttcaatccgcaggcgatggccgcggctgcaaccccggaaacggcggttgcgaatgcggccgacgccgacgccgacgcaaatgcgggcttcgacgccggctttgacgacgatgccgagaacatcgacgaggacatccgcgaggtgttcctggaagagttcgacgatgaattggccaacctcggcacgttgctgccggcgtggcgcatgcagccggacaacatggaccggctgcgtccgatccgccgcatcttccacaccctcaagggcagcggccgcctggtcggcgcgcgtaccctgggcgagttcgcctggaagatcgaaggcatgctcaaccgcgtgctggatggcagccgcgtcgcgtcgccggcggtgctggccatggtcgacaacgcccatgcggcgctgccacagctgaacgcggcgctgcgccacggccagcgcatcagcgtcgacctgcaggccatgcaggccatcgccgatcgcgtcggtgcaggcgaggaaacctactacgtaccgctgccgggcgctgccgcatcggtggcggcggagagcaatgccgacgccgaagacgagatcagccgcattctcgaggccgaggctgcaggtccggaagcgggcgaaaccgccgaggccgaggccatcggcacgccggccaacatcgacagcgtgctgcgcgagattctcgaggccgaggtggaagtccaccaggccacgttgcaggactggctgcgttcggcgcagcaggcgccgctgccggtcagcgatgcactgctgcgcgcggtgcacaccatgaacggcgccttcgcgatgaccgaagtgcccgagattaccgccgtgaccggcggggccgagtcctacatcaagcgcgccctggcggccgaggtggtgccgggcgaagacgccgtggccgccctggatgcgaccgcgcaggcgatcaccgccaccatggaagcgctgcaggccgaacagccgcgcatcgcgccgcagcaggtgttggcgcagcgcctgcaggcgctggccggcgagctaccggaagcgcgctggccgatggtcggcctggaagccgacgacgacgagctggcgctggaggacggaccggcggcggaatcggaggcggacgcatcggcgcccgccgacgtcgaaaccgatgccctgtcgctgtcgcctgccgaaccggcaccggagcgcgacgcgcctaccgatgctggggctaccgcagttgccgacgcggcggtcgaggccgggctggaggtgggcgagttgactgccagcgacgacctgtcgcgctatttcgatgcggaatggccgtccgcgccgggcgagggcgagctgggcctgccggagggtgaatcgatccaggtcgcggaggtggcacaggaagccgaggcggataaggtcgaggcggaggccgagcgcgtgtcgccgttgtccgacgaggcggggctgaccgtcgtcgacgatctgtcgccctacctggacgccagtgcgctgccggtcgacgaccgcgatgcggaagaagatccgacgactgtcgaatccgtcgcccctgacctgaatggggcagcgccggagcgtgcagacctcgccgacgcggtggagttcgagacgcctgttgcactgccactcgacagcgagctgtcgagcctgcaggatgaaatggctgcgccggggtttgcagaaccggtctcgctggaagccgcgctcgaggccggcctgcacgtgatcgacgaagagcagcccctggccgacgacgggcaatggcccgtgctcggcctgcaggccagcgaactcgcgccgggcgaggcggaagcctttgccgaggatgcggacgtcggcggggaggcggcgatcggtgaaggagagagcgccgatcagccgtccccggcgacggtgaaccagcaggcggccgcggacgcagcgccgggcaccgccgaaccggtgcgcttcttcgaaatggaagacgcgccgggccaggccgaaggccacgccgacatcggcaacgcaggggcggtcaccgcgttggatgacgtggaagccgatgcggccgaaggcgttgcatctgaacccgaggcagccgaggctgctgccgcgacggtggcggaagagagtgccgatgcacttgacttcagcgtctatgatcgcgaactggtcgacatcttcgtcgaggaaggcaaggacctgctcgaccattgcgacggcctgatcagcgaactgcgcgatgcgccgcaggaccgcgaggtgctggccggcctgcagcgtgacctgcacaccctgaagggtggtgcacgcatggccggcatcaacgccatcggcgatctgggccacagcatcgaatcgttgctggaagccgttgctgccggtcgcaccgacatcgaacgccgcgatgtgcagttgctggagcgcgggttcgatcgcctgcaccagctgctgacccgcaccggcgaccaccgcgtggtggaaccggcgcaggacctggtggacgcgttcgaagtgcgcaccaccaccgacatcgccgccgctgcggcggcgtccgcagccgcagcggcagccgcgaacgaagccactgttgccgaaacggcgcaggcgccggacgcggtcccggcaccggccctgctcgatgcgccattgtcggcgccgctgccggccgaaggcggggtcgatgaagatccgctggcacgcccgcagcaggaacaggtgcgcgtgcgcgcggatctgctcgaccgcctggtcaaccatgccggtgaagtggcgatctaccgttcgcggctggaacagcagctgggtgccttccgtggtgccatgggcgaactggagcgcaccaacgcgcgtctgcgcgaccagcttcgccgcctggatctggaaaccgaagcgcagatcgtcgcccgctaccagcgtgagcaggaccaggccgaccagaagttcgatccgctggaactggaccgcttctccaccctgcagcagctgagccgggcgctgaacgaatcggcggccgacctcgggggcctgcagggcgtgctcgacgatctgtcgcgccagtacgactcgctgctgcaacagcagtcgcgtgtcagttccgaactgcaggatggcctgatgcgcgcgcgcatggtgccgttcgacggcctggtgccgcgcctgcgtcgcgtggtccgccagtccggcatggacaccggcaagcaggtgcacctgaccctggaaggcacccacggcgaactggaccgcaacgtgctggatcgcatggtcgcgccgctggagcacatgctgcgcaactccgtggcccacggcctggaagcgcccgagcagcgtcgcgccgccggcaagccggaagagggcgaggtcgccatccgcctgcatcgcgaaggctcggaaatcgtgctggaagtggccgatgacggcgcgggcctggatcgcgaagcgatccgccggcgcgccatcgatcgcgggctgctggcagccgatgcgcagcccagcgagcaggacctggacaacctgatcttcgcctccggcttctccaccgccgaccaggtcagccagctggccggccgcggcgtgggcatggacgtggtgcgcaatgaagtgcgccagctcggcggctcggtcgacatccagtcggtgcgcggccagggcgtgcgtttcaccctgcgcctgccgcagaccctggctgtcacccaagcggtgttcgtgcagatcggcgacaccacctttgccgtgccggtggcctcggtcagtggcatcggtcgcctgtcacgcgagcgtttcgaggccgccgacagcagctaccgctacagcggcgaagactatccgctgtatgacctgggcagcctggtcgggcaggccccggcgcgggcggatgggcaggaccaggtgccgctgttgctggtccgtgccggtgacctgcgcgcggccgtagcgatcgaccaggtgctgggcaaccgcgaaatcgtggtcaagccggtcggcctgcagatcgcctcggtaccgggcatctacggtgccaccatcaccggcgatggccgcgtggtggtgatcctggacgtcgcgccgctggtgcgccgcttcctggccaatccgaccgcaccggtgctggccaatgcgccgcgtgacgaacgccaggtgccgctggtgatggtggtcgatgattcgctgaccatgcgcaaggtgaccggtcgcatcctcgaacggcacaacttcgaagtcagcgtcgcccgcgatggcgtggaagcactggagcggctggaagagcgcgtgccggacctgatgctgctggatatcgagatgccgcgcatggacggctacgagctggccaccgcgatgcgtgccgacccgcgctacaaggatgtgccgatcgtgatgatcacctcgcgcagcggcgacaagcaccgccagcgcgccttcgagatcggtgtccagcgttacctgggcaagccgtaccaggaactggacctgatgcgtaacgtgtacgacctgctggggatcgcccgtgtccgtgagtga

SEQ ID NO: 501600 - DNA, 723 bp, Stenotrophomonas maltophilia
atgcccgcctcgatcggcggagcgggcactggaacggaaggtgccttgcatttctccgggggaagcggggccgtgtccaccgtcatcagggtcgcggtggtcttgagggggctgcttcgcatcggacgattgattctgcgcactcggttgggcaggcaaggtctgctgaggcgaaacctaatcacggttttttttactgtcaacaacccccgcgaaaaattttcacatccgcgccatcccggacaccgcctgcgccgccggcacgcacggcctgcaatggcggttgacgcgctgaccacgtgcgccgcagcgaccaacgccaatgcacacgttgaacaaaaaccacttgaaataagcactccgcgcaatcatgcgcagtgccgccgcgcgcgtgcgcgtgcttcgccgatggttgctggcaccgccgccaccgccagcacaacggggccgcaacggggggcgaaaagttttcacatccgactgcgtcggagcggggcggaaacgtggatttgcgcaaaactgcgcacgcctgtcggcaccgttcgtctgtctgctgatgccgcgccgagggcgcgcagcgaaccggccggcatgagtccgatgcggtcgtcaaaacaaaaacggccacccgaaggtggccgttccagaacccggaggcgacgactcagtggtcgtcgttctccagggcttcggcgtacgcgtccggatcgagcaggtcgttga

SEQ ID NO: 501601 - DNA, 495 bp, Stenotrophomonas maltophilia
atggcaaccaagaaagctgcgaagaaaaagcccgccgccaagaaggcggtgaagaaggtcgcgaagaaggccgctgccaagaaggcagtgaagaaggtcgcgaagaaggcgaccgccaagaaggcagtgaagaaggcggcgaagaaggtcgccaagaaggccactgcgaagaaggcagtgaagaaggcggcaaagaaggtcgccaagaagtccactgccaagaaggccgcgaagaaggtagccaagaaggccaccaagaagaccgccaagaaggcaacggcccgcaagcctgccaagaaggtcgcgaagaaggccactgccaagaaggccgtcaagaagaccgccaagaaggcagtgaagaagaccgcgaagaaggccaccaagaaggctgccccgaagaaggcggcgaagaaggttgccaagcgcaagccggccgcccgcaagaagaaggccgctccggtcgctctgccggcaaccccggcgccgctgatctaa

SEQ ID NO: 501602 - DNA, 297 bp, Stenotrophomonas maltophilia
atgagcgcaaccgtcacaaccaacgaaaccaagatgatcgcgttgggattgaatcccggcttgattgaaaattatgcagcggtctccttggagcccgtcagctttgaagaggacgacagcctgggctgggcgaccacttggaccgcggttcatgccgtcgagctccacaacggcgggaaggtcaacacttacggacgatccttccacgtcccccaagccaagcccggttacaaacacctgctcaagtgctggcgagaagagcaggggcggcgcgcagaactggctaatgatgggtga

SEQ ID NO: 501603 - DNA, 384 bp, Stenotrophomonas maltophilia
gtgcttcacggcatccatttcgtcagtccctcggtgggtggcccgctcttcaatacggtgtggcttcccacgcttgccgacttgcgggcgctgctcactgacgccgacctttgcaaagcagccgaaaccgaggtgagggcgttcattgacacgttcgtggacccgttgccccctgagctcgacgaggtcattcaccagccatcgataaaacagatttccagcttgccggatgattgcgggatcggcgtgggcgtttttgtgactgacgcgtttgcgttcgtccttcagcggatgattcaggaggcaatggctcagcaccgtgcgcgtgagctggatgggttatggagacagtcagcggccggtggcaaacgagccaggctctga

SEQ ID NO: 501604 - DNA, 720 bp, Stenotrophomonas maltophilia
atggctcatgacacagactcgcagaagatcagcttgcccgaatggctgtccatcaatccttgggcgatcgtcttggtcgtcactgcattgattgcaggtattctcatgggagcacaacacagcaaggttccagagcttgccaacgtcattgtcggcccggccgtaggttcgttccttgcagttggagctggtgcatggctcgcgaattggcaggagcgccgaaagcgcaccgaagccaaagtcttcatcgcgcctatcttgggtgagatcacccaagccattgaaggcgccatcaacggttacgcaaattacgaacggcttcttcaggagcatagactcaccaagccagctccaaaggatggacgggtcgccgccgcctcttgcttagcaaagcttgaggaagagggccacaagatcaatcgccggctgcaccagctccagacggccttcaactccgtgggctatcaaggcagtgttctgtatgcagacgcgctggagatcctcaaacgaatccagtcacgactggacaagcactcagaggaaatgggggaaacggacgctgacatttccgagcgcaccgtcggcgacctcattgatctgtggcgctggtccgattccctcaaagcaacggccgtgtctggaaaatacacaccatcgattcggccattgcccgatggggtccgaaacgatcaccgctggagtgctagcacgccgtcctga

SEQ ID NO: 501605 - DNA, 288 bp, Stenotrophomonas maltophilia; identical to SEQ ID NO: 351542

SEQ ID NO: 501606 - DNA, 861 bp, Stenotrophomonas maltophilia; identical to SEQ ID NO: 351541

SEQ ID NO: 501607 - DNA, 636 bp, Stenotrophomonas maltophilia
atgcgctccatccgtatcctgagtctcgccctgctgacctccgccgccttcgcgccggccgctttcgcccaggacagcagcagcaccgacaccgcttctggcaagcattttgccgttgtcggcggcatctcgctgctggaaccgaagaacgacacgatcaccggcgtgaagaagaccgatggtggcccggcgccgaccgtcagctttagctactacatcaacgacaactgggccgttgaactgtggggcgctgccgacaagttcgaaaacaagttcaagggcccgaacaacgcccgcctgggctcggtcgagcagcagccggtcgcgctgagcggccagtaccacttcggccaggctgacaacgtgttccgcccgttcgtgggcgtgggttactaccagtcgagcttcagcaacgagaagctgggcaacggcgctgacaccgacatccgcttcaaggatgccaagggcgtgatcggtaccgtcggcgtggacatgaacatcaactccacctggttcgcccgtgccgacgcccgctacatgcgcgcccgcccggacgtgaaggttggcggcgagaagatcggcgaagccaagatggatccgtggaccgtcggcttcggcatcggcgcccgcttctga

SEQ ID NO: 501608 - DNA, 1506 bp, Stenotrophomonas maltophilia
atggacgacctcgacctgctggtcatcggtggcggcatcaacggcgccggcatcgcccgtgacgccagcggccgcggcctgcgcgtcctgctctgcgagcagcatgacctggccgcacacacctccagtgccagcagcaagctgatccatggcggcctgcgctacctcgaacagggcgagttcggcctggtgcgcaaagcgctgggtgagcgtgagacggtacgccggcaagcccctcacctggtccatccgctgcgtttcgtcctgccctgggagccgcacctgcgaccgcgctggatgctgcgcgcgggactgtggctgtacgaccatctgggccggcgcagccctgcgttccccgcatcgcacgcactggacctgcaacgcgatccgctgggtcgctggctctcccccgcgttgcggcacggcttcagctacgccgatgcgcaggtcgatgacgcgcggctggtgctgctcaacgccctggatgccgcgcagcgcggcgcacacgtgcgggtccgcagccgctgcatcgacctgcgccccgtgcagggccgatggcaggccgttctggaatccgccgatggccagccgcacccggtgacggcgcgcgccgttgtcaatgcggctggtccgtgggccggtggcctgctggaacagatgcaggggcgcggcgatggccccgcgctgcgcctggtgcagggcagccacatcgtgctgcgccgcccctggcccagcgacagcgcctgcctgctgcagcagcccgatgggcgcgtggtgttcctgctgcccttcgcccacggccacctgctggtcggcaccaccgacaccgactatcgcggtgacccggcgcgctgcagcgtgctccctgcggaggtgacgtacctgtgtgatgcggccaatcgctacctgcgtgatcccatcgcagcggaagacgtggtctggcggttcgctggcgtacgcccgttgctggccgatcccgatccgcgtgcggcacgactcagccgtgattaccgtctgcagctgcagtcccacccggcaccggcgctgcatgtgctgggcggcaagctgaccacctaccgggtgctggccgaggaggcgctggagctgctgcggccagcgctgccacagatggggccggcgtggacggcaggcggagacccgctgccgggcagcgactggggcgacgccacgcaggcgtgctcgcgcctgcagtcactggcaccgtggttgccgagcgggatcgcacagcgctgggccggggcctacggcagtcgcagcgcggaactgctgcagggtgtacagggcctgcacgatcttggcgaggcgtttggcggcggcctgcatgcccgcgaagtggacttcctgcgcaggcatgagtgggcgctcgactccgacgatgtgttgtggcgcaggagcaagctggggttgcggctggatgctgcacaggtggcacggctgcaggcgtggatggagggtcggatccctttcccacagaaagggctctga

SEQ ID NO: 501609 - DNA, 1500 bp, Stenotrophomonas maltophilia
atgacgccccgctacgtgctggccatcgaccagggcaccaccagttcgcgcgcgatcctgttcgaccgcgccggcgacatcgtcggcagcgcacagcgcgagttcgcgcagatcttcccgcatcccggctgggtcgagcatgacccgcgcgagatcctcaccagcgtctatgccacgttgaccgaactgctcagccgcgggcagatcgacccgcgccatatcgccgcactgggcatcaccaaccagcgcgaaaccaccgtagtctgggaccgcaccaccggccagcccatccacaacgccatcgtctggcaatcgcggcagagccacgccatctgcgagcggctgaagtccgaagggcatgaagcgctgatccgcgaacggaccggcctgttgatcgatgcgtatttctccgcgaccaaggtgcgctggatcctcgaccacgtggaaggtgcgcaacagcgcgccgagcgtggcgagctgctgttcggcaccatcgacagctggctggtgtggaacctcagcggcggccaggcgcatgtgaccgactacagcaacgcggcgcgcaccctgttgttcaacatccacacgctggactgggacgacgacctgctggccctgctcgacatcccgcgcgcgatgctgccgcaggtacgcgactccagcgcggtgtacgcgcatacccggccgcagttcttcttcgaccacccgatcccgatcgccggcatcgccggtgaccagcaggccgcgctgttcggccaggcctgcttccagccaggcatggtcaagaacacctatggcaccggctgcttcatgctgatgcacaccggtacgcaggcggtgcgctcgcgcaatggcctgctgaccaccgtggcctggggcctggacgggcgggtggagtacgcactggaaggttcgatcttcatcgccggctcggtggtgcagtggctgcgcgacgggctgcgcatgatcgaacgcgccagtgacagccaggcactggccgcgcaggtgcccgacagtggcggcgcctacctggtgccggcgttcgtcggcctcggtgcgccctattggcgcagcgatgtgcgcggtgcgatgttcgggctgacccgcggcacccgcaaggcgcatttcgtgcgcgcggcgctggaagcgatggcctaccagacccgcgacgtgctcgatgcgatgcagtccgatgccggtatcgcattgagcgaactgcgcgccgatggcggcgcgatcggcaatgacttcctggccggtttccaggcggacattctcggtgtgccgctgttgcggccgcggctgaccgaaaccaccgcgctgggtgcggcctacctggccgggctggcggtagggttctggtccagccgtgaacagatcgccgcgcagtgggggctggaccgccgcttcgagccgcagatgaacgcggcccggcgcgagcggctgtacgcgggatggcagcaggccgtcgctgccaccctcgccttccacgtcgattga

SEQ ID NO: 501610 - DNA, 300 bp, Stenotrophomonas maltophilia
atgaacgcacgcaccgccatcaataccctcagcagcctgctgttcctgctgctggttgcgcacaccacggcctaccagcagcagatgtggccgcccagccgggtcgtccacgtgcatccggtcgtcgtcgccctcgcctacgcgcttgggctgctgacgctgctgctgtggatcgccggcccgcgtgcgccggagaccacccagcggctggcgcgcgggctgcccatcgttgcctggtgcctgctggccatcggcgtggcgatcattccggtgttctttcccggcctgctcccgggctga

SEQ ID NO: 501611 - DNA, 1014 bp, Stenotrophomonas maltophilia
atgaaccgggatccatcgcggtggctggacgacgaggtcgcccgtgaggcggcgcactggttcctgtgcaatcgcgagggaacgctggatgcagcgggacgcgctgcgttgctggaatggatgaagcgctcgcccgagcatgtgcgcgcctacctgcgtgctctcgcgttgcaccggcaggtgggcgaggcgctgcagtcgcgggtgcccggagcgttgccggtggcatcgccggtgtcggcgaaggtcgtgcccttgttcggcactgcaccagcgccgacgggcgccacgccacgctacggccgcgcgcgctggaggatggcggcggcctgcatcggcgttctggccgcaggcctgctgccctggatgatgccgagcgagcagatccatggcaccggtcacgccgaactgcgcgacctggtgctgcctgaccagacccaggtgcgactgaacgcggacagccgcctgcgggtgcgcatgggctggttcggtcgccaggtggagctgctgcagggtgaggccacgttcgacatcgcccgcgatcgccgtccgttcgaggtggaagtgaacggcctggagatccgagacatcggcaccgtcttcgacgtgtcgcgacggctgcagagcacgcgcatcggtgtggtttccggcgaggtcgaggtctggagccagggcgcgggcgcccgccgcctggcgcagttggggcagggccgggtggtgcaggtcgatgcgcgcagccatgcggtggagtcattggacatgccactgtcgatgctgctggactggcagcagcgcaaagtgtccttccttgacgagcgcctggacgaagtggctgctgccttcaatcggcacaaccaggtgcaggtgcgcgtgctggacgaaggcgcggcatcggcacggttgtccggcagtctcgatgcgcatcgcatcggtgcgctgcaggccttcctcgagcgcgacccgcgtttcgtggtgcggcgcgagggcgatacggtgcgggtcggcagccgctga

SEQ ID NO: 501612 - DNA, 927 bp, Stenotrophomonas maltophilia
atgaagcgttcgcgcacgcgttcccgcctgctggccggcactgcgatcaccctggtgttgctggccggcgccggtaccctcgcctaccgtcatctgtatccggacctggatgctgccgtggccgccacgatcgatatcctcgatgcgcaaggcaggcgggtcggccactacgccgcgcccagcgccgacgagattgccggcctggacaatgccggatcggtgatgctcggccggcgcatcctcaacgagaccgcgcggctgctgccggacaacgtcggcaacgatctgaactgcaactcgtgccacatggccgagggcaagcggcctttcggtaatcactacttcaataccggcggcggcgcctatccgcgctacatgccgcgcccgggcaaggtgatcgggctggccgagcgcatcaacggctgcctgcagcgttcgatgaacggcaagccgctgccgaaggacgcgccgcagatgcgcgcgatgctcgactacatggcgtggctgagcagcacggtgccagagggtgcaacggtggccgcgcccagcgagggccccatcgacagcacgctgacccaggacccgatccgtggccaggcgctgtacgccgtgcagtgcgccgcctgccatggcgacaacggcgaaggacggcgcgacgccagcggtgacatcgccttcccgccactatggggcgaccacagcttcaacatcggcgccggcatggcgcgcctgtacaaggccgccggcttcatcaagcacaacatgccaccggcggtgacccgcgagccgccactgggccagcaggtgatgcccgaccaggatgcggtggacatcgccggctatttcatcaaccagccgcggccggacttcgccaacaagggcaaggattggccacgcgacccgaaacccaaggatgcgcggtactga

SEQ ID NO: 501613 - DNA, 783 bp, Stenotrophomonas maltophilia
atgcaggacgcgcagtggtggtacgccaacagcaggcagagcgagggaccggtggatctggccgggctgcgccgcctgcagcaggacgggaccgtaaacgcccgcacactgctgtggcgcgaggggatggcatcgtggcggccgctggccgaactggatccgtcgttggcgccggatcgcccgtccccgccgccggttgaaccggtgcacgccgatgccggcagcgtcgctgcggtcatcgatccgtccgacccctaccgtgcgcccgctgctgcgccggcaattgtggcggcacctgcggcagcgccagcgctggaaggtgacatcgccctgtacgccgccgtggtcggcggcaactttccgatctatcgccagcgctggcggctggaccagggcgttgccggaggcagtggcacctggcactggccggccttcctgatcggcgtcatctggatggtgtaccggcggatgtacacgctggcggcgatctgggccggcatgctggtgttcttcagcatcgccgaggcgctgctcggcgtaccggaaggcgtctcgatggtcatcaccctcgtgatcaacaccctcgctgcggtgtatgccaaccggtggtacctggcgcattgccagcgtgagatcgcccgtgcgcgcgcgctggcgggaaacgaccaggcgcgcctgcgcagcgagttggccgcgcggggtgataccaacgcaccaggggcggccatggtcgccatcgtggtcgttgcgatgatgctggtgggccaggcgatggcgggctga

SEQ ID NO: 501614 - DNA, 504 bp, Stenotrophomonas maltophilia
gtgagccaggacctgcccgtgctgtggtccccggcccagcaggcctggctgcaggccatgggctacaccgtctatcacgacggccagcttgcggccgagctggacgccgcgctgcagttgagcgtggccgaagccgaggccagcgttgccccgccacacccggtgccgccgctggagacggcgcgcgcgctgccggccaggccggcgcccgccaccggccagcaacgcccggcaccgccgcgccgcgaaacgccggtcagggcgccggacaccgtgccggccgctgagcgaccgttgcccagcggcaccgcgcgggaaccggtggtgcgcctgccggaccgtctgcagatcgcgctgctgcgcgcgtccggctgcaacccgaatgacccggccacgcaggcgctgatggacagctggccgctggaccagctgcgccgcgatccggcggccaagcgtgcgctgtggccgcagctgcgagccctgcgcaagcggggaacgccatga

SEQ ID NO: 501615 - DNA, 2754 bp, Stenotrophomonas maltophilia
atgaaactcaagtccagccgactgcgcgacgcagtcgtgatcgcgcttgtcgccggtgccactgtcgcgacggcccatgcccaggaagccaccaacctggaccgtatctcggtcaccggttcgcggatcaagagcactgacattgaaacatcgcaaccggttctgagcctgactcgcgccgacattgaaaagcagggcgtgacctcggtcgccgacatcctccagcgagtttccgccaacggtgccgcgctgaaccgcaccttcaacaatggtggtgacggctcggccggcgtcagtctgcgcaacctgggcgctgagcggaccctcgtgctggtcaatggccgccgctggaccaccggcctggacggcagcgtcgacctgaacaccatcccaaccgcgatgattgagcgcatcgatgtcctcaaggacggtgcatcgaccatctacggctcggatgcgattgccggcgtagtgaacatcatcaccaagcgaaacttcgacggtgcggaggcgaacttctacaagggccagtacagcgccggtgatggcgaacgcgaagcggccgatttcaccattggtaccaccactgatcgcgcgtcactcgtgctcggtgcgtcctacgtgaacgaaaaggaagtgatggctggcgatcgcaagatctccgccggcggcccgccgttctttggcggccagagcagcaccggcctgccgggctcgtacatccgcaatgaccagcgctacgtcatcatcaatggcgttgaaactccgttcaacgccaatgtccacggctacaacacttctccggacaactacttgctgaccccgaacgagcgcacctcgctcttcgcgattggctcgtacaacatcaccgacaatgtgattttccgcaccgaggcgatgtacaacgagcgcaagtccgagcagctgttggcggccatgcccgtgaccggccagcgtctgagcgcctcaagcatctacaacccctacggtgtggatctgaccagcgtatcgcgtcgtttcaatgaaaccggcggtcgctcgttcaatcagaacgtcaagaactggcacttctacgggggcttcgaaggcttcttcgaaatcgctgacaggaacttcgactgggatgtcggctaccgctacgacaagaccgatcagaatgacctgacctacggcctgttcaatcgccagcgcctggcagaagcctacggtccgtcagcgatccgcgacggtcagccggtctgcctgacctctgccggtgcggtcatcactggctgcgtaccgatcaacccgctgggtggcctgggttccatctcgcaggctgcgctggactacgcttcattcacggcgcatgactctgccagcctggtttccaagagctattacgccaacatctccggtgaaatcgtgcagctcccggcgggtccgctgggctttgcggccggctatgagggtcgtaaagaaagtggccagttcgatccagatgccttcatcgccgcaggccttagcactggcaacggtgcggcacccaccaagggcgcttacgacctggacgagttcttcctggaactctcgatccctgtgctggccgatctgccgggtgccaagctgctcgacttcagcgtcgcctcgcgcttctctgactacagcaacttcggcaacaccacgaacaacaaattcggtttccgctggaagccgattgatgaactgatggtccgcggcaactactcagagggcttccgcgctccgagcatcaacaatctgtatcgcggcaacaccgattcgtttgaaacctacgccgatccctgctccgcttccagcggtcgtcgcaccggtgcggttgccgcccagtgcgccgccgaaggcgtcccggcgaacttccagcagcccggtgccggcagcggtgccaacaagcagaccccagaagcgtttacctggaagtcgaatccgaatctgaagccggaaacgtcgaccagcaagacgctgggtctggtgtggagcccgagcttcgtcagtggcctgaacgtgaccttggactggtggcagatcaagatcgaagacgccattacccgtcctgcaatccaggacatcatggatcgctgctacggcggttcgccgcaggaacaggcagcttactgcggcctgatcacgcgtgatccgaactacggcacctcgacccagcgctacacgatcaccaatgtcgacatgccgctgcagaacctctcgtcctacaaggtggaaggttgggatctgggcatccagtacaagctgccggagacttcgatcggccagttcaccatcagcctggatggcacctatctttccaagtgggacactcaatcgaccgacgacgcaccggttgacggccgagccggccgctatctggaccaggatccgtactggcgcattcgctccaacgtctacgttgactggtcgtacggtgatttcggtgtcaactacggtctgcgttacaagtccggcatgaccgaggcctgcccgttcgatccggttggcgatgccgatctggtgggttactgctccgacggtgcaaatggcaagaaccatatgggtgcgacgacctaccacgacgtccagttccgctacaacactccgtggaacggcatcatcatggtgggcctgaacaacgtgtgggacaaggatccgccggtttcctactcgacctcgtacaacatgttcgacccgcagtacgacctgccgggccgctacatgtacatgcagtacaagcagaagttctga

SEQ ID NO: 501616 - DNA, 864 bp, Stenotrophomonas maltophilia
atgttctcccatcgtctgaacgaccgcatcggtgccgtctcgcgggatgaaggccgtgccgcctgggcacgcgtgggccggcagcaggcggacttcagcgcggtcggcggccaactgtcgatcgatggcaccacctcggtgctgcagatcggtgctgacctgctgcggcgtggcaatgcggttgccggtgtgatgctgagcagcggccgcgcagacagcagcgcagtgtccgatctgaccggctacagcgccaagggccgggtgcgtggcagcgcggtgggtgtgtacggcacctggctgcaggaagcggacggcacgcggggtgcgtatgtggatgccgccctgcagcacggtcgattcgacaaccgggtgcagggcatcggcctggcgccggagcattacgactcgcgcatgaccagcgcgtcagtggagtccggctacaccttcaacgtgtggcagggcagcgccagcgcgctgtacgtgcagccgcagctgcagctgagccatgtcgatttccgcgccgatcgccacgtggagagcaacggcacggtgattgaccacgccgccgccggtggcctgagcgggcgcgtgggcgtgcgtgtgttcggccatggcacggccgccggcaacactctgcagccctacctgggcgtgaaccggctgcgtggcagcggcagcagcacgttgcagttcaacggcgacacgctgggtgcggacgtaccgcgcaaccgctatgaagtgcaggccggtgccgagctgaagctgggccagcgctggcgtgcgtggggtggcatgagcgtgcagcgcggcgatcatggctaccgcaacgtgggcggccagctgggcctgcgcagggcctggtaa

SEQ ID NO: 501617 - DNA, 171 bp, Stenotrophomonas maltophilia
atgcgaaggactgcgggtcaatgtcgtacgcgcccgccgtacccgccgggcgagtacgacattgacccgcagtccttcgcattgagccagtacggggacctgatcttgaagcgttacgtggacctcgttccgctgcaggcgaaggccgcagccgtccaggcgaagccgtaa

SEQ ID NO: 501618 - DNA, 204 bp, Stenotrophomonas maltophilia
atggccgtgctgatccccgcatgccgcgaagccgacctggacacggccacggggacctgcacggctgtgatctggattcctcagccggcactactgccggaactgccgattgaggatgcacagaccattggcgcaaagatcgcgcttctgtgggctgtcgcgtacgtgttccggctcattcgcaagaaaatcgaacagtcctag

SEQ ID NO: 501619 - DNA, 231 bp, Stenotrophomonas maltophilia
atgcacaagatgttcaacgccctgaagggcaagggtaccgctctggcggctgtcggcaccgccgcgctggtttcggccccggcgttcgcgtcgggtggtggtggcgtggacgtgggtccggtggtcacggccatcaacgccgccctcggccccgttggtcagatcggcgccgctgtgctgatggtgctggtcggcgtcaaggtctacaagtgggtgcgccgcgcgatgtaa

SEQ ID NO: 501620 - DNA, 1404 bp, Stenotrophomonas maltophilia
atgcacgtgcatgcgttctcgcgccgtggcatcggacttcttctcgcgacgtgctgccttctggcgttgctgttcgccgcgcccgcgatggcgcaggatcgtagttgttccaatagtcctacggtgctgactagctggtgcaccgatgagggcaaggcattcgccgctgcgaacgcgaccgcatcagctcaggcggccatatcgaacaagagttctccgggtgtttggtgtccaggtgtcgcgcgtgtgggacagatttcattcacagcctacgtgacgccttgcagttcgccggggccgcagtgggaaacgcgcagccgcctatacgacaaggacatgtcgtgcaagaaccgtcctgattacaacggcgcctttccgggtagtcagtacaaaccgcgtagtggctcggtgtcgtgcgacctcgggtgcaccgtgatgtggacgcacaacgcggacggaacggtcaatggttcgccgatcggtgatacctgtactgcggaagatcacgattctgacgatgactgcaaggtcaacggtccggagtactactacaaccggcagatcggcgtgtgtgagccccaagagccagaatgcaagggcggcgccaaggccaattcgctcggaaagtgtgagccggaaccctgccccgatggtatgggacagcagcaggacggcacatgcaagaagaagaacaacgaatgcccgtccggacaggtgcgctctcctgatgggaagtgcctgccgggcgatggtcagtgcgctagcggcgaggtccgtggccccgacggcacctgcaagaaagacggcgacggcgacggtcaaccggatgatcccggcgaaaatgagacgttctcgggtggcgatgattgcagcgtgccgccgtcgtgcagcggctcgccgatcctgtgcgggcaggcgcgaattcagtggcgcatcgactgcaacacgcgccgaaaccggaacatcgcaggcggcgcgtgcaacacgatgcccatctgcacgggtgacaaatgtgacgccatggagtacgcgggactgctgatgcagtggcgttctacgtgcgcgctcgaaaagatggcgagcagtggaaacggcggcagtgagggcggcgacgttaaggcgattcgtgacgcccttaccggcaccggtggggctgtcacaacgccggctgatcgaccagcttccgacgtgtggacgccaggcagtgggcaaccgacgcgccccgatagctccggctacggctggggcaggggatgtccgcagccgcctgccattgaggtcatgggtagaaccatcgcgtttgacaccacgccgttgtgccggtggctcggccttggcagctacttcgtcgtgggccttgccgcgctgttctgcctccgaatcatcgccagtaaggatgcctaa

SEQ ID NO: 501621 - DNA, 312 bp, Stenotrophomonas maltophilia
atgccaatgctcattagcacgttgctgaccgcgctcgctgcgctgttccgctcaaagtggggtccatgggtggccgaggccatggtctggctcggcatttcctgggcaacgaatgagtttcttgtggatccatggatcagccagatggaagacgcaatgcgtgccggtgcgccgggcggggagtggggtgcgctggttgtgtcctatgcgggcattatgaaattcgacgtagcgtgcacgatgattgcctccgctgtgacggccaagttcgctgtcggtgccgcgaagacgttcctgacgaagcggacctga

SEQ ID NO: 501622 - DNA, 1203 bp, Stenotrophomonas maltophilia
atgcctatcgaactgttcaccggccagcccggcaacggcaaaaccgcgctgatgatggagcgccttgtttcggaggcgaaggcggcgagtcgtccgattttcgctgtcggcattgatggccttgatcccggccttgccactgtgctcgatgatgcgcgccactggaatgacaaggacggcgacgggaactacatcattccggatgggtcgttgatcttcgtggacgaagcgtggaaatggttcggccatctccatgatgccactcggcaacagacgccaaggcatgtgctggaactggccgaacaccggcaccgtggcctggacttcgtgtggaccacgcagcagccgaaccagctgtatccgttcgtgcggggtctgattggcgctcactcgcacgtggttcggcgcttcggaacgaagatgcttgacgtctatcgctggggcgaactcaacgaggaaatcaagtcactcgcaaagcgggatatggcccagcgcactacacggctgctgccctcgcaggtgttcggtcagtacaagtctgccgaggtccacacgatcaaggcacgaatccccctcagggtgttgctgcttccggcagttatcgtcgttggcgctgtctgcgcctacatggcttaccggtctctcgtcccatctgcgctcacagatggcgcgggcaaagaagggacgcaatcggcgtcagccgatgcggccccttcgccgtcgggcggcggatcgcgcaaggaagacgctcctcgctggccctcagccgctgcctatgccaaggaccacatgccgcgcatcagcaccatgccctggacggcgccgatctttgacgaccgacaggcgcgagctgatccgcagctggtgtgcatgtcgtcactggaaggtttggacgcgcagggcgtgcgtcaggacgcaagctgccgttgcctcaccgagcaaggtacagcgtatgagttgagtcagcccgagtgccggacgctggcgcgcaatgggcctgtctacaacccatatcgggagcggtcggaggatcggcgggaccagcgctttgacgcggcaagccagccacggcagggcgaatcggttgggctggcgggcagcgtcgtgcagcacgtggagcgcaccatgggcagtttccccgagtcgcccgcgttcccaaccgacagctacatgaccacggcaccgggaccgaacaagctatga

SEQ ID NO: 501623 - DNA, 627 bp, Stenotrophomonas maltophilia
atgaccagcagcgcacgcgaggtattgaagtggctagccgtcgttctcatgacgtgcgatcacgtcgccaaggtgatctacggcggctatgtgccaggtctcagtgaggcgggcagggtagcgttccccctgttcgcactggttatggcctacaaccttgcccagcccggcgccgacgtagtcaagtcggttcgcaggctcggcatgtggggcctgatcgcgcagccggtacatgcgttggcattcgggtactggttgccgctcaacatcctgctcacgttctccctgtgtgctgccgtcatctatgcagccgcccagcgaaggtgggttgccctggcattcgccgcggtggcgctgccggcattcgtggactaccaatgggccggggtagggttcgtgttgctggcgtggttcgccttcaagaggcgccagttctggctgttggtgccagcattcgccgcgatctgctggttcaatggcaacctgtgggcgctggcagcgattccggtggcgttgggcctgtctcgggcgtcatggcctgtgccgcgcgggcggtgggccttttacggctactacgtcgcgcaccttgcctgcatcggcctgctggcgcctatactgcggtcatga

SEQ ID NO: 501624 - DNA, 1092 bp, Stenotrophomonas maltophilia
atgcagcgaagcgctcaggaatggcgtgcattggcggtcaggcgatgcgtaggctgccaaacgggtgggaacaggtgtcctcgcgctctggcggatggttacgctgtcgggagcagtgatccggggtgtaggggcagcgcccctacggaagcgcctcacacgcgctggcgaggcatgggccccagtatcggcaggtctaccgctggtggctcggcgtcagggccagccatcgccaccgccgaccgctgtttgcgccggctcaccacgtcccgcagattgacgacagtggcaggacgatcccacgttactgcaggaagattgccaccacgcttggaactgtcgatcgacggcaccgagcgtgcagcttccatcatccggcgccattcctgcgcttggcaggcggtgagtgacagccaggccagatcttcaggaagtagctcgcggccttcgggcgtgatcagacgatcaccgaggaaagaaaaaccggcccaagggccggtcaagtcgatacggtggtgcgggtcaaactcaatcatgccgcgatctcatccttggccggggactgaggacgcaggcaagagccgagccagaggcccagccattgccacgcggacccaacaaaggcccagatccggcggatacgtgatttcgcataatgtatattatgttcaagctcctgagggggtggctggcacggctcttgcctcgccccctgtccctgttgcggcatggagcctgattgtgcgtgatcggaacctaaccggcccttgggccggtttttcgtttaaggctgaccgactggtcacccccgaaggccgcgagctggaaccgcaggatctggcctggctctcgctcacagctgcgcaggcgcaggaatggcgaaggttgatggaggatgcttcgagctcgaagattcgagctcgagatcgccggaaaccgttggcgtacaaggctgccgaaattgtagatctccgagatgctgtccggcgacgcaccgaaaagcggtcatcggtggcgatggctggccccgacgccgagccaccgcgtgcagctcttcatgaacaagggcctcagcctcgccagcgcgtgtga

SEQ ID NO: 501625 - DNA, 1329 bp, Stenotrophomonas maltophilia
atgctggtttttaacgagggtgttccgcgtgctggcaagagctacgacgcggtcaagaaccacatcctgccgacgatcaagaaggggcgtcgggtcttcgcgcgcctcaatggcctcaaccatgagcgaatcgcggaatacctgggcatgcaggtcgatgacgtgcagcagttgctcacactggtggacacgaaggacgtggcagcgacgttcgcttgctacaaggatgatgtgaccggccagtggtgcattccagatcagttcaaagactcgctgtgcgtcattgatgaggtgcatgagttctacgttgcacagcggcagccattgcccgatgcggtggagaatttctgggcgcttcttggtcagaacggcggcgatgcggtcatcatgacccagtggatcaaccgcgttcatcaggcggtgcgtgcgcgcatcgagcgcaagaacgttttccagaagctcaccgctgtgggcatgaagaaccgctaccgggtgaccttcttccacaccacctcgccgggcaagtatgagcgggtagggggcaagactgagaagtacgaccccgcaatctacccgctctaccacgggtacgctgtgggcgctgagaataccgaggtgtacgaggagggcggcaccaacgtttggaaggcgctcgcgctcaaaggcggcgtcatgggcgtggtcgggatcgttggcgccgtggccttcatcggcttcttcctgagcggcggcggactggtaccggaggaagagaagtcaaaggaaaagcagctgcatggcgtcactgccgcggccccggcagatcaaagcacgattccgaatcttccgggtgtgcccgctcccaaggcggcgcctgatcctatggacgcgttgacgccggaacagcggtatgtggcgcagctgtcgaaagggaaccgtatccgactggcgctcacagctgtcttcggcgaccgccaggtcggcatggtcgagtgggtggacagcagtaacaacacggtcgatcagctgacgttcgacgcgttgattgcgctggggttccgagtgcgggtgttcgcctatggcgccaacatcagcgccgacaattacaagctggtcgctacgccatggccgcgccaagctccgcgacgggaggaagatccgacgctctaccgcctggacaagccggacgctggcaccggcattgcgaccgcagggagtgaggccggtgctggcgtccgggtcatcagcgcacaaggggcggtttccactgccggaggcacgctggttcgcgtcggtgagcggcccatgggaacatttccggaatcgaagccgtacccacccagcttctga

SEQ ID NO: 501626 - DNA, 348 bp, Stenotrophomonas maltophilia
atgatgaattttctcgccttcctgatgccgcacgccgggtggctgacggacctcacgcaatggctgctgcggcagatacaacgcttctgggacgcgcttgtcgcgttcttcaatgacctgctcatcctcgccattcagacgatgctggcgttgatgatcaagatgattggcgctctgccggtcccggatgttttgaagaactacagcatcggcacgctgcttggaaatgcgggcagcaccgtggggtggttcgtgcagacattcaaacttggcgagtgcttggcgctcatcggttctgccgtcgcgttccggattctgcgcaaggtcatgactatggggaaatggtga

SEQ ID NO: 501627 - DNA, 654 bp, Stenotrophomonas maltophilia
atgtacaccagctcgctcgaccccaaaggcaccgcaggtgtgtccttcacgcccacgggtgggacttgcaccgaagcggatgcccctgcgccgacgcctgcgggtgacggtggcgatccgggggaagggggcggcggtgacggcggcggcaatgatccgggcggcggcgatggtggtggcgacaacggcggcggtgatggtgatggcggcggcaacaaccccggcggcggcgatggcgggagcggcgggggagacggcgatggcgacggagatggggacggtgatggtgacggggacggcggtggacccggtccggggccaggtcccggtgaaggtgacggagatggtcccggcgaggttggtagtgatggcggccccctgtacgagcgggacaagaacctgacactggacaaggtgttcaacgacttcaagcagcaggccgagaagctgccgatcatccaagcgacgaagtcgttcttcaccgtcagtgttggcggcagctgccccgttttcacgctaccggcgtcgcagtactgggacacgatgaccttcgatcttcactgctacggcgtcatctatgagtcattcctgctgatgggctgggtactgctcgctatcgcggcatttatggccgcaaagatcgcgctgacatga

SEQ ID NO: 501628 - DNA, 354 bp, Stenotrophomonas maltophilia
atgaaaattctcttgatcgccttcttgctggcctcttcgccggacgtcatagagcccggctacagaatgggaggctacaacgaaaatccgtcgccgatgccgggcacgctgaaggcattgggcgcgcgatgggagatggactacagaacactacgccctgccttgttgaaagcggggtggggcggaatacgacgcgagtactcgcatgcgaccgtgcttggatttcccgaggtcaattgtggcctcggctggcaggcggtctgctggtccatgttccacaagaatggccgggatgtttttctgcaactgcatcctacagacgatggccgccttatcctgattggcgcagagtga

SEQ ID NO: 501629 - DNA, 2418 bp, Stenotrophomonas maltophilia
atgcgcgttcaatctttccctgcagctacaccttctctgcgcccactggcgcgctgcctgctgttggcgctgatgatgcccatcggcgccgcctgggccggcgatctcgatggcggaagtgccgaggttgtcgtgggcgatccggtcgagcagtggcgtgtgcgcaacggcggtgcgctgaccatcaatgggggtgaggccaaccagatcagtgcaagtgaggactcccgcgttacgctgaacaatgctgtgatcacccgcgaccccagcgtcagcggcgagtactacaacgtgtctttgcaggacgacgcatcccttgaagcggtcggcacgctgttccagggaggaggcattaccttgtccaacggtagtgctacggcgcgactggtcaacagcagtatcaacatcccgggtggcgaagcggggcgtcagctgtcggtgggtctggacctgttccacaatccgaccgtgcccgccacgccaatcgatccacgcggggtgctggaccgcacccacgtccgggtgggcgacgcgccggacgcatcccgggacagcagtagcggcataggtgttcgcatgggctttggcacggtggacatcgtcaatggctccttcatcgacgcagacaatgttggcgtcctgttcctgggttcggtcgggccttttgacaacacactgcgtgtggatgcctcaaccatcaattcccggcgtggcgcagcccttcgcgtcgctccgcgaagggaggatcagcgctatgacattacgatcgccaatgattcgcacgtcaccggtggcgatggcaatctgctgctggtgcaagcctatgaagcgactccctctactgccacgcctgaggtccacttcacggtggatgattcgcgcctggcaggcgacatcacctatgaccgaacctcggtgcccaacggcacgctggacgtgatcctgcgcaacaaggcacagatcgacggccgtttcatcaacgtcagctcggccagcatcgacagcgacagcacctggctgatgatcggtgacagcaacgtcggccacctggcgctgggcagtaccggcacggtggcgctgggcaatggcagcacgttcaacacgctcagcgtggataccttcgacggtgccggcggcaccctgctgttcaacacccagctgggtgacgacagctcggccaccgacaagctgatcatcaagggcgatgccaacggccaggccaacgtgctcaatgccggtggcgcgggcgcgaagaccgacaagggcatcgagctgatccgcgtgggcggtgcctccaatgcgcagttcgacctgcaaggccgcgcggtgggcgggcagtacgagtacttcctgttcaaggacgccaccaacggcggctggtacctgcgctcggagctggccggcacgccggacccgtgcgtggtggatcccacgctgccggagtgcacgccggtcgatccggtggacccggtcgatcccgttgatccgatcgacccgacgccggtgctgcgcccggaggccggcgcctacctggccaaccagttcgcgatggaccagctgctgcgccacggctggcgcgaccgccagggcggcaacacctccgccgttgatggcgtgcgtggctgggcccgcgtggacgctgcgcagagcaagctgtcggcggtggaagaccagctggacctgcgcgtggaccgctcgcgcctgcagctgggtgcggacatcggcgtgttcgacaacagccagggccgcgtcggcgtgatgggtacgctggccaagtccgatgctacttcgcgttcgcagctgaccggctacagcgcacgcggcaaggtcaacggtggcgcgctgggcgtgtacggcaactggagcaacgatgcactgtatgtggatgccagcgtgcagcgcggccagttccgcaaccgcgtgcagggcgaaggcctggccgaggaacgctacgactcggacatctggcagagctcgctggaagccggctaccgcttcggcgtcggccagatcggccgcaccgcgctgagcctgcagccggagctgcagctggtctacaccgacgccaacaccgatcgccacgaagaaaccaacggcacggtggtgcgcagcctgggcgacagcggcctgtccggccgcgtgggcctgcgcctgcagggcgaatcccgctcggcagcgggtgtctcggtcaacccgtatgtggtgaccaactggtaccgcgatggcgccagcaacggcatggcgttcgacgatgaagcgctgaaggccagcgtgccgcgcaaccgctacgagctcaatgccggtgcgcgcgtggacttccgttccgggctgagtgcgtggggtggcttcggcgtgttgcgcggtgaccatggttaccgcgaagcgacggccaatctgagcatgtcgtaccgctggtaa

SEQ ID NO: 501630 - DNA, 1371 bp, Stenotrophomonas maltophilia
atgggagaacatgctgatcgcagccgactggttggccaggtaggcccccgcttccgggcgcagcaccggcggcggcaggatcggattgactggatcgaccgggtccagcggatccacagggtccgtcggatcgatcggatccgggccaggatcgaccgcgcatcccggcgcagccgggttgtcctggcagacatcgaaccactgcgaacgcaggtaccagttgccatcggaaggatcggccaggccgccctggaacaggaagtactcatacgatccgcccaccgcgcggccgctcagtgcgtagttcgcccgcgatgcgccgtcgatctcgatcagcgggatgccatccaccgtcggcgcgcccacgccaccgatgttcttcaccgcgatcagcgcgtcaccggaggtgtcgccgcgcacgtgcaggcggtccatcgcgctgtcatcgccggccagcgcgccctggaacaggaatgtcgcgccctcactgtgcagatcgccatccacggtgagcgtactgaagcgaccactgccatcggacagggccacgccgcttttgagcacctgcagcccgcccaccgtggcgtcaccggtcaacgtccactggctgccgctctcgatggccatcgtctgcaccagatccgacgaaccctgccagagcgatccatcggccaggcgcacatgcacgtcggacagcggaaccagccccgcatcctcgtcctccggcgtgatgacgatgtcgcccaccagctgcgagccaccgtccagtgccacatcgaagcgcccggccactgcggcatccaacgccagggcgatgccattgccgcccgataccaccgcaccgttggacagggtcaggcccggctcgcggctgctgcgcagccatacgccaccatgctgggcgctcaccagcgagccgccgtcgatgcgcatccgaccgttgtcattgatcaccgccgcccacgcgccctcgccttcggtgcgtacatgggtgttgctcaacgtcatttcaccggtcccgccagacagcacaccgtgcgagttgatgccggtggtgcgcaccacgctgtcggccagatgcacggtgccacccacgcgcgcgatcgcaccgatggcgccatcaccttcggtcaggatatcggtcatgacggcgctcacctgcggattctttccgccggaaccctctgcatacaggccatggccattctggccgagcgtgcgcaatcggctggagctcacccgtgcggctccatccaggaccgagatggcctgccaggaattgccgtctgccgtgatctccgaaccttccacatccagctcgcccttgccgatcatcaggatgccaacaccattgtgcgtagtgatggatga

SEQ ID NO: 501631 - DNA, 270 bp, Stenotrophomonas maltophilia
atgaacgatggcatctccgaactgctggaccgtcttcattcctgcgaagtcgcgatcgaagtccatcgcggttatctgaaagcaatggagtatgggctgcgcatggccgtcgcgacccatcccgcgcgcgagcacctgtccgatgtgtggctccagttgctgccaaagatcgcggcaaagcaccgagacgatggcggcgagctcttcgctgccgcattcgagcagtcactaagacttctcaccgagcaaatcgacgacgctcgcccctaa

SEQ ID NO: 501632 - DNA, 615 bp, Stenotrophomonas maltophilia
atgagcgttctcaaccttctgcttacccgtgaccacttggtcgtcgcagtggataccttggcagaggatgcccgaacaggagcgcattctgccggcgcgaagctgctcctgatccctcagcacaacctagtcctggcaactcgcggttccgcccagttcttccttcgcatctacgagctggcgttgcaggccagcttccgcgcagatttcacgatggagcagctgtctgccgagctagggctggtagtggaccagctatggccgaactatgagaaggcagcagccgaggccagcctgcctatcgagcagctcgggaccaagctggttctgggtggctggtcatcaaagaacggccggatgatggccatggggtatgccaagagcgacagccagcgcccttgcgtggtccaggtcgtgggaggtcagctggcgtcacccggggagccgctccgggcattgacgcctagcatgggccaagccgatctgatggcccacgcgcgccttcaggccagttacctcaatgagcagatgggccgcgaggtggctggcgggcggctgttggctggcttcctgcaaaaggggcaggccgtgatcaaagatctaggggagctttag

SEQ ID NO: 501633 - DNA, 504 bp, Stenotrophomonas maltophilia
atgcagtcttcccacggcttccgcaccgccccgatcccctctggctgggtccagactggcgagcgctgggcgctctggtacaacggccgggagacggccagtgtcacatccgatggcggtcccggcgtccggctatggatggaaggccagaagatgtggcaggtgaaggaagtgcgcgccgccaacgttcgacaggcgaagcgctacgctgagcgctggtgcgcagcacggctgtatcccgagctgcctctgcgccaggcggtcgcccggctgacagacagcaccccgatccaggccgagcccccgctgcccggcctgccgccaacccgtgagcagcagcaacaggcccggcgccttgtcgaggccgggcggttggaactggagcgaatcaaggaggcgctggagcagcgccgaccgccgaaggagaccaagccaagggcgagtgatcccatgaaggcctggggcagggcaggtagagagctgttgtcccgagctcgaatctga

SEQ ID NO: 501634 - DNA, 411 bp, Stenotrophomonas maltophilia
ttgaccgttgagcacatcaaggccgcctcgggcgagcggtcaccactgatccaccagcagcgcgcagccatagcagttgcagcagcgctcgaaaccgccctgaccagcacgcgccccggcagcggcggcggccgcgcattgaccttcacgtttgccggcgagccgcagctgcaggccgcgtgcgacgcctggcgcgcatacgccctcgccaccatcgacatgccggcgccactggcggcgacagcgacccagcggcttacggcccagatcggcctcgcccttttcgatgaccccacaatggacctgacacagatcgcaaaccttgtgaccacggcacggtccgattcgcacactgcgctgctgttggcgcccaccactgaagtaacggaggcccgagatgggcgcagctga

SEQ ID NO: 501635 - DNA, 573 bp, Stenotrophomonas maltophilia
atgagcggcgatgcttcgaccttgaccacagcaccgccgccgactgcgagtgacgccctgcgcgagatgcgagccgcaagccgcgccggtcatgcagtgccggccgatcaggtgaatcgatgggccaccacgctgatgtgtctgtttggccagcagcgggccgtcaggctcgagcagtggggcggatcgttctggtatcagatcgatgaaaaacagtggtaccgggcacttgcagctggcgaacgagtgcgggcgctctacacccagcctttgctccacgagctccgcagggctggggaggatcgtgatcacatctggtcggcggaccgaacgcactgcaccgtttgtaacgaccctttcgattgggccgatccgtactgcaacccgcccaagccgccggcgcctatcgcgctgaaacctcagccgttcaatccctcctgggttctcccactgctcgaccgactggagcgagcgttgaagcgtgaaggcaagcgggaaagggacgagtggggtttccgaattgcgcagctgcgtaaatcaatcgatgagcatacgaaggagaaatcacattga

SEQ ID NO: 501636 - DNA, 327 bp, Stenotrophomonas maltophilia
atgagccccggccgcaatgctgcatctatccgcgctgctctgcgcggcgctgttcccgcccacgtcaccgcgcgtgacatgatccgccgtcactgccgggaacacggcaagcagctggtatgccttgcgcctgcatggggctgccaggtattcagcgttcggcgcgcgtttggccgaacgtcccgtcccctgcagccgcatcaggttgagggcgcgatcacaacgctgcagctggacgagttcgacgccaacgagctgcgcctgcgtgcagctcgcgaggccgggtggaacatcgatcccaagatgctgctcgagggcggagcatga

SEQ ID NO: 501637 - DNA, 1374 bp, Stenotrophomonas maltophilia
atgcggctcacgcccctgcgcaacccatcctcccggccacggacacttcccgtgcgcgtccaccccggattgaagaaagaagagcaagagcaacagccgcgttgcttccggggtcagatccgctttccgcaggaaaacggatctgacccctctttccacttggaaacccaatgccgccatgacctgccgttgctgttgctgttgccgttgcttcaaaagcctgccgcaggcagcgccgcagccgccgctgcaaggaaacctgaatacgttccgacaccacgcctcaatcccccgccgcaacggccgataacggggttgtcacggcgtgtaccgccgatgaccggctcggcgccgcccgcccgcttcgacctggtcctgctcgatgaatctcctgcatcgctggcaacactacttcagcaatctttccgtccggcgcaagctcaacctgctgacgctgctcatcgcgctcggcgtgatcgcgctctcggtgatcgccgcccgcatgcagtacctggacctcaccgagacccgcaagaccgcgctgaagacccaggtcgaactgagctacggcatcctgcagcactaccaccgcctggccggcaccggcgagctcagcgaagcggcggccaaggccgctgccctacaggcgctggaggtgatgcgcgccgagaacgatacctactacttcaacgtctacgacaccggctacacgctgctgatgcacccgttccgcaaggacctggtcggcaaggacatgaaggacttccgcaccgacgacggcgtgcgcatctactacgaccaggtccaggccgcccgcgccggcggcggcttcgtcaactaccgctgggccaagccgggaagcaagggcgacgtcgaaaaggtcgcctacgccggcctgttcgcgccctgggactgggtggtcagcagcggcgtctacatggacgacgtgcagaagcaggcactggtgttcaccgccatcatggcgctctccggtggactgctggtgctgatcgttctcgccctgagctgggtcatcggcaaccgcatcgcacgaccgctcaagcaggccaccgccgtggcagaaggcatcgccagcggtcgcctggacagccacatcggcccgcagccgcacgacgaaccgggccgcctgctggaagccatgtcaggcatgcagcagcagctgcacgcggtgatcagcggccagcgcgagatggcccgccgccacgatgccggcgaactgagctatcgcatcgatgccagtgccttcccgggcgagtacggcttgatggtgcaggaaaccaacgcgctggtcggcagccacgtgcagaccctgcacgacgtgctggacgtggtgcagcagtacgcggtcggtga

SEQ ID NO: 501638 - DNA, 495 bp, Stenotrophomonas maltophilia
atgcacctccgactgcggcaccaggccggccgccaggtcgtcaggattgatgacaatgtcacccaccatcacggcattgttctccagtgccacatcgaagcgcccggtcacggcagcgtccagttgcagggcaacccggttgccaccgtacagcactgcaccatcggccagggtcatgccgggaatgcgcgcaccccgtatccacaccccaccatgctgctggctgaccagcgagccaccgtggatctgcaaccagctgtcgtcactcaggaccgcagcccaggagccttcaccttccacgtgaacatgactgtcgcggaggaacagatagcccccgcccgcgcccaccagaccgtgcgacgccgcaccggtggtgtgtacggcgctgtcgatcagatccgcaccggagacgccgtcaatttcgacgcccgcagatgccgccccacgtgtctcgatgcgtgtgccatatgccgagaagtccgcggcggtgactga

SEQ ID NO: 501639 - DNA, 192 bp, Stenotrophomonas maltophilia
atgggtgagtgcttgatcgttactgccgtccagtggaacgagctgatgcgcgccattgggctgatgttcctcactgtggtcggtatcggcctcttcgctcgattcgatctgagcctgtgggaatggcgcgtacgtcgctacctgcgccgacgtcgcattgcgcgcatcagggggggcgcccatggccgttga

SEQ ID NO: 501640 - DNA, 231 bp, Stenotrophomonas maltophilia
atgatcgacccgttgattaccttcgtgctgcttgcgtccattgcggtcgtctccatcggtgccgctcgcatcgtgtcgtggctgctggaccggcgtgatcgtgccgccgtccagcgcgctaaggaagcggccatcgtcgcccaggcacgcgccgaactggccgcctcgggctggaccgctcaggacgaggaccgttaccagtccgatcgccaaggtggctgccatgggtga

SEQ ID NO: 501641 - DNA, 261 bp, Stenotrophomonas maltophilia
atgaacaccgcacgcgcggcatgggctgctgagtaccgcgaggcgcgcaagctggcgcgtttcatcgagacctttcacgacaacctgagcacggtgccggtcggcgagcgcaccttcccgcagtgcaagggcttccagttctcccgactttccggcgaccgccttggctggatcggcgatggcctttacgcacgcaccgtcgagtctcaccgccttctgctggcgtgcctcgcctatgagcacccgaggatgccggcatga

SEQ ID NO: 501642 - DNA, 150 bp, Stenotrophomonas maltophilia
atggactttgacagcatccttgtaaatatccgcccacagctggtggttatggcgatctgcggagcagcggcaatcgcggcgcagatcgaattcgcactgtgggccgcgccgaaggtggcgcgattcttcatcgcgaggggcatgcgatga

SEQ ID NO: 501643 - DNA, 138 bp, Stenotrophomonas maltophilia
atggattacgaaagcatcctcagcggcctgtcggtggccggtgcactgaccgccttcgcaggtgccgccgcgctgatcgcgctggtcggcttcggcaagtgggcagcaaagaaggtggccggattcttcggcggctga

SEQ ID NO: 501644 - DNA, 255 bp, Stenotrophomonas maltophilia
atgggcctctgcgttgtcttcggggaagacggaaagctgatcccaaccggtcagcccgttgatcagtgcgcggggtatgtgctgatgagcagcgcagaggcatccatggtgaccgtcatcgcggacgccttccagccaccaaacaaagagcagctggcggtatgggcaggcggtccgttcggcctccttcttttcctcttcgtcgccggtcggattgccggttccgtggcgacgttcttcgacaaaaaccggtaa

SEQ ID NO: 501645 - DNA, 201 bp, Stenotrophomonas maltophilia
atggtcggcctcgacttcggcaacggcttcgagctgccgttccgtgtgggcctgggctcgcgcccgccgtaccccccgggcgagtacgacattgacccgcagtcgttcgcgctgagccagtacggcgacctgatcctgaagcgttacgtggacctcgttccgctttcggccaaggcgttgccagtggcggcgaaggcctaa

SEQ ID NO: 501646 - DNA, 234 bp, Stenotrophomonas maltophilia
atgaccacgcccaagctctacaagctctttgtggctggttgccgcgagaattcgaccgtagacaacttctaccccgtcctccgggccctcaaggtactgtacgaagcggtagccatcatgcagcagaacgccagtcacgcccgcctcaacattgaagcgcgcagcatctcgcgtcaggctttctacccgttctgcggatacaccactgctcacctcactggcgtacgcgattga

SEQ ID NO: 501647 - DNA, 183 bp, Stenotrophomonas maltophilia
ttggcgcgcatcgaccgcgccaatgcggggctcagcttcctgctggaactgctgcacgccaccgaacgcgtgcgcgtggacggggatatcgaccagcacatggatgacggcgcgcgcgaagggctgttgctggcctgccgtgggctggccgagtatgtggatgtgcagttgcgggcggcatag

SEQ ID NO: 501648 - DNA, 333 bp, Stenotrophomonas maltophilia
gtggagagcaacggcaccgtgatcgatcacgccgacgccggtggcctgagcgggcgcctgggcgtgcgtgtgtttggccatggcacggccgccggcaacaccgtgcagccgtacctgggcgtgaactggctgcgtggcagcggcagcagcacgttgcagttcaacggtgccacgctgggcgcagacgtgccgcgcaaccgttatgaggtgcaggccggtgccgagttgaggctgggccagcgctggggcgcgtggggtggcgtgagcgtgcagcgtggtgattacggctaccgcaacgtgggtggccagctgggcctgcgcagggcctggtaa

SEQ ID NO: 501649 - DNA, 807 bp, Stenotrophomonas maltophilia
atgcatacgatcttccgttggaccaccgcgctgattctggcgctgggcatggccgtgaccgcgcatgccgacgacaccgccgcgcagatccgccagcacgccggtgatcaccgcctgctggtgctgggcgaattccatggaacccgcgagacgccgctgctggtgcggcagctggtggacggctacagccgcaccgggccggtcctgctggcgctggaactgccacgcggggaaacccccacgctgcgcgattacctggcttccgatggcggggagaaggcacgccagcatctgcgcgggcgtgcgttctggaccgtgcgcgatgaccagcatgacggccgtcgcagccgcgacatgctggcaatgatcgaaagcctgcgcgtgctgaagtcgcagggacgtgtgatcgacgtcgttggctatgacgtcaacgccagcaagggcggcaaccaggtacgcgatgacctcatggcagccgagttgcggcggctctatcgaggcctaccggccaatgcgcgcatgctggtgctgactggtaacgtgcacgccatgctgcaaaggccgcaaggtatgcctccggaaatgcagatgcatccgatggcgtcgcagctgcgggacctggatatctacagcgtacggatgggcgcgcaacgtggtcagacgtggagatgcgcgggcggttgcatggcgcggccacttcgagagcaggttgccacggggccgcgggtcgctgccggtgcggaacggccgtacgacctgtgggtatggatgccggaactgagcgtcgggacgctggtggatccgtag

SEQ ID NO: 501650 - DNA, 234 bp, Stenotrophomonas maltophilia
gtgatccgagttgcagacccaaacgccgtgaatgcctggatatacgccaatgtgggtaatggtgatgccttgagctacgacctgctccccttccattcggcatacggtagtggcccgcaggttatcgctgggcaagccaaacaggagggcattatcaaggcgagctactacctggagttcgaaggacgggattgcgtcaaccacccgtcgccgcacttgtgcatggagatgtag

SEQ ID NO: 501651 - DNA, 786 bp, Stenotrophomonas maltophilia
atgaaaggagtcgtactcgccgcattcgcaacctccctcctggcaggctgtgccacaccgatcggattgccacaaggcatcccgccggatggctacaccgagctggtgtccacgcctctcgggccattccgctacttccggtccctgtccattgttccggggcacagaagcttgccgcctctggattcgtttcagtgcacgcatacccagcacgaaatcgtgctcatgatggctgcaggatcacaggttgatgctgcagatacctgcaagcgcattgatgcagcagcaaggttctccgaatcatggatagaagcaaaggcgaacagatacaggatccttctcgcgccaacggataccgccgcgactatacagtcgcgcacttttggatcgttctcgggtgggaagacgttggcacttgcggcttcgatacatgacgaccgcgaacggactgttgcgaaccttgtcgatctggtcgcacacgagacattccatgcgctaggtcatgccacaagacaccctcaggcgcttgatgaacgcatcgcctactacgccggcatctgcgcacagcttcaggtgaatggcgttgttcgagaagattcgctgcctggagccgccatcggcacggacgacgctgcagtgcagctgtcttcgcaagcagcctatcgtgtccgtctcgagacctatccccttctcgcagatggccgcattcaaatgaatgagcaatctggcgaacgtatgctccagcgttgcagccaactcagaaggggtcttacgaggtcgcgttga

SEQ ID NO: 501652 - DNA, 933 bp, Stenotrophomonas maltophilia
atgtcccatacatcgatgcagtggctgcgcgcatccgccacaaccgtggccctcgctctggcgctgggcacaccgcttggcgcgcacgccgctgccgaggatcccttcttcaccgccctcgatcgctacggcgccgatgacttcagcgcatgcgcgcggctgctcggcgagctgttgcagcgtggtggccgcttccccgacggcggcgagctgctgctggtggaatgcacggccgctgccggcgaccgcagccaggcaatggactacgtgaaccaactgctgccccgcgggcgcctgtcattcgatgatctgctgcacaaggatcggccgggcctgaacgccctgcgcgccgatccggcgtggccggacatgcagcggcgcgtggaagccgccgagcagcaacgcctcgcgcaactggacgccccgttgcgcaaagagctgctggagcgcgccgcacgtgaccaggccgcccagcatgtggcgatcgacgcggggggtggcaatgcgttcaagggcgtagcaccggtggcccaggccaatgccgattggttgaagaccatgattgccgacaagggctggccgacctattcgcgggtcggccatgacggggccaaggcggcctggctgatcgtccagcacgccgatcacgatcccgcgttccaggcacaggtgctgccgctgatcgaacatgcggcgaaggccggcgaggccgatcttcccgatctggcgttgctgaccgatcgcgtactgctcgcgcagggcaagccgcagcgttacggcagccagttcaccaccgccggcgacggcacgatggagctgcggcccaccgaagacatggacgggctggacgcacggcgccaggccatggggctgcaacctctggcgcagtacaaggccacgctgtcggaggcgtatcgcaagccagtccgctag

SEQ ID NO: 501653 - DNA, 327 bp, Stenotrophomonas maltophilia
atgctgatccccatttccgcgtatgtgcagcaggccgacggcaataccgtgcaggtggtggtgctggacgcagacgcgcgtgcggcgttgcaggcactcggcgtggcggggcaggcggcgacattgtgcgccgaagtgggcgacgacatcggcaaagcccgcttgttcgctgccctgcgtgaccggggcgtagcgttcttggccggtcgcgaatggagcccggccgaggtgtttgcctggcttcgcgaccgcggtctgctcgaaggtccgtatctgcgcatcgcctggaccgacccacggcagtacgttgtctgcatcgacccgtga

SEQ ID NO: 501654 - DNA, 1008 bp, Stenotrophomonas maltophilia
atggcttcgctgcgccggagcagcacgctgcgtacgctgggcacggacgaacacagggcactggcaccattgcgcgcattggccggctgcgaccatgacgaccagataaagcggctgcgtggagcattcaccggcggtgcgtgccggaacagcttcccggtcggtgaaggcctgctgggtggcgttcccgcactggtgccaaagcaggcgtggccctacctcgcggaagacaatgaagccgaagtggtgttgggcaaacgcgcggccgtggtggtatgtctcaacggcttcactatcgctgctgcacggccggatgcagccaccagccgcgtctgtggcgagcgcctggagacgcccgaagaagtttcaatgcgacggggacccggcctgcgcccttccccgctggtgattgccgcactggcgtcatgggccgccgctggcgccccagggctgctggccatgccgttgctcgccatcgccgggctggcggcctggctggcactccctcgccgcaacagccccgcgacggctcagcgcgtactgcaggttcgcggacgcctgcgcgcttaccagcgcactgcccagacttcgcgggtgtggttgctcggcaatgaccgccgtgtgcagcttccagcggaatgggagcacgctgcggcattctcccgcggacgctcgatggtgctggaagtgcgcgcctgtgatggatgggtgctgggcgcaggaacggcatggtgcctggccagcgaccgacggcgctatccgcccacaggagggtcgtggcatctggcatggctgggcctgctcctgtgcgtgctcgtgttcggcgctggcggaatgccgccgccccgtccggatcctgcgtgggcggctgcctatggctggggggtgctcgcagtgctggcatcgggctggcacgcggtgcaggtcgtggtctgcaccgtgcagttcctgctccgccgccgcgcgtttgacgcaaacatcgcgcagcgtcccgacccgtggcactga

SEQ ID NO: 501655 - DNA, 1179 bp, Stenotrophomonas maltophilia
atggcacaagtcatcaacaccaacaccatgtccctgaatgctcagcgcaacctgagcaccagtggcagctcgctggccaccaccatccagcgcctgtcctccggttcgcgcatcaacagcgccaaggacgacgccgccggcctggcgatctccgagcgcttcggcacgcagatccgcggtaccgacgtcgccatccgcaatgccaacgacggtatctcgctggcccaggtcgccgaaggttcgctgaccgaaatcggcaacaacctgcagcgcgtccgcgagctgtcggtgcaggcctccaacgccaccaactcggccagcgaccgcaaggccctgcaggccgaagtgacccagctggtctcggaaatcgaccgcgttgccaagcagtcggacttcaacggcaccaagctgctggacggcaccttctccagccagctgttccaggtcggcgccaatgccggccaggccatcgccatcgacaagaccatcgatgccaaggccggctcgctgggcacctcgaccttcgccaccggtgcgaccgctgccctggccgccagcaccgacggtgcccgcttctccggcaccgtgatgggcgtggacatcggcacggttgaagtgaaggccggcgccaccacggcggatgcatccaaggccgtcgccaccgccatcaacgccaagatcggcgaggccggcatctacgccgaagccaatgccgacggctccctgaagctgagctcggtgaaggaaggcaaggccgttgccactgccgatatcgccctgatgcgcagcgactacgatgccaccgccaagacctggggcaccgcagcggctgccggcgcctacactgctggcaccgacacctcggccaacgtgcagaagctggacgtgagcaccgtgctcggtgcccagcaggccctggaagtggtcgacaaggccctgggtgcgatcaacagcacccgcgccgacctcggtgcgatccagaaccgcttcacctcggtcgtggccaacctgcagacctcgtcggaaaacctgtcggcatcgcgcagccgcatcaaggacaccgacttcgccaaggaaaccgccgaactgacccgcacccagatcctgcagcaggccggtacggccatgctggcccaggccaaccaggtgccgcagggcgtgctcagcctgctgcgctga

SEQ ID NO: 501656 - DNA, 1533 bp, Stenotrophomonas maltophilia
atgaagggattgaagcttgcaactgccgcggtcgcgtgcggcctgatctttgtgccgcccgtgttggcttctggagatcagccggcgaaagtgcttgaggatgcaggtgcttacgcggaggcggttgcgctgttggagcgtgaagcttcgaaccagctgacgcgtcatttgcaggagaggggtgaactgcgacaaatcagcgtcagcatccgtctggatgtgaaggcaagatcgatggtgatcagctttgggcctggataccttcccggcccggatcgcggttatgacgagctcttcctgattccgatggcgtctacgttgaggtactacgccgagaagtcgggactggatgtgaatgatattgacttcctgtttgacggaaaaacccttgaggaatactaccccgaggatctggccgttccgccgaagacgaacgagaagtcgacgcatacatcagctttggtgtcagcaagccatggctacatcagcttgcatcccagcagagaatggaagtttcagcgcccagcgcctctcggcattcaggaagacacgctgagtccactgtttggtgacgaactgcaaggattgatcgaacaacgtagcggtttgacggtgcaccgggcacgcagccgctccacggaactccatccggagtccgggaagccatgggagcacatgtcatcccgctaccacctcaaggcgcttttccccgaacgcaccgacatgtggaatgagtttccgaacagcccagagtctgctcgcgaaaaggaagaggacatacgggctcgccctaactacgcaaaccatctgggtgtggatgtgatgctgagcctgcacaccaatggcagcgattcagccagtctgcgtggaaccgaggtctactatcatcaggacaaaccgcaggacaaggcgctggcggatagcattctctgtgggatgcgtgaaatcatccgagcgcaaccgggctatcgggatttcccgattcgcgagagttcgacctcggccaggcacggcgagaaccgcatcgggaagatgccctcggtgatcatcgaaaccgcctaccactccaatcctgacgatgtggccgccttgcaggaccccgtcttccgctcggcgtcgatgaaaggggtggagaagggctatcgcctgtgggcaacgggaaagtcgtgtgagccgctgtccgggcagccgatcgcagatgtcgacgttccatccggcgactcgcgcgaggtggacgtggcgtttgcgggccatccgcaattcccgatcagcctgatcacccgcaatacgctgtgcccatcagggtggagctgcagcggacggacggtggtcatcgattcgcctgaccagcccagcaggatgcaactcagctgcggtcgcgacagcgtggggacgctcggctgggagacgcacgtgttggatgcggacggggtcaagtcgcagcccgtgcctcacaccgttcgttgtgttgccgatgcgggcggccctgatcgaaatggcttgcctgagaatacggctgccgcagggatgtaa

SEQ ID NO: 501657 - DNA, 2016 bp, Stenotrophomonas maltophilia
atgaacaacggtgcgcgcatgcctcgtagacatgtcctgggcatcctggtggctctcacactgctcgactccggcactgcactgggttccagtactgctgcttcgcagcgcactccaccagcgagcgcgagcagggctaccgaggacctcaaccgtcgcgttctctccgagctcgatttcagtgatcgtgcagacttcgactcggccaatcgcggattgatcgctccgtttgacgggatcatccgtggcgacaagggccaagtcgtatgggacatgcactcctacgctttcctgcatgaagaagcagcgccggccacagtgaaccccagcctgtggcggcaggagcgcctgaaccgcattgcgggactcttcaaggtgacagatcacgtgtaccaggtgcgcgggctggatctgtcgaacatgaccattattgagacgcccaacgggctggtcatcatcgaccccctcgtttcaacggagacagccaaggccgcgctggatctctatcgagcccatgtagggcagctgcccgtaaaggcggtgatctactcgcactcccatgttgatcactacggtggagtaaagggcatcgtcgacgagcgtgacgtccagcggggaagcgttcggatctatgcgccggcaggcttcatggagcacgcagtttccgaaaacgtctatgcgggcaatgccatgacccgtcgcgcacagtacatgtacggcgcgttgctgcccaagggcgttcaaggccaggtaggtgcgggactaggcaaaacgacgtcgcgcgggactgtaagtctgatcgcgccgaccgatatcatcggttccggcgggcaagcggtggaaagcgtgaccattgatggcctgcagctcgagttccagctgacgccaggtacggaggcgccagcggagatgaatgtctatgtgccgcagtatcgcgcccttggcatcgcagaaaacgcaacgagaacgcagcacaacgtgctgaccattcgtggcgcccaggtccgggacccaaaggtctggtcggagtatctggaccagaccatcagccgctatgcggcacgttcggacgtggtattcgcgcagcaccattggcccacatggggtggggcggagatcactaccttcctgtccgaccagcgggacatgtaccggtacatccacgaccagacattgcggctggccaaccgtggcatgacgccactggagattgccgacaccctgaaagagctgcccgagccgctgcggaaacgttggtacagccgcggatactacggcacgctgtctcacaatgtgagagcggtctaccagcgttatctcggctactacgacggcaaccccgccaatctcaatccgctgccaccttcggatgtcgcgcagcgttacgttgatttcatggggggcgaatcggcagtgctggagaaggcacggcgttcttttgaacagggtgactatcgctgggtcgctgaagtagccaaacacattgtgttcgccaatccggattcgcgcgaaggacgcgcactcctggcagatgcgttggagcagatgggataccagagcgaggcgggcacatggcgcaatgccatgttgatgggagcacttgagctgcgcgatggcgtaccgaagggcggcgccaccaccgcatcacctgacgtgctgaaggcaatgaccgtcggcatgctgttcgactatcttgcgatacgcctggacggacctgcggctgcaagggcagggaacgcaaccattgcctggatcattccagattccaaggaccgctacttgatgacgctgcggtcgggcgcgctctcctatcggccgctcgctaaccaggaccaggcagacgcgaccgtagagcttccccggagcacactcaaccagcttgtcatgggggcgcagccggcgcacgagctgctcgccggcccggccgtgaagctgcatggcaagcgatccgcagtcgagaacctgtttgcgaacgtagaaacgttcgacgtcatgttcaaaatcgtaaccccatga

SEQ ID NO: 501658 - DNA, 414 bp, Stenotrophomonas maltophilia
atgctcttcgtgctgacagcggcagccgcctgcggaaaggcagggccatcacaggaaatggcggcgatcagccccgtttcgctgcagtccctgacgattgatagcggggatgcgcacggctcggtacgcacacgacccttcaccgtgcaggacaatctgaccgtcgatgtcgtgctgaatgcggtgccgccagagaacaccggccagctccaggcgcgtttcatcaacttggccacaggccaggttgcgtcctctgcatccgagactgtcaccaccaagcaagctagattgacacttgctccaacgaacgcgcgggaatgggagccgggtcggtatctgctcgaagtcagtgtcggcgacactttgctgaccacgcgtgacattgatatcaacgagccggcgcctgcccactaa

SEQ ID NO: 501659 - DNA, 987 bp, Stenotrophomonas maltophilia
atgtttttcgcgatgggcggacttacgggatgcggcctctcaccgccgagctccaacgccaacggggacgcgacctcaatcgccttggggcgggagctgttcttcgatcaaagcttgagtgccgatggaaccatcagctgtgcgaactgccacgctccctcgaagtcattcacagatggccagggcgtttcaatcggcgtccgtggcctgcctggcacacgaaatgccccagacctctctgatgcaactgcctactccacattgttctgggacggccgggaaagcgaactcaaggtggtggcactgcaggcattcactaatcccagggagatgggattgcctgacgaagccgcgttgctcaaacagatcaacacccaggagcgctacgcgcgctttgcaaagggtcgccctctgaatcaatcagacatcgccgggggccttacgcagtacttgcgatctttgccacggcaaccgacacgctacgaccgcagcatcggtgaaccttcacttctaagcatggatgagcgcgctgggcttgcactgtttgccggcaaggcagcctgtacggaatgccacctgcttgctggagatccggccgcgttgaccgatcaaaggttccatcacgccggcgttgggtttgagcagatcgccggggacgtaactgcattactggggcgactggaacagtccacgcgcacggggcagcccttgggcgaacttgtgctatccgagcgggagattgcggagcttggtcgctttgcagtgactcggagaccgcctgatctcggtgcgttccgcactcccagtctgcgtaacgtcgcacgcacagcgccgtacatgcatgacgggagtgtgacaaccctcgacaaggcggtagaacgtgaaatctactaccgcagcctggggcgaggccgcgccgtgaacctgacggttactgagcaggcgcaactgaccgccttcctgcgcaccctgtccaccgagaattag

SEQ ID NO: 501660 - DNA, 3987 bp, Stenotrophomonas maltophilia
atgaacctggcccttccagccaccggcacctatgacgtcgtgatcgacgctggatacggggaaacagttgcaacggaagtactgttgagtgccggtgagggaagtcccgtcattgatggcgccacttcaactcacgcactttcgcgggcaggggaggctggatatttccagatcaacgcatcccaaggggattctctgggccttggtatcagcaacctgatcatcgcgaacggcagcggcgtggttgtgaatgtgtaccgtcccaatggcgtcctgttggctaacacaacctgtcacctggcgaattccggttgcgatctgaacctgttgtcgctggaagcgggcgttcatggcgtggaagtcgtgcccctggattcaaccccgaccatgacgttcaacgcaaccgtgtcccgcgatcttgtggtgaacatgacacgtggcacaccaactgctctggtcttgcctcgccacggccagaatgcacgcctggtctttccagcatctgccagcgaagtgattgctctcaagatcacagcgcaaaccacagagccaatgggagcgggcgtgtacttccgggcgcttcgtccggatggcacgaccatcgcttccggctacgctgcgggcgagaaaaccctgttgatagacaccaatgtcgccggcacgtaccaggtctttgttgacccggaacacggtgcaactgcgacgtcaacgttgaccctggaagcgggcgttctgggtgaaatggagcaggacggcagcataggggaatatcaaagcgctgcaggcaaggacgtctccttcaccatcaatgcggtggcaggaaagcatcttggctttggcgtcagtcatctgagcgtcaacaatggtacgcacgtccggatatatgcctacacgccaagcggcgccagtgtgggcaacgaaacatattgctatgtgaacaatggcggttgcgacgtacaactttacaaccctgtgagtgggacctacagcatcgtcatgcgcccggtgggtacgactcagacgatgaagttccgggctacgctttcgtcagcgctgcgctccactctttcgcgggatgtaccattcaatctgagcctggatcggcgtggccaggatgccttgctggcgttcagcggcatggctggtgagaccgtggccttccagatctctggtcaatccaccgtacctgcagccaggacggttgcttatcgggtctataagcccagcgatcgtagggcgggctatcacatcgccagcatccttccggaaacgggcggggcagtgaatattcgcctgcctgagagtggcgagtactgggtatacgctgatcctgaatttggagcagccgcgagtgccagggtcacactgtccaccggcaccaccagtggcatggtactggatggcgcggcggcggcttttgttgcagatcagcccgcgcagcctgcacattacagctttacggcggcggcgggccagcaccttggctttgccgtcagtgacctggcggtttctgatggcacgcatgtccggatatacgcctatgcacccaacggggacagcttccaggacgattcgtactgctatgtagagcggggcggttgtgacatcgacatcttcaatccggttcctgggacctatagcgtggtgctggtgccatccgtgccagggcagcgcatgcaatttaccgccacgctgtccagtagtgcaccggctgaactgattcgtgacagtccaagccagctgacgctttcacgtcgcggccaggacggggtgctcactttcaatggcactcagggagagaccgtggcactgcaggtggcaggccaagcaaccgcacccgctggcaacagtgtgcgctaccgcatctacaaaccgagtgatcgaaggtccggatacttcttcggctcgatcacgccacttaccggcggttcgttgaacatgtcgctgccagagactggcacgtactgggtatgggccgaccctgacaatggcgcaaccgccagcgcacaggtcacggtctcctcgggtaccactagcggcctgtcccccagcggcggatcagtgcctgttgaaaccatccttcctggccagacggcctacttcagattcgatgccgttgctggccaacatcttggcttcggcctgagcgatctcgttgtaagcagtgggacgcacgttcggatctacgcctacgcacccaatggcagcagcatccaggatgactcgtactgctatgttgccgatggagggtgcgacatcgacatctacaacccgaccgcgggtacttacagtgtcatgatcgttccggagcacggcgaccaagcaatgcagttcaatgcaacgctttcgtccagcaggggtatttcactggaacgcgatgttcctgcggtactcgatctgacgcgccgcggtcaggatgggctgatcacgttcagcggcacgcagggggaaagcctggccttccaggtggctgggcagacaacggtgcccggagatcgtcaggtgatctatcgggtctacaagccgagcgatcggcggagcggctactacatccattcggtcagtccgcagaccggcggttcgatcaacatggtactgccggagacgggtacgtattggatatgggctgatccagtcaagggggcaacatcccgttcgcacgtgacactttccaccggaacggccagtggtatggagcgcgatggagcagtggctcagttcatttcggctcatcccggacagtcagcccatttccgcttcaatgtggcagctggtcagcacctgggcttcgggatcagcgacttagcggtcagtagcaacaaccatgtgcgcatctacgcatacgcccccaatggcgacagcgtgggcgatgtctcttactgctacgtagctgatggcggctgcgacattgatatctacaaccctacctccggaacatatagcgtcatcgtctcggcgacggagccaggacagaccatgcagttcaaggcagggttgagcagcagcatcagccctgcactcgctcgggatgtttcactgaatctgcaattggatcgtcgtggcaaggatgcagtaatgaccttcaccgggactgcaggggagtcggtagccctgcttgttgccgggcaatccaccacgccatcggcgaagacggttcgatatcggatatacaagcccagtgatcggcgtcgcacctacgaggtcggcgtcatcacgccgacatcgggagggtcgatcaatctggttctgccagagtctggaacgtactgggtctgggcagatccagacaacggtgccactaccaatgggcaggttaccttgtccaccggcggattgaacccgctggttgtggatggcccggatacccagtttgcctctagccaacagggtcagtcggcgcatttccgattccaggcaacggcgggggggaacctcgggttcgccatcagtggcctgaccctcagcgaagggaatcacgtccgtgtgtacgcgtactctcccagtggcgccagcattgctgacacgtcgtactgctatgtcagcgacgggggctgcgatatcgatttctacaacaccgtggccggggactacagcatcctggtccaggcagtggcgccaggacagacgatgcagttcagtgcaacgttgtcgtccaacattgggatcgccctgcaacgcggggttggtgctcctctcgcgttgtcgcgtcgcggtcaggatggcctgctgacctttgcgggtgcgcagggcgaaaaggtcacgctgcaggtggcagggcaggccacgcagcccaccggaggtcgcgtcgtctatcagattttcaagcccagtgatcggcgccgcggatatgcgataggaacgaccgggccgacgaccgcctcaagcctgaaccttacgttgccggagacgggaacgtactggatcctggcggatccggatctcggaaggtccgccaacgcgaccgtttccgtctcgaactcgccctga

SEQ ID NO: 501661 - DNA, 4968 bp, Stenotrophomonas maltophilia
atgcctgccgagctgtggaacgagcgcagcaaccgtacgctcgctctcggtgatgaaaccagcatcgcgcgccgcgggcacgccgcactgctgctaagtgatggtcgggtgcgccttgctgggggcgttgatcgacgtggcactcagcagaatgctgaactgatctacagccagcaggatgggcgattctccaacgcgcttgcacatcaggatcgtcagcaggcggggctggggggatcgattcccgcccaaggcagcagggacgtattgccctcacagcgtttgtcagtgcgcttcacccagcccatcaacatggccgacttttccgcgacgtcggtcactctgattggtcctggcggatctacccccatcgaggtgatgccggtcgaaggcggccggctcctgtttgtgtcaccgaagcggtcgctgttccctgcttcacactacaccttgatgatcgatggtgtgcgtaccacggagggcaaggcgcagccgttggtggcgctcgattttggaaccgctgccctcgatgcctcaggaggtacggttgatcagggcggtaccgatgtggagccagcaggtgagcgggtcactactggtcaggcggggaaccaagccaactgcgagcaggcgaccaacggctaccaaccttgccgcgcgcgtggcgtggtcgagagcggtgtctggtatccggggcgcgacaacaccgataaccgctggcggatctatggcggggacaagcgtgtcgagcctgccgcgtactcagccgcgatggcagcacgctacaaggtgactgccctgcgcggccgggtagttcgagtggaccagatgccggttgcaaacgtggaagtcagcgttggtcgtatctcgacccgaaccaatgctgacggctggttcgcgttgtttgacttgcccacgggccatcaggaattgtacgtcgacggaagcacagccgatgtcggcgatgatcagtatggacagttcgtagttggtgtagaggtcaaggctgggcagctgaacgagctgccgtacctgatgcatctgcccaagatcagtgcacgcgacaaggtgcgaattgcctcgccgctgaggcaagacctgattgtcagccatccagacatccctgggctggagttgcacatccccaaaggcacggtcatccatgatcgcaaggggcgactggtcaacgaaatcgccatcgttccgacgccggtcaacagggcgccgttcccggtgatggaaaaccaccctatggcgttcacggtggagcctggcgccgcccaggtgcgaggcctggatcccaatgtccgcaatggtatccgcgtctactacccaaactacgacagctacaagaagggcactgaagccgacttctggatctacgatccgacggatggctggcgggtgtatgggcgcggcacggtatccaatgatgggcgccactttgtgcccgaacagggcgtggctctgcacgagacgatggggggaatgtacagcgtcccgggtggcaatggagccagtgagcttgggttggcccctgacaactccggtcaatgtgggtgtagcggtgacgcggccgtggctggcgatcccattgatctgaagaccggtgagttcacacacgcggaaaccgatgtagccatcgatgatgtggtgcccatcacggtggggcgcaattaccggccgaacgacctcaagcgcggtgtgttcggcatcggcatgtcgtggaactggggctacaccctcaatcgtcccaataccgccaattacgacgtgctggagttggtgcagcccaatggctcggcagttcggttcgatagaatctccggcactggcaatcagggggagtggcgccaagccggctccaatacacgcttcgccggcgcactgataaagacggtttatgattcggacccaacccagccttggggacgcgcgttcctgcttacgcttcgtgatggctcacgcatgcagttctcaagctggaacgacatccgcgtgcgctggattgaggaccgtcacggtaatcggacgtcccttctctacaacgcaggcctggtgtcggaaatcacctcgcccagcgggcgttccgtcaccattgcctacgacggcagcaatcgcatcaaatcgctgcgggaccacaccggtagggaatggtcttatacctacgacagcaatgggctgctctcaagggcaacctatccagatgctacctcccgtcaatacaccttccagacccgcttacagaacgggagtgtcgtacagcaccgaattgaatcgatcaccaaccagcgtgggcatcgcctgctactgaatcagttcgaggtggtcaacggtgtttcgactggccgggtgatcaagcagatccaggccgatggcggcgagatcaacgtgaactacgctcatgtcgacaatggtgtgaccggcaccctggttaccgaggttgacggcagcaagcgcaggatcgtattcgcccaggggacgccgtacccggcatcggaaacgcttgcctatgggaccgccgatgcgcagaccttcacctacgagcgcaacagcaatggccagttgattcgtagcacagatccgttggggcggaagacggagtacacctacaacaacgatggccaaaccacgcagatcaccgcgctggccggcaccagtaaggcgcgcacggtcagcatggcgtacaacgctgatggtgatttgacgaccatcactgatccattgaaccgcgtgactaagctgggctaccacaaccgttgcctcagttcggtaaccgatccgctcaaccgtactgcgacttatcgctgcaacgcagcaggccagatggtaagcgcgaccgatccgctgcaaaggaccctgcagctccattacgaggggtacgatcttgtcggcgtcaccgatcctctaggccggcgtaccagctatcgttttgattctctggggcgtttgatcgcgaccgaagacccactgggtaatgtcgtgcgccgcgagtacgacatcatggggcgtgtcaggaagctgctggatgcgcacggagcaggggttgagtacggctacgacgccaacgggaacgttgatgccgtgctgctgcccaacggcaacgggatcacctacacctatgacagtcgcgatcgtccgctgacgcgaaccgatgcctcaggcaaggtggagcagtggacctacgacctgtccgatcgtgtcaccagctacaccgatcgcatgcagcgcagcgtcaccaacacgtatgacgtgctgggacgaccgaagacaaccaccttccctgacggatccacagctacttattcctacgatgccggcaatcgaatccgcacgctcaccgataccggtgcggttggtgcgctgagctgggactacgatgaatctgacgcgctgatcgccgagtccagccctcaggggacagtgggatatgcccatgacctcgtaggccgacgcacagaaatgcgcgcggcggcacaggccaaagtcacctacacctatgacgcagctgaccgtcttcgtcagcttgatcagggcgtggaatcggtccagtttacctacgacggcgctgaccgtctgagcaatctgaccctgcccaacggcatcgaagtagcccagagctatgacgccggcaaccagctcacaggcctggcgtggcagaagcctggtcaacaggcgatcggcaccttgggcttcggatatgacagcaacggccagatcatcaaccagagcggcagctttgcaagtcagaccctgcctgccgcgactacaggcgcgagcagcttcgatgatgcgaaccgccagctgacgcacaatggccgcacgctgagctacgacgacaacggcaatctcacaagcgatggcgtccgcagctacgtgtggaacgtgcgcaaccagctggtggagatacgggaaggggccagcattctggccacattcggctatgacccgctgggcagacgtgtcgttcgtaccgaagcgggtatcaccacccagtacctgtatgacggccagaatgccgtgcaggagacagtcggaagcaccgtcaacccgatactgactggcctcggcgttgatcagcgcttcgcccgcaatgacgcgggcgggagggcctactatctgaccgaccacctgggcagtacgcggggcctgaccaatggggccggcgagctgctgcaacgctacgactacacgccctatgggcagttgcaggcttctgcagggaactccaccaacccctaccgctacacagggcgggagcaggacgaaagcgggctctactactatcgcgcgcgctactacagcccggacatgggccggttcatcagcgaagattcctatggcttcgcgtcaggcgatgtgaacttctacgcctacgctctgggtaacccgatcagttacagcgatccttcggggcatatcgcttggtttgtcgtgctgccgctgatatgggctgggatagaaattgccctatcgatctatgatgcggttgagacaggaaagacacttctagatccttgtgaaaccacagaaacaaaagtaatttcagctatatcatttggtatcggacttgcggcgccaggtggtggctatggaactgcagcaaaaggcgtagtcaaaaggcttgggcccaagggggttgtgcgcggacatcacaacgcaaacgtgatggtaagaggagcggacgggcaaataatcagccatgaaagactggtaagcggcaacatgacgcccgcggagaaggcgctaggcttcccccgcaatacgctggcatcacatactgaagctcgcgctgtaactcatacgccgctcagaagaggcgacacaatgaccatcactggtgagcggcccccttgcccttcttgcaaggggtacatgaatcgcgctgctcaagagacgggtgccacggtaagataccagtggcgggagggtggccaaactaggcgctggacgactggcggacaataa

SEQ ID NO: 501662 - DNA, 399 bp, Stenotrophomonas maltophilia
atgtatgagttcactgcagaagtggtttccgtagaggaagatgactactgcatcgtggtcggattggcagatagcccaaccgatccgtcccgctacgtcataattcagaatgctaagaagtatgacgatcaagataagaagttaggcatggatcatgcccatcttgaggttggcggcggtctggagccatgctatggcgggttggaggaagtgtccctgctgggtactaagctccagctgctgctctccgaagtggcgcagaggaagcttggtatcaaaggtgggatagcggtgacgctgaaaacgttggataagcctggttcgctggagatggcgttaggtcagatctgcgcttcagagaagattccgttcgcgctgagttcagctgggaagatttga

SEQ ID NO: 501663 - DNA, 345 bp, Stenotrophomonas maltophilia
ttgctgaacagcaaggcgagtctcagcatggataggttcaatgcatatgacgcattgtcagaaatcgctcctgcggagttgacccaggtagctagtcagttgaatcaaaccgggttcgtaagcgacgaagacgggctctgtttaggctcagtgcttatcgagcactggtccaatagatgctctgacctgataagaggatatggatatggaggaggggagctggcggtacgtggagccttcttcagcgaggtgggagcgatctacatcctctacgatcagaagcgccattccggcgaggatgccgcagatgagctccgccgcgtggccaagttgcaggtcacatga

SEQ ID NO: 501664 - DNA, 282 bp, Stenotrophomonas maltophilia
atggctgtctatgtagtcacttggaacctgaaccgggaagcgaattacgatgcaaagcggacagcgttcctgaatcacctgaatcgacacgagaacgtcgctgatccagcgctcgaaaccgtgcgctggatctcaacgggcctatcagcagacgcactgtcggctgaccttaggcagtgtcttgatggaaacgaccgtatctttgtcagccatgtctatacgggaggccaccaaggctacctatccaaggcgacctgggcttggatcaatcaacggctgtaa

SEQ ID NO: 501665 - DNA, 246 bp, Stenotrophomonas maltophilia
atgaccttgtggttcctgacctgcaacatagcgcgggaatggcggctgatgatggctgaggcaaatccccgggccgcagctacacggaatgcttcgaccgcggcgaaatctagcgtcatctacctagccgaagcgctcagaatacgccgagaacgatcgttcggcgtgcgtgaccccggccccggcgccgagacctccaatgtggtctacatgagtcgtgggccgaaactgcgtcagcgcgtgtaa

SEQ ID NO: 501666 - DNA, 819 bp, Stenotrophomonas maltophilia
atgtttgaagatgcaattaggggcattagggaatacatttccgataggtttatgagtccgcttggcgcttcgatcacggcatcgtggtgtgcatggaactacaagttcctgctggtgatcctctctggcgatgcggccatcagaaagatccacctaataaagctgatctatcaagacgagttctatgcgtgggggcatctgctggtagggccagtggcgactactctgatctatgtttttctgtacccctatccatcgaactgggtgtatagctactccttgcgacgacgaatggaagcattgactttgaaacgaacggtagaaaatcagaccgttctcacccaagaggaatcacaggcgctacgcaaaaaattcacggacattgagctgcaaaacactgctgagacactaagactgagcaacacaattgacagtcttcgagagcaactccgactgtcgatagaagagaagaacgcaattacggaagagctgaactctgcgcgctcgcagttgccagtcgaatcttcacagaccgacgcccccaccgagatggaccagtccaaagccaggtacccaggagggctgtccaagatccaatgggagcttattgacagcgtaggccgatatgatggcgccatgcctcttggagcgctgtccagcaagctaaatatcggcaatcaggctgcctggtacacggcgaaacagctgtcctccttagggtttgttgatgctcgcaccagccatgatcaaccaggccgcgagatcaggcacgttagcctcacctcagacggattgaagctctttatgagctccctctaa

SEQ ID NO: 501667 - DNA, 1401 bp, Stenotrophomonas maltophilia
atggaagatggaggcagtaataaaatctggcagaagggtgattcctgcggcgctaccgactcggagagatatctgtccgtactcgctcgccgcgcatttctcaacttctggagttactcaaatccttacaccaatgaaagtggcggaagagagctttgcgactttctggttgtatttggaaatagtgttgttattttttctgacaaaaattgcaagttcccaagtggcgggatggaagtcgcgtggccacgctggtatcgaagcgcagtagagaaatcggtaaatcaactaaggggtgccgcttcatttattgataggtttccagacagaatttatcttgatgcggaatgcaaacagccgctgccgatcccaattccgccaatggaagtgcgcaaggtccacttagtggctgttactcgaggctcggcagatgcatgcaagaagtactttggtcatggtagctcaagcagtcttgtcatcaataccgcaattgaggggcgggagcatgaaaagaatccattcatggttggatggcccttaaaagggaggaggtttgttcatgtcctggatgagcttacacttgatgtcgtactcaatgagcttgatagtgctaccgacttcattgaatatctcgaaaaaaaggaggcgtatttgtccagcgaggggtttagtttcttctttaccggggaggaagaccttcttgcggattatatgttgaacccaatgccaaatctcatgggattttcatttgcgccactccctgagggcggctcatttgaaaggcgcggcttggtggtggggcaagaggggcgctggatccagctttgcgcgtcaaatgaatacaagatacataagaagagtttagagattagctacgagtgggataagcttatagagcatcaaacgacgcatatctcacggaacacagcgggcgttgttgcgaagtggggctcggtgaccgacatcgccgcgcatgaggcggtattgcgagcaatggctgaagagtctcgcctttctagaaaggagctcgccaaggcgcatcagtcaattctaatgcgaaaatttgatggggatagattgtctgcgatagtgtcacttccccatcggccagatcgagcttacgtgcttatggtcctgaagcggccagatgacatggattacgatctatatcgggagtttcgcagaaactcacttgttggactctgcagggcaagtcgccttaggctatccggaatcaaagaaattgtcggaatcgcatcggagcagtcagattcctcaggggtcacgcaggactttattctcatgaaatttagggatgagcttgacagtgacgggaaggtgagggagatctcggacctcagggcggcgggaatttggaaggacgagtgggtatgcgcatag

SEQ ID NO: 501668 - DNA, 174 bp, Stenotrophomonas maltophilia
ttggtgctaccggagatcgacatggcacagaacaatcagaaccagcagaaccagcagaaccagcagaaccaggatcagcgcaatgagcgcaatgaggagaatcagcaggaacagcgcaacgagcgcaatgagcagaaccagcaggaacagcgcaacgagcgcaatcagcgctga

SEQ ID NO: 501669 - DNA, 1974 bp, Stenotrophomonas maltophilia
atgaacttctcgattgatagcctcttcaagcaccgaaaggtgctttttttgtcttcgcaccaccgaaatgcgggccttgcctacgtagtgtctgcgcctgacgctgggacagacgactatcggtcctcgctctggtttaccccctctgccggttcagtcgccccggtgttgctggcgtcccaggggggtgtcagctccccgcagctaagccccgacggtcaatcaatcgccttcctatccagccgcggctcggccggtcgcccagaaccccatttgattcgcaccactggcggggaggctcaagcgctggcgggtgtgtccgagttgaatgtatccagtctcctgcaatggcaccccgacggccgtcgcctccttgccttggtctcccttccccatgccgaggaccccgacgatgatgccgcgcatgctcagcgcccactggtaatcaaccacttgccctacaagctggatggaacggggtatacagtcggcacccgaacccatttgttctccttggacgcacaaggctgcacgaggccgcttcccctgaccgcaggagattacgacgtgcggtcgggagcttggtcgccagacggacgaacgttggcctatgcacgaacatcttctggttgccttcgtcatcgcgtgaacctgtggctggttgggccagaatcgaaccatgggcagatcaccgcggactttgcgactgtggccagcgtgtgctggtcaccggatgggtcgcgccttgcatttgccggcaacaagcgggaaggcgactcagcgacgtttctctacatctggtcccacgaggaaggcgtggttggccccgtcctgcccttcactttggaaggcatgcagattgcgtgggcccccgatggccgatcaattgccaccgtgatcacgcatcgaggctgctttgaagtggccgttgtcgctctcgaatccggagaacactatttgcttccggcacatcaggaccaggtttcaacgatgcatccatgcggtgaatcgttggtgctcggtgcatctagctacacacagctggacgaactctacctctcagcgtgggcaccggaagcagaacgtcgccgcctgacttcgctcaatacagagttaagcgcgaccctgccggtgtcctgcaccctgcgctccttcgaggtgccgagtgggaacgggtcggcggagtccgtggacgcttggattctacagcctacaaagcagcagaagggcccgttacccctcttggtagatttccatggcggcccccacagcgttgcacttatggacttcgctgcgcacgtctacgtttatcaggcagtggcggaaggctggaccgtggtggcgcccaatccggtcggttcaaacggatacggcaaggacttcgagaagcgtctgatcggtcggtggggcgaactggacctccctcaagtcgaatccatcgttgagcagctgcgcctggaggggatcgctggcgaaacggtggcctgtgcagggaaatcctacgggggttttctcagcgcttgggcaatatgccacagcgacaccttctcggcggccgtggtcagcgcgcccgtggccaacatgcagtcacatgccggcacctcagattcgggctactacgtcaccccgtatgcgatggatggccaaccggacgcgtgccctgaccgctaccgcagactttctcctctgtcccatgtgtcgtccgccagaggaccagtactgttgctcaacggagcggaagatcagcgttgccctacgggacagtgtgaagagctcatggctggcctggcatgtagatcgaggcaaccggtgcagatggtcgtatacccgggaggcacccattcgttggcagccacaggccgacccagccatcgtcgcgactaccaccagcgcatcgtccgattcctaaaccgcgctcgaaaagcagaacaagaacaggggaaggaagtggcccaggagacaacgttgacgtag

SEQ ID NO: 501670 - DNA, 732 bp, Stenotrophomonas maltophilia
atggacatgcaggcagggggcggattcgatccgccggcaaagaccgattcgcaggaactgacgttccactggctctatcagcgggtgcaaaggctggttgagcacagcatctacccgaaggcgggcagggtggagacgtgggcgttccgcatcggcatgggcgcggcgatcatcggcattctcattggtcagcttccggatcgatggctgcctgttggcgcggtgctccaagtggtaattgcctgcctggcaatcgaaatcggaggtttcattgtcgggggcactctggctgcccgcagaggcattcgccagttcagccagccgcgactctcgcacgcacgggagatggatgaagacttcgctcactggcatggggtggtgaccgagcttcgcggatttccgcgcgtccagcgcgagcggcgactcaaatttgtcagctccttgcgcacaaacatgattgagcgcatgggcatgatgtatgggggcctgcagcggcttgggccatttccgctgctgattgccctctacctgcagttccgcggatggaaatggggcgactgggcgggcgcttttgatgttggattgctgggcgcactactgatcttcgccatggtgctgctgtacgtgctgggctggatgctgatcggcttgcgtacccggctggatacctacgtcgccctgcttgaagggtccatccacgaacccgagcccgcgcagccaacgccgttgtag

SEQ ID NO: 501671 - DNA, 768 bp, Stenotrophomonas maltophilia
atgaaggccacagccgccccggttgcgcccgtcccaccacgcgtcggttgtgcgggatggtcgctgccgcgggcggatcaggaagcgttcggcgcgggcgacagcctgctgcagcgctatgccacacgcctgtcgatggtggagatcaactcgtccttctatcgaccgcaccagcccaggacttacgcgcgatgggccgcgagcgttccggagggcttccggttcgcggtgaaactcccgcgcgagatcagccatgagcgtcggctgcgcgatgcaatgcaaccgctcgaacagttcctcgaaggcgtgctggcgctgggcggaaagctcggtccgttgctgctgcagttgccgcccagcctggtgtacgacacgatcacgaccgaaaccttcctgcggggcctgcgcgcacgcacgcgagccgacctggcgtgcgagccgcgcaacccgagttggttcacgccggaggtcgatgcgctgttgagcgcgcatggcgttgcacgggtcgccgcggatccggcacgtgtgccggcggcagcgatccccggcggtgaccgcacgtggagctactggcgctggcacggccaaccgcagatctatcgcagtgcgtacagtgaacaggccctggccgggctcgcggaacggctgcggcgcgaatccgacgcgcaacgacccgcctggttcgtactggacaataccgcactgggccatgccacccgcaacgccctgcgcctgcaggcgctgctgtcggagaacgcacatgcctga

SEQ ID NO: 501672 - DNA, 195 bp, Stenotrophomonas maltophilia
atgcatttgctcacattgccgcaagcgttctcgaactgccccgagcgtcggcaaacaagcaaattcgcctacagcaatctcatgaagaccattattccgtcagtaaatctttccaccaccagaaagggctgcggccggggcacgaccggccattttagcagcagcgcaaatgttacctattacttaattttctga

SEQ ID NO: 501673 - DNA, 393 bp, Stenotrophomonas maltophilia
atgaccatcgtcctgcagatcgaaggcagcgccatcaatgacatcgccaccctgtacgcggagatcaaccgcgtgttcatggctggcgaggcgtggcagctcgggccgagcctggacgcgctggacgacctgctgcatggcagttatggcgcgttggccgggcaggcgcaggccacgctgatctggcgcgatatcgcccacagccgcgcggccctgggcatggacaccacccgccaatggctgcaggcaaagctggacacaccgggcagtttcaatacgcaggccattgcccgccagctgcaggccctgcaacagggcgagggaccgacctacttcgaaatcgtcatgcagatctttggcagccatcggcagatcaccctggtcccggcctga

SEQ ID NO: 501674 - DNA, 1857 bp, Stenotrophomonas maltophilia
atgcaggacaccgcactcaccgcccccaacgccgagatccgtcgtgccggggtcgatctcaatggactgatgacggtgctgggcaagcacctgtattccaccccggtggtggcgctgcgtgagctggtgcagaacgcgcatgactcgatcatccgccgccgcatcgagcagcccggggttgacgtgccttcgcgcatttcggtgcaggttgatgccggtgccggcgtgctgcgcatcaccgataccggtgccggcctgacccgccaggagatccacgattacctggccaccgtcggcgtcggctatacccgtggcctgcgccagggcggcgaggacgatgagggcctgatcggcatgttcggcctcggcttcctgtcggccttcgtgctggcgcgccgggtcagcgtgcgcaccacctcgtaccagaccccggacctgggccatctgtacgtatccagcaacgccgagcagtacaccgtcagcgaagtgccggcacgtgcggtcggcaccgaggtggagctggagctgcatcctgatttcctgccgctggccaacgaggcgcgcctgcacgaggtgctgggccgctactgcgcgctgctgtccgagccgatcttcattggtgctgcgaccgaggcgatcaatcccgagccgccaccgtggcgcggccagggggatgtcgccgtgcatccggtgcaggcccgccgccaggcgctgcagttcgcggcgcggttcgagcatgatttcgagccgatcgtcaccgtgccgttgcgtgccgatggcaacagcgatgccaccggcctgttgtgggtccaggacggcgccacctatggcaccagcgacaaccgcaacctgtcggtgttcgtgcgcggcatgctgctggatgacgacgcgcgcgacctgctgccgccgtgggccggtttcatcggcggggtgatcgaatcctcgcggttgacgcccaccgccagccgcgaagacctgcagcgcgatgaccagtaccgcgcggtgcagcatgcactgctggaggcgctgatcgacggcctggccgacgttgcgaagcagcaaccggaagcctggcggcgcgtgctgacccgccacaacgaggccctgctgggtgcgtcgctgtgcgatgagcgcctgttcgacctgttgctggagcacgtgcgcgtgccgacttcgcagggcgacctgccggccagtgcgctgccggcgcgcggtgccgtgcatgtcatcctcgacaacggcggtggctttgaagagatgctgttccgcgcgatgggcgtaccggtcgcgcatggccatcgctatgcggtggtgccgttcctgcggcgctgggcccaggccaagggcctgcgcctggtcgagctgggtactgaacagggcaaccgcgcactgttccgcagtgatgacagcctcgacgaggcgcagctggcatggctgcgcgaacaactgggcgacggcgagcagctgctgcccgcgcgtttcagcccggaggcgctgccggtggtggtggtgcccgaccgcgaggccgagctgaagcagcggctggaagacgacgagaacgacaagcgcgtctcgatggccgcgctgcgcctggcgcgccagttcaccgcgcgcatcgaatcgcgcgcaccgtcgcggctgtatctcaatctcgacaacccggcggtgcaggcactgctgcgcgcccagcgcgagggccacccacaggccgaggctgcggcgcgcctgctgcgctcgctgaaaatcatcgtcgccgcgcagggccgcccgctggcacgcacgaacgctacgcccggcccggatctcaacggcgccttcaccgacatcgccggcgccctgcagcagatgctgcgctga

SEQ ID NO: 501675 - DNA, 5382 bp, Stenotrophomonas maltophilia
atgcgcaattggccgttgcggggggggttggggacggtattggtgggtatggtctggtcggctgtcgcaagcagcccgttgaccccgcataccgaatacaacaagcggatccggacaggtgagatgctctcgccgctgacatcggaactgttcggcgagaagatcaatccaagctctggcgcgaccgagttcgtggttaccgacgttgaactccctggcaactctgccttgccggtgcggctgcagcgccgcttgtcgataggctcattcaaggaccgccagccactgggcggattcggtagctgggacatcgatgtccccttcatcgatgggacgttcgaagccacaagcaaatggaacatcgggggcaacggggcgacgcaacgctgtggtcagcccttctacccgaaggttccgaccatcgcgaatctgtacgaagtttggaccggcaacaaggcacacatccccggtggctccgaccaggagctcctctacatcggcgcagccggcacggtcaatccgcggccgaccgatggcgccatctacaactggggaacgcggggtaatctccgtttctcctgcctgccagccaccgccaacggctatccaggcgagggatttcttggggtggatggcgagggcaaccggtacttcttcgacgtgggaatcgagcgttgggtcgggccaatggacttcggtggctcgagcttcggaatggtgcgggtgttgctgatggcaagccgggtcgaagaccgccacggcaactgggtcgcgtacgactatgccggagacaagctggtcgggatccgaagcaacgatgggcgtgccatcgacatcgcctacgctggtgacgaaatcaccagtgcgaccgccaatggccgcacctggcgctatgagtacaacgcgcgagccggggcgctgggattcgcgcgctggccaagtctgcgcgcggtggtccagccggacggttcgcgttacacctatgagtacagcgcacctgacgagtttggcggactgaaccccgagtatggatcctgggatggaaacccgacgcgttgcaccaaaccatcgttcattccttcgacgtttacgttggtcgcgacccatccagcgggcgcgcgcggcgagttcgagtttgagtacgttcggcgcatccgcacgggtatcggtgcaaacgcctgcgcaaaactgggtacccgttactaccagcgcgcctcggcttcgttcgacctctatgcaatcaagcggaagcttttgtcagggccggggttgagcgcccaggcctggtcatttgaaggcggcggttacgactcgcgtgccgatgctgcggtttccaccgtcgttgaacccgatggcacccgccgccatcgcgtgttcggaatcaagattgacgagaacgaaggtcagctgttggaagaggctgtccgtgcccctgacggaacgatcgtccaggtcgttagcaacagctacgttaccgaggcggatgcgcccacgatgccgttcgctgacagctatggtctgctgtctgcagcggatgacgcgttcgcggtcagggcgcgtcccttgaagcagtcggttctcagccaagatggcgtcagcttcgtcaacacgacagatcagttcgatgtgcatgtgcggccggtggtgcagaccgagagcaactcgttggggcgctcgcgtacgctgagaaccacctacttcgacgacaccggccgctggatactcggccaggtcgggcgcagtacacagaccgtcggtggcgtcgagatcgagaccgagcgcactgacttcgacgcgttggcgcgcccgcagcgtacctacgccttcggcatgctgcagcaggcgctgggttaccacgcggatggcacgcttgcctccgtgaccgacggcaatggcaatgccattgcactgggcagctggaagcgtggtctgccgcagagtgttgcgtacccggacggcagcagtgcctcgctgcaggtcgacgacaatggttgggtgcgcacggcggtggagcccaatggtgccagccggagtttcgattacgacggcatgggccggattgtgctggcaacccaggccgccaatgacagcgtggcctggaatcctgcaacgacgcggttcttccaggtggcgggcgcggaggtcgggctggaagcagggcattggaaacgcgagtccagcaccggcaacgcgcgcgcggtgacgtactacgacgggttgtggcgcccagtactggaagagtcgttcgacgctgcggaccgtgacggtacattgcgccagacggtgacccgttatgacagcaatggtcgcccggttttcacctcctatccgacgcgcacggcgtccgacttccgctcggcgctgcccggtacctataccggctatgacgcgctcgggcgccccaatcgcagcgagcaggacagcgaactgggccggcttgtcacgaccaccgagcagcttggcggaggcagcgtaaaggtgaccaatccacgcggcattgccaccaccaccgactacctgatgtacggcaagcccagccaggacacgcccatccggattctccacgctgagggagtggtgacggagattcagcgcgacacgctgggcaagccgctgtcgatcctgcgacgcaacggcgatggcagcatcagtgtgcggcggcagtacgtctatgacggcgcccagcgactgtgcaagagcatggagcccgaaacgggtgcgaccggcatgggctatgacgctgcaggcaatctgctctggtctgcctcgggcctgacgttgctgggccctcaatgcgacagcgaggctgcctatgcgtcgccttcacgggctgaccgcacctacgacagcatgaatcgtttgctgacgctgcgcttctcggatggccagggtgatcaggactggaactactggcctggcgggaaagtgaagcgtgtgcagacccgcaacaacggcgccgtcaccaccaacgactacacctacaacctacgcgggctgcctacgtccgagagcgtggcctacgacggcggcgagccctgggcactgggctatggctacgatgcgaacggcgccttggcaacccatgtgcagccgtccggcctgacgatcgactacggcccgaatgcgctggggcagccgacgcgcgccggaaccttcgccaccaacgtgcgctattacgcgaacggcggcatgagcggcttcacctatggtaacggcgtcgtgcatcagatgacgcagaacgcgcgcggccttcccgatcgcagcaccgacagtggtgccggtggcaaggtcatcgatgatggctacgattacgatgccaatggcaatgtggcggccatcagtgacggcctgccggcagcccctggaaaccgcgacatgcgttatgacggtctggatcgtctgaccgcggtgacggcagccagcttcggaaacgcaagctatgcgtacaacgttctggacaacatcgtggccgccaacgtcggcgcgcggcggcagtcctttgaatacgacttcaacaatcggttgacgaacgtgcgggatgtcgacagtggtgcgaccgtgaccgggctggggtatgacgcgcagggcaatctgaagatccgcaacggcgtggcgttccggttcgactatggcaatcgcctgcgcgaggtcgatggcaaggaggcttatcagtacgatgcacatggccgtcgtaccttggccagcgcaaccaatggcaacattcgctccctgtatgggcaggatggcgtgctgcgctatcagcacgaccagcgccaggcgaagggctttgactatatccagctcaacggcagcctcgttgccaagcgtgctgtggatatcgcgcctgcagcattggtcgtaacggttccgggttacagcgcggacggcgcgtttgcggtgcagtgggcagccgttgccggtgcgcagcgttacgaggtgcaggagtcgaatggcggagactggcaggctgtctatcaagggcccgcgctgaacgtttcgctggccgggcgaagctccggcgtctatcgatatcgtggccgtgcctgcaatggcactgtctgcggcgattggggtgtggaagcctccatccaggtggagcttgcgcccacagctgcacccgtgattacggcaccaccgaatggcaccaacgggacgtattcgctgagctggtcagtggtgccgggggcttcccgctacgtgcttgaagaagctgtaggcgccgcctggagtgtggtgtccgatggccccagccgctcttatcaggtggccggcaagcctgctggaacctatcgctatagggtaaacggatgcaatccgcagggctgcggtgcctattcggtcgaagtggcgattaccgcgctgtatgccccatccgtgccgacagtgtccgtgcccgccgcgagctacaacggcagctacacgctctctctttcgagtgtggctcaagccagtagctaccgcattgaagagcagctcaacggtggcacgtggacagagatcaacaggatcagcggcactcagctggccatcagcggacgaagcgctggtagtcatgcctatcgtgcgttcgcatgtaatgacgccgggtgcagtgcggccagttcaactgcgaacatcgtcgtgacgctgccccctgtccaggcaacggggatcaaccttggcggcacgagttacagttccaccgtgagcatgtggtggggtgcgattcccgcagcgacaagctatcagctgatggaacagttcaatggtggtggcttcggccttgctcaggaggatggcgctacctcggtggcgcgtggcggccgttggcctggtcagtgggattatcaggtgcgtggttgcaatgttgctggatgcggcccatggtcggcggtagcgggtgtgcgcgtgattggtcctccggccgctcccgagatccgggtgcctggaacagcgggcatgggagtgggttactccgtcgcgttgctggaagtggcagaggcgtctcgttacgagatcgacgagagcaccgacaatgccaactggagcaccatcgcgggtgaacgcagcgtcaccctgagcaaaggcggtggtgggacgttcttctaccgtggtcgtgcctgcaatcctgccgggtgcgggccgagttccgtgtcgggtcagatcgtcatctccagtgcgcctccggttccgaccggcgtgaggattgtcaagaatcaacctcagctgtgctccatcgtctggaatatttccactggtgcaacctactaccaggtgcgttcgtcccgcggtggtgcgacctatacgaccacgggggcaggctacgagctggacactcgatgcgatgcagcctacgtcgttcgtgcctgtaatgcgcaggcgtgctcggcctggtcgaactga

SEQ ID NO: 501676 - DNA, 969 bp, Stenotrophomonas maltophilia
atgagtcacgccagacccagggaagacaccctgctgtttgaacgcgccagcgcctgggtggcgcggctggaggcgccggactgcacgccgggcgagcgagagaggttcgaggactggctggccgaggacccggcccatgtcagcgcctggatccaggccgagaccctgttccagcggggcgaagaactggccgccgacccgtggctgcgcaccgccgcggcacgtgcggcacggccggcgcagcgtcgctggctgccggccttggccgccgccgcgggcgtctgcctggccatcgggatcggctggatggtcgccgtagacggcaaccccacgccgctgcgctatgccaacgattcccaccagccccggcagcagacgctggccgatggcagcgtggccacgctggatgcgggcaccacgctgcacgcccgattcggttggcgccatcgcaacctggtgctggaacgtggccgcctgcagctgcaggtcgcaccgtcgagcaaggcgctgcagctgcgcgccggcgacagcaccatccgcgacatcggcaccaccttccaggtggagcgcctgaacgacggcctggtcgaagtcgcactgctggaaggtgcggtggaagtcagcaatgggggggcccggcacaccctggcacccggccagcagctgcaggtgctgccctcgggccgcttccagcccggcccggcgctgtcatccaacgccgctgccgaaggctggctgcagggacagctggtgttcgatgccacgcccctgtcgatcgtggtcgagcgcatgaaccgctacggccgcacgccgctggtgatcgccgatcctgagatcgccagcctggccgtgagcggtaccttccgcgccggcgatgcgcaggaactgctgtcggcactgcaactgggctggtcggtggctggccagacccgaccggatggcgcgctggaactgcgccgcacgtactga

SEQ ID NO: 501677 - DNA, 585 bp, Stenotrophomonas maltophilia
atgcagaccgatccgctgttcctgcacatccgggtggtgatgggcatcatcctgggcctgtcgatcaccaccgtgctcaagggcctggcgcagatcatcgagcatccgcagcgccgcggctgctcggccctgcacctgggctgggtggcgtggacgctgatatcgctggtgaccttctggtggtgggagttccgcctcatcgaggtgcaccgctggacgtttgaaacctacctgttcgtgatcgtgtactgcgcgacctggttcctgctgtgcgcgctgctgtttcccgacgacctgcgtgaatacggcagctacgggaactatctcatgcagcgccggcgctggatcttcagcgtgatggctgcactgaccctgctcgacctggtcgataccgccatcaagggcagcagccgctggaagctgctgggggccgcgtacccgttgcatgccgtgttgatgctggcggtggcggtgctcggctggcgactgcgcagccaacgcacacagctgcgcctggtgctggcaacgctggcttaccagatcggctacttcgccgtggagtacttcaccgtcggcagtgactga

SEQ ID NO: 501678 - DNA, 642 bp, Stenotrophomonas maltophilia
atgcctgagcggctgccccgccatacgctggtctggctgtcagcgcacgccggctggcaggcggacatcgccgcgcatgagtcgcgcctggccgactggtttgcgcagggccgcccggccatcgtcgcgcggcgtaccgccgacgatgccgatccacgcctgcgtctcggcgtgccgctgccgcccgccgagggcaaactgcgcctggccctgcgcgtgccagcacgcgatgtgctgcgcaccacgccgccgccggcacttcagacggtgctgaaaggcgacattccacaggactggcggcggccccttgaagtgctgcagaacatcgctgaggcgcgcgtattcggtgccttcgcgtggcagcaccttactggcctgcgctatgtgcacgcgcgctcggacgtcgatctgctgtggccgatcgacaccaccgcgcaggccgatgccctggctgcacggctacaggcatgggaagccgaacacgaccggcgggtcgatggcgagctgtgcctgggccgcgacgccgccgtgaactggcgggagtacgccggacgcagccgcgaggtactggtcaagcgcctcgatggtgccgcactggaactccgcgatgcgttgttcgcctccgccggggtgagcgcatga

SEQ ID NO: 501679 - DNA, 735 bp, Stenotrophomonas maltophilia
atggctgagtcgctggctacgctgcaacggcgctgggccgatcatgtgcgcgacccagcaatggccgcacccgacggcgtcgaggcggccaggctggcggtttaccgccgcctgtgcatcgacagcctggacactctgctggccggcagcctgccgcgcctgcaacagcagttgggcacgccacgctggcgtgacacagtggagcactactacgcccgccacgcctgccagaccccgttgttcccacagatcgccggcgagttcgcggcctggctggcagtgcaggacacgctggcactcccggcctgggcagcggaactggcgcactacgagagcacgcagcagtcgctgcacattgaagcgcgtgacgccgggcggtcgctgcaccgcgttcccgggggcagcgatgtgctggcggtttcgccgctggtgcgggtgctgggctaccagtggccggtgcacgaggacgaggccctggagccggtgctgagcgcagctcccacgctgctggtgatccggcgccgcgccgatttcagcctgcaggtcgagcaaccgtcaccgctggcctacgcgctgctatcggtcttcggtgacgacggcgcgccggtggatgaggcactgctggtgctgtccgaaacacatggcatggcaacggacgcattgcgcgtggcctgcgtgcccgttctgggcgagctgtgcgcggcgggcgtgctggttgcattgcctgctttctga

SEQ ID NO: 501680 - DNA, 699 bp, Stenotrophomonas maltophilia
atgcccaattgcgctgttcttcaccaaagcaagcccaatcgccgagccttggagcccgctcaaggaaccaatacatttggcagatccctgataaggtcacacagctgtgcaaacgccttttggtccgtcttcccccacgtttctggtgagccgatgaataccactgcgcaaatttcgtgcctcatcctttgcgttctgcttggctcttccgtgtccgcgcggccgcttgcagagagactcgcggcggacattgagatggccgaacactctattcttgcctcgctggtggtgcacaaaagttccgagagcaagtcactgtgctctcagacgccatatgcttgtgtaggggcagacggtgctgagcttggtctcgccttgacagggggcagcaggagtgctgccgctcctcggcacttggttgagctgtcgcgatttcgtatggatggagcgctttccgaggactacaagtgctacctcgccgcgcgtggcaattcaacggttcaggccgcgtcgaagctggatgccaaaaagctggcagggcaatgcatgtccgaacttgctgctttcaaacgtcgggccggcgctgcaaagttcgacgtggcgcccgataatgtttgcagctcagtggcggacatccagcgatccctgcgtgaagctgttcgactagccaatgcaggcggtgaatgtgacggcttctga

SEQ ID NO: 501681 - DNA, 288 bp, Stenotrophomonas maltophilia
atgcgtgcgaatgacgcagaattgtcccttcgcgcgtttcgggcactcgaaaagacccgccctcacgatgcctatgtggcgtctgggttggtcgatgcacttatgagtatcgagcgctaccaggaggcccgcgaggtaatcctctccttccgtaaggtggccaaaagaggcgctcccttccacgatgcagtcttggaagaacacgaggacgcactgagtttgattgaagagcgaatgcgtgcggagcagccgtcgttgggtgacggccgaactgggagcggtgattga

SEQ ID NO: 501682 - DNA, 4548 bp, Stenotrophomonas maltophilia
atggcatttgcaatgcccttgcgcagccacaaggctgccgcgattctctccttctgcctagctttaggcggtgcatcgactgcaagtgcagccacctactacggccctccctacaaggtccagtcgttccgcgggggtggctcgtttgagagcgtcggtgctgcggtcaacttcctggttgggaagatccaagccccttgccaacaggaccccaagtgcaccaagccgcccgttgttaccgtgcgatacggcaacgatggctgggcggcgacgatctacgtcaacgggagtgcaagtgacaatgtttttgcttccgagatattgattggacagccccagaaaaatttcggagggtgtcagaaacgctgttcagccgggcttggctctgcaaccgatggaactggggctcgaggtgctgctgacagtgcttcaaaggccaatgcccgtgacccagggagcccgtttgagggcgatccgatcaatacgtctaccggcaacttttaccggcaggaaaccgacttcgaatctccatcaggcctgatgttccggcggttctacaacagttctccccgtgctccgggttcttccttggggcctcagtggcgccacctgtttgatcggcgacttgaggtgctagcttccaatactggagctgccggagaatacacgttcatccgtgctattcggccggatggcagttcagagcggttcactcgaacctcaagcggctggactgtcgacgccgatgtcgcagacgtgctcgtcgatcgagaggcgggcaccggctatgcattgcagttggcggcgaaccgccaaaccgaaatctacgatgcgacaggcttgctgaaggaagtctacgacgctgcaggcaggaagcttctgtccttgcagtattcggacgcaaccacgccggcagatgtggcgccagtcgctggactcctgttgaccgttggcgacgccagcgggcgcacgctgagctttaagtatgatgcctcatcgcgattgaccacgatgatgttgccggacggtgtatcgcaagcgtttggctacaaccccgccgggcagcttgcatcggtgacctatccggacgccacaagcaagggctacatctacaacgaaacagcaaacagtcccactgtcgcaggggcgtccttcctcacaggaattgtggatgagaaaggcgtccgttacgagaccataaagttcgactacacccatcgcgcttatcacgctgaattcgctggcggagttgataccacaaccctggactatgccgcttccacgtggaagggaacgctgccagtcaccgtcaaggggccactcggagccacttctaagttgggcttcgtggatacaggaaaggggcgtttgatgcccgcgggcggttcggccccctgtggcgaccagtgcaaccaaccctacaaagccatgacctatgacgcgaacggctacccggcgtcggtcacggacttcaagggaatcaccacaaggaccacttacacggcagacgggttgctggccgaacaggttgacgccgccgacaccccccagcagcgcaccacgacgaccacgtgggataacgtactgcgtttgcccctgagtcgggtggtaaagaactccgcgggcgtggccgtctccagcagttcatggaagtacaacgcgttgggcctggaggtcgcgcggtgcgaggtggatcctgccaattcggctgcggtcgcgtatgcgtgcggaactgcaaccaatgcacccgctggggttcgtcaatggaccaccgcctactgctcggcggtggatgccacccaatgcccgcaagtcggtcttgtccttgccgaagacgggccgcggtccgatgttcaggacgttaccaggtacagctactacctggccgcggatgagtcgggttgcggcgttctcgggggctcctgccaccgcgctggtgaccttcagtccgagaccaatgctctcggtcaagtgacgacacggctggcctacgaccgaaatggacgtgtcagccgccttcgagacgcgaccggcacgatccatgattttggctattccactcgaggcaagctcacctcgataactgagcggaacagcgtggacggagctgcgtctaccaacgatcgagtgacctccctttcctatgatgcgacaggtaatgtcgcatcgcttgttgaccccgatggagtatccctcagctacacctacgatgatgcgcaccgtctcgtccagatcaatgacggggccgggaacaacattcgctacaccctcgatgtggcaggcaatcgcacgaaagaggaggtgttcgacgcaggtggtggactgaagcgttcgctctctcgcgtttacaacaagctggggcaactggtgtcccagaagacggcagcggggaattcaaccgactttacgtatgacctggcgaacaacgtccagctcatcaccgatgccctgaagcgcaagacgcagtttgactacgatccctatggaaggcccagcagggtgcttcaggacgtttccggaatggcagtcgagacgcgatacgagtatgacgtcgaaggccggaccaccaaggtggtcgatcccaaaggcctggcgaccatttacggctattcagggctgggcgacttgttgagccgccagagtcctgacacgggcgcaaccactgccagttacaacagtgcagggcagccggcgaagcaggttgacgccaatggcacggctagcagctacacatacgatgccctgggacgcgtggtgcgcaaggtttatggggaccaggcgattgttgcgtcatacgtgtatgaccaagtcgaggacatctgctcagctggtgagtcgtttgcaagcgggcggctctcatccatgcaggatgacggcgctaaaacccagtattgctacgatcgcgccggcaatgtgacgcgcaaggtgcagacgtcatcggggcagagcgtaggcgtcagctatgcctataccaatgctggccgacttcgttctgtcacctatcctgacggaatggtggcggactacaagcgagatgcagccggcatggtcaccgagatcggcgtgacgcgaccgggggctgctcgtgtcgtgttgctttccagtgcaaagcgccatcccttcggccccactgcgggctgggcctacggcagcgggcgtacgctggcgcgagacgttgaccaggattaccgtccgtcagcgttgatcggcagtggctcgggagcactgaatgcagccttctcgttcagtgccgtgggcgagttgaccggcctcacctccggagggactggggcaacgtccgtatcgctgacctatgacgcattgagccgactgactgccttcaaggatgcggcgactggctcgatcatcgacagctacgcctacgacgccacgggcaatcgcacgtccgcgaaggtcaatggagttgatcaagcctacgtctatccgtcagacagtcatcgcctgcaaagcgtcgggggcgtgtcgcgtgcctacgatgcggctggcaacacgctttcgatccaaggcgtagaacgcgagtttgcttacaacgcaatggggcgcctgagtgcggtgaagcgaaacggcacggttgctgcggaataccattacaacgatcttggccagcagatagcacgtaaggccggaggtgcctcagcgctgagtctctacgatgagcgcgggcaatggctgggggaatacgaccaggcgggtattgcgcgtcagcaggtgatctggttggacaacctgcctgtcggattgctgaagggtagcgcgctctactacgttcagccggatcatctgggcacccctcgcgttgtcgttgatccagcccgtgacgtcgtagtttggagttgggatctgaagggggaagcgttcggtgcgacggcaccaaacgaggatccggaccaggacgtcacgctgtttgagttcgcgatgcgcttccctgggcagcgatacgacgctgagagcggtcttcactacaatgttcagcgtgactacgatcccgccagtggccgcttcgtgacgtcagacccgctcggattgcaggggggaatcagcacctatggctacgtgaagggcaatcctctcacctcggttgaccccgatgggatgctggcaattcctttgctgcccccgccccccgtggtcacgggcgccccgggtgccgttggggcgtacaatgggggcgacctcagcaatccgaacggcaattgggattttggtccgaagatcaacttggactccctcaagaatgtcttgatgctccaagaaatgatggggatcggtcccaacggtttgctcaatcccaatagcgctacgtcgcagatgtcattggcagtgctgaagcaagcctgctcggacagagacaaggatgaggactgcaggaaggagattgagcactgcgtgtcaatctgcagtcgcgctcgcagggatcccgaccttaagggagtatggggtggaagcagggcccgttgccttactggatgcgtatcttggcgttgccaagacaaaataactgaagatgacctcaatggaattcgatga

SEQ ID NO: 501683 - DNA, 570 bp, Stenotrophomonas maltophilia
atggggcgcatcccccggacggacccggatagccgcatgtgcaccttcatcaccttgttccttcctgcgtcgtttgcgcaggtcgatgccgccgcgatcatgcagcgcagcggccggagcctgttcgcgcaggattcgcccagcctgcaggcggccgtcgggcccggctggcagccgtggctgagcgccgcgcactgcgattgcggtaccgcgctggcctcgtcgcgggccgagcgggagtggaagggcgatgccgggcgctggcggaagaagggttggagcgaagccaagatcgcccgcgcgctggccgagcagcaggcgcggcatgaacaggatcagcaggcacgccgcgatgaagcgctggacgatgccggccagtggttgcagcgtatcgacgcgctgttgcaggccggagccgcgcgcatcggcctgctggtgcgcgactacgacggttcggtgggtgcccggcatccgaagccgccggaacgccactggccgcggaatcagctggccgcagcggacctgctggcgctcatgccgggcacgttgcattggatcgagcgcgggtag

SEQ ID NO: 501684 - DNA, 513 bp, Stenotrophomonas maltophilia
gtgcagacacaggcggtcgccgcgcgctgccagaagagcctgcccggcctggaactgcagttgcaggagggccgcaagcactggctgtcgacactcgacgccgcgcaactgcaggccgccgaggcctatgccagcagcaaggaaggcaagactctgggaaagagtgtggagcgggatgcctcccgcgccttcggtcgcaataccttgtccgccgcagcgacctgcgttggcctgctcgccgagttcggcccggcccacccgctgccttccggcacggcaatgccggccgaccgggtgcagcactacatgctgcactttgcaccgatggtgctggcccggctgcagtgcgcgcgcctggacggcatcgacgtggccgcccagcccgatggctcggaaacctggcagtaccgggcctgtggccagaccgaatccgtgcgcatggccccgctcgggcagagctggtcgatgagcgatgcggaccgcaatcgcctgttcgacgcactgacccgatag

SEQ ID NO: 501685 - DNA, 816 bp, Stenotrophomonas maltophilia
atgaaacttcccatccccgcaacaatcctcgccctcctgcttctgagcagctgcggccacaccccggaccgggagttgccggaccgaagcctatctcccagcaccgacgcaggcgtggtcaatgtggccatcaaagtccctactgagctcgaaacgatggacgtgcgagtcgtgtaccgttcaaagacttgcaccatcaccagctactctgcctccggaattccgtatgatcgagatggctatcagcggatggacttgaagcccatccagcagcgagagagcagactgttcgaggccaaagtgccggtgaatggaggtggcacctgcaactggcaactgagcaatatcaccttcggcgcggagtacaaagacacctccgcgtttggcgagggcattcgatccggccgtcccgccggcatgattgtcttttttgatgacaacaattcgcccaacggccgctggggtatcaaagtcgacggagatctgacagttgtgcgggactactacccatggctcagtgaaaggttccttggaggccatacaaagtcaatgagcctgatcacgaacggggattaccacccaacttacaaggcacctgatgcccgcaatgtccatttcgaacccatcctacattcgcagtttctcacgcgatccgtgggacctaaagtcaaagccaaaggcaacaggacgatcttctactatccggatggcagcaattcgttcgaagcttacagctggccgaatcactcgaaactgcaggcaatccggatggcagccgaagcgcagcgccaggccctgtccgattccgaagggtga

SEQ ID NO: 501686 - DNA, 498 bp, Stenotrophomonas maltophilia
atgcagaatttcaaaagcaccttggcgttgctcgtggccgccggttgctgcgtggccccagacatggcgcacgcgttccagctgatcagagaagaggcagatatcaggcttgtggatggcacacccgcgatctgcatcccggaaaaagcgaagggctcgttcccagtggccaacctgctactgctggagtactacacgctcgaatccgaaagctgggccatccgcctgaaggacgatgccaagccaatgaagctaaagcctggcaactgcattgcatacggctcaataccagacggctacgagcgggatgggcccgacaacagggagaattttcaactgaaattgaacacaacctactactttcaagcaattcgacaaattccaaatctctggtatctgcgtaccgcaatctatgaagccacattctgtctcaagacagatgccgatggagccctcagcattcagaagaaatcagcatgccccgacttcagccgatga

SEQ ID NO: 501687 - DNA, 288 bp, Stenotrophomonas maltophilia
gtggccgactgggtcgtacgcgattcggccagcaacctgagctcgctgtgcaccccgaagatgagtatggcctgccaaaacctgcagggccttatcatcggcttcacgtacttgcaagacatcggcggcttcggttcgctgcagttctcggacaactacaccaacatgctgaagcatgaagtgcaggcgcagccgggtgaggacttccaggacctgctgggcaacccgaagtcgatttggaattacgaaagccaagcaaaggcacgttccgacgcatcggcggcctag

SEQ ID NO: 501688 - DNA, 927 bp, Stenotrophomonas maltophilia
atgctgcttgagccggcactgcagcagttcgttgacgccgtcgcggcccatccgctgccggaggacctgcgcgaactgcgcgcgatcagcgagaacgcgctgccacagctgcagggcgcgccgcagccggtagcacatgtggtcgaacacaccgtgatcgctcgcgacgggcaggcgctggagctccgcctctacacgccgcaaggactgtcccatgggcccgcgccggccctgctgttcgcccatgggggtggctggttccagtgttcgctggcggtctatgacggtccttgccgtgcgctggccaatgccagcggctgcgtggtcgccgccgtgggctaccggctggcgccggagcacccgttcccagtgccgctgtacgacatcgctgacgcctggcagtggctgcaggaccacgccgagcgcctcggcctggacccacagcggctggcgatcgggggcgacagcgccggtggcaacctcgcggccgcctgctgcctgctgctgcgcgaactgggcctgccgcaaccgtgccaccaactgctgctgtatccggcgctggatgccggcatggacagcgattcctaccgcgactacgccgctggctactacctcagcgccgaactgatgcagcgctgctggcaggcctatctgggggatctggccgagccgccggcgctggcttcgccggcccacgcaaccgacctgaaggggctggcgcccgcctccgtgctcagctgtgagcacgacccgctgcgcgacgaggccgaatactacgcgcgacgcctgcaggctgcgggtgtcggctgcacgctggagcggctgccggggatgatccacgcctgcatgcacctgcaggcggtgagcaccgccactgcagtcgcggtacaacgcgcgggcgatctgctgcgccacgccctggcctga

SEQ ID NO: 501689 - DNA, 849 bp, Stenotrophomonas maltophilia
gtgaagagcgatcaatacccggtaacaaggcttggctcgcactcgttgagcccaatcgcccccttttccagtctctggcgcaacggcaagctgatctacgaactcaccaagcgtgacatcactgggcgctaccggggatcagtggcaggcagtctgtgggcgtttcttacgccattgctgatgctggcaatctattccttcgtattcgggtacatcttcaagtcccgctggactgctgccgagtccgggaatgtgagttttccgatcgtgctgttcgtcggattgatcttctccaatttccttgcggaatgcttgaatcgggcgccggcgctgattacggcgaatccgaactacgtaaagaaggttgtgttcccgcttgaagtgcttccgtgggtggcggtaggcaccgcgcttttccacgcgctcatcagcatcttcgtgcttctgcttgtgatggtgtgtaccggtacaccgctggggccgacggccttgctgctgcctgtcgcgttcctgatcttcgtcccggtgatcgcggggctgtcgtggatgctagctgcgctgggggtttacttccgggatctgcagcagatcatggccgtggtgaccaccgccatggtattcctggcgcccatcttctatccgcgcagcatgctcccggacagtatccgttgggtgcttgcgatcaatccattaacctatgtcgtggaagtggcgcgtggattaatgctgtgggggcagcttccttcgctgttggccttggcaagctatgcgctggtctcgctcctggttgcttgggcagggtgggtctgtttccagcttacgcgcaggggttttgctgatgtcatctga

SEQ ID NO: 501690 - DNA, 1353 bp, Stenotrophomonas maltophilia
atgtcatctgatcttgcgatcaccgttgagaacgtctccaagtgctacgaggtctactcgcgcccttccgaccgtctgaagcaaatggccgcgaccggactcgccggcttgctgcgtcgaacccgcccgcgctatcacgagcagttctgggcgctgcatgatgtgtccctggaggtcgccaggggagagtgcgtcgcactcattggacgcaacggctccggtaaatccaccctgctgcagatcatcaccggaacagtggcgcccaccagcgggaaggtgagtgtcgtcgggcgtgttgctgcgttgcttgaactgggttcgggattcaatcccgagttttccggcatcgagaatgtgtacctcaacgcctcgctcctggggatgagtcgtgcgcaggttgaagccaagctcgacgacattctgtcttttgccgatatcggtgactttgttcatcaacccgttcgcacctattccagcggcatggtggtacggctggcgtttgcagttcaggcacagatcgatccggaagtgctcatcgtcgatgaagcacttgcagtcggtgatgccaggttccaggcgaagtgcttcgcgcggctgaagacgttgcgggaaaatggaacatccattctccttgtgacgcactccacggagcaggtcgtcacccactgtgaccgggcagtgctgctggatcgtggcgcaaagctcgcagatggtgcaccgcggccaatcgtgaatcagtatctggacctactgtacggacgaaaccggcaggcgcctgtggcggacagcgaatcaggcgctgccgcgagcggtgcagtgctgctcccgcggcagatcgagtcggtcgatccgcagttctcttccagaacggagcccgcatttacccagcgcgccctgtacaacccctatgagcaccgctggggcgatggttccgcggagatcttggatttcatggtcttttcggagactgatgcatttccgcagtcaatacgttccggatctcccctgaccatctatgtcaaatataagttcaacgacgtcatggtcaatccgatcctgggtgtgaccctcaaaaccaaggaaggccttactatttacggtaccaatactgaaatgggcgaaactgaaggcgatttcagtgcggaacgccgacagggagttgttgcgtgtactttcaaactgaattgtgcgcccggcgactatttcgtatcgctgggtatcgcaagtcgtgatggtcatggcgaagttgtgcctcacgaccgtcgatacgactctattcatctgtgtgttgaggcgggtgagtctttcattggcgtgaccaacctcggcgcaactctgaaggtgctgcaatga

SEQ ID NO: 501691 - DNA, 4401 bp, Stenotrophomonas maltophilia
atgaccaatgcatctgcttggaagaattcctatgcactccgcgaggacgttgggtgctggctacctcggtcggaagctgcgacctgggcttacagcgacggtgacgacatcgagcgcaatctgcttgagcaggtccgatcttgtgtagaccgttcggttctttccgatgagctggccaagcgaattgtggattggccgacacgctattacttcagctccagtcgcgcgaatctgctccgccccttccgatcgctgcttgcggggcgagtccttgaaatcggtgccggttgcggtgctgttacccggtacattggcgaagtcgccagggaagtcatagcgatcgaaccttcgcttcagcgcgcacgcgtggccgcggcgcgatgcgccgatcttgccaatgtggctgtggtggtcgagcagttggagcacttccatcgcaccggtgaacgcttcgatgccgtgacacttattggtgtgctggagtacgcacaccgttttgcggaccgctcagatgcggcttgccactggctacgtctggccaaggatctcctgactccagacggcgtcctgctcgttgcaatcgagaacaagctgggcttgaagtattttgctggagcacccgaagatcatctcgggcgtccgatgctgggtgtaggtgatctctatcagccaaatgggccgcgcacctacggccgggcagagcttgagagcatgctggccgaatcgggctttggctcaataggcctcgcactgccattcccggactacaagcttcccagtacggttctgctgagcgagcagggcgacgcaatgccagggttcgacggcggcgcggcgttggctggtgcttcagtcaatcgggatgtatcactgcacggcgcgccgctgttcaacatgcagggcgcttggcaagcgctcgccgacaaccgcctggttgccgatctttccaattcgttcctgttcattgctcacgcgggcaaggcgtcgaacgtattcggcgcggaaaacgccgctgtgagtgcatatcactactccaccgaacgccgcgctgcattctgcaagcaagcggccttcgtgaggatcagcgaatcgaacgaagggcaggtcgtccgtcggtttctcgtcgatccgggttgtaccgaggcatcgcaaggggcgtaccgttgtgcaccggcggatgagacctacatccgtggcgcaggatgggcgcgtaagcttcatttggaactccagcgtgacggatggacggctgctgctgctggcccgtggttgcgcgagtggcttgaggctgttttcaagcacgtaggcatcgatgcggtcgctgtcttcagcgaggggcgatcgttccgcgtaccgggttcgacattggatctgataccgcagaatttgctctccatgcctgacgggcagctgcatttcatcgatatcgaatggttccgatcggagcctttcgaaatcggatacctcgccttccgcggtctgctggagactctgcggtcctgccccgtgatcgcgcgtccatatgatgctgccgaattgagtcatgcgacgttcctgacgtccgcattcgacgcgctgggagatggctgggggctggaccagaccaccatggaaaggtacctcgtgcttgaacacgagttccagcaggcggtttcggcgactggtgcgggggcgagcctggaggaactgcgctcggcatcactgcgtgttgcgccgttcgcaacggtagaaggcagtgcagcgctcgcggtgcagcatctgtcgacaaaggcatctgagctgaacgtgctgcgggagacgtaccatgcgctggaggcagagcatgagcgtgtcgccgcgtgggcgcactcgctggacaggaagcttcaggacgatagtgaatggaaagccgaggctgaacattcgctgagttctaagatcaagactcttgaggattccttgagatcgcagcgcgtcgcctatgcggcactggcgagtcagaaccttgcgctgagtgaggaactgaaacagcgcgatgacgccctggacgcacttgcctcgacgcgttggtcggatctggaacggcatcatcaacgtctgcaggcgctgaagatcacctccggcgtcggtcaatcgtctggccgccagtatgccaatgatgattcgatcgcctccgacccggctgctcaggccgtggtgacattgctggaccattatcgaagcgagctcgatgatcaggcggagcttgtggggcgcttgctcacgtcacgttcttggcgcttaacacgcccgatgcgggtggccgcgcgggtcgcgcgcggggaactgatggatatgatccgatcgctgcgtggtcgaggtctttcgcaacactcggtgctcgcgccattcgtcccttttgcccgccgcctcattgatcgtcggatcgaacctgtccgtgcgctggaggggctcctcttcgacagtgtcaccaaggatccggatgcgatccttggccagatttcattccctatcgtcgaatgccccgatgtcaccatcgtcattccgacttacgggaacctgaggcagagtctcgcgtgcgttgcctccttggctttgcatccttcagccgccacggttgaaattcttgtactggaagactgctcgggcgacaaggaaattgctcgcctggcggggattccagggctccggtaccacgagaacgagcggaatcttggttttctgctgtcctgcaaccaggcgctggaacttgcgaagggcaggtacatctgcttcctcaacaacgatacggaagtgacatccggttggttggatgcactagtcgatgtctttcatgcccatgccgatgcagggatggtgggttccaagctgatctatccggacggtcgtctgcaggaggcgggcgggattatctggcaggatggttctgcctggaattatggacgcctgcaggatccccgggacagcgaattcaattatgtacgtcctgctgactactgcagcggtgcaagtctgttgattccgacggatcttttccgcaggcttcagggcttcgacacccgttatgtccccgcctattgcgaggattcagaccttgcgttccaggtccgtgcgcaggggctgacggtctactacacgccgttctccgaggtcgtccattacgaagggatctcgcacgggaccgacaccggcagtggtgtcaaggcctatcaggtagagaatcagcagaagctgctacagcgctgggagcaggccctggcccagcatctgcccaacgggcaggacgtgatggtcgcgcgcgaccggtcatgggatcgtgaaacggtggtaatcgtggatcactatgtgccgcaacccgatcgtgatgccggctcaagaacgatggcgtgcttcatcgatgcgctgctggcaaagggatatgtggtcaagttctggccggataatctctactacgacgagatttacacccctgcgctgcaacggaagggcgtagaagtcgcctacggtcccaaatgggtaggcaggttcaaagatttcctggcgcagggcagcacgatttcgaccgtcattctgtcccgtccgcatatcgctcagaactacctggacatccttggtgaaaggccggagatcaaggtggtctactacggccacgatttgcatttccggcgtatggacatggaagcccagcgcagcggggaaggggatgaagccgcacgccgcatggagcagctcgaacgccatgtatggtcctccgtcgatcgagttctctacccttcacaggatgaggcggacgacgtcaaggcaattgctcccgcaacggatgtacgttccatcgttccctacgcatacgacgaattcaatttcgatgccgtcccttcggggcgaagtggtgtgatctttgtagctggattcgcgcatggtcccaatgtcgatgcggccaagtggctagtccaggagatcatgccgaagctgtgggaagttcatcctgaggtaaagctgtcgctcgtcggttccaaccccacggaggaagtcttggaattggccagcgatcgcgtggaagtcaccggttttgtgtccgaccaggagctggcgcgtcgctatgcacgcgcccgcgctgcggtagtgccattgcgattcggtgcgggggtcaagggcaaggtcgtcgaggcgatgcagcagggggtgccgctggtgaccacgatgattggtgcccaaggcctggatggcgtcgagaaggtggttacagttgctgatgccccgcagccgatggttgcggatctgatcgaactgatcgagaacgatacgcgctggctcgagcgttcgagggcgggggcacgcttcgtgcagaatcggttctcgagggaggcccttggaatggctcttgtttcggcatttgatatgggtatggggaagtcggcatga

SEQ ID NO: 501692 - DNA, 1029 bp, Stenotrophomonas maltophilia
atgatcgttcgttcgagagcaccgttgcgtctgggcttggccggcggcggaaccgatgtatcgccgttctgtgaccagttcggtggctttgtcatgaatgtcaccatcgacaagttcgcgtatgcgaccctggattcatcgccggacggcatggttgggttccacgcacaggatgccggcgcatgcgagcgtctggatccggagtccgttgctgcagaccccggcccgttgcagttgatgaagggtgtgtatctgcgcatctgcaatgatttcctcgaaggtaagcggcccgccatccgtattcgcgcacattccgatgcgcccccgggctcgggcttgggttcgtcttcaacgatggttgtcgcactggtcaccgcgtttgcggagtacttcgcgttgccgctgggcgagtacgagattgcacagcttgcctaccggatcgagcgtgtcgacctgcaactgtcgggtggcaagcaggaccaatacgcggccgccttcggtggcttcaatttcatggagttctacgatgccgaccgggtgatcgtgaacccgctgcggatcaaggactggatctggtccgagcttgaggcagggctggtgctgtacttcaccggcgtgtcgcgcgcatcggctaagatcatcgacgagcagtcgcgcaacatcaaggaaggcaaggccagctcgctcgatgcgatgcatcggctgaaggtcgaagcaagccagatgaaggaagcgctgttgcgtggcgatttcgagaggctggcgcaggtaatgcagtccggttgggaagccaagaagctcagcgccagcagcatctccaacccgatgatcgatgagatcgaagcgctggcgatgcgccacggcgcgcgcgcgaccaaggtctccggcgccggcggtggtggcttcatgatgttcctttgcgatccggcacatcggatcgacctggtgcgagcgctcgcgggcgctggcggcaccgtttttgatacacacttcacccaccaaggtgcaacggcatggaaaatcggatga

SEQ ID NO: 501693 - DNA, 591 bp, Stenotrophomonas maltophilia
atggaaaatcggatgaacgacttcatcaaggccgagttcggcaagactctcgagaacttccagcgcatgtcggccgatgcggcgctggcgtcgcagatcgagcaggcagtggcactgtgcgtggacgcgctgaaggccggtcgcaagatccttttcgccggtaacggtggcagtgccgccgatgctcagcactgggcaggtgaactggtcagccgtttctactacgaccgtccgggcctgccggcgatcgcgctgaccaccgacacctcgatcctgaccgccatcggtaacgactacgggtacgactacacctttgcccgccagatcgaagcgctcggccaggaaggcgatgtgttcgttgcgatttccacctcgggccgttcgaagaacatcatgcgcgcgctggacgcctgcgaagccaagggggtgcgcgtgatcggcttcactggcgaacatggcggcgacatgaaggatcgctgcgatatctgtttccgcgtgccatccaacgaaacgccgcgcatccaggaaggccacgagttcatcggtcacctgctgtgcgcgttgatcgaaagcgagatgttcccgcgctga

SEQ ID NO: 501694 - DNA, 702 bp, Stenotrophomonas maltophilia
atggccgctgacgagatcctgatcctggccggtggctttggcacccgcctgcgcagtgaagtgcccgacctacccaagcccctggctccggtagcgggtcgtccattcctgacctatctactggatcgctatgcggctgccggcatgcgtcgcgtgatcctggcgaccggctacctcggtgatgtggtggagcaaaccatcggcgcccgttgggcggggatggacgtggtctactcgcgcgaggagaccccgcttggcaccggcggcgcaatcgccgctgcggcacggctggcgcagggtgaggggctgcacgtctgcaacggcgacacctacctcgagtacacgccggctgcgctggaagcggctgcacaggggttgccgatgtcgatcgcgcttgcgcgggtggatgatgtctcgcgttatggcacggtggatgtcgagcagggcagggtgctgcgcttccatgagaagcgcccaggtggtgccggcctgatcaatgccggcagctacttcctcagcgcgcaggcgctggccagcctgccaagtgaagctgcgttctcgttcgagaagcaggtgctggagccggctgtagccgctggccgggttggtgcgctggtggagactgccgcgttcatcgacatcggggtgccggaggatttccatcgcgcgcagacgttgtttggccatcagaatggaccctga

SEQ ID NO: 501695 - DNA, 588 bp, Stenotrophomonas maltophilia
atggaccctgaactgattcaagaacctggcttcatcgccggccccgccccgcgccgtgcgggtgcgcccgtactgtttctcgatcgtgacggggtaatcaacgtaaaccttggttacgtgcatagcgcggatcgtactgaatgggttccaggccttcccgcactactggagcaggcgcgggtaaaagggttcgacatcatcatcgcgaccaatcaggccggtattgcccggggctattacacgatcgaaacctttgcggcctatacggaatgggtgcacgcgcgcttggctgaggcaaactgccaggtagtgggaacgtacttctgcccccatcatcccactgcgggtatcggtgagttccgtcgcgaatgcagctgtcgcaagcccgcacccggcatgtttctggcagcagctcagcggtttgggatcagcatggccgaggcaacactggttggtgacaaggcatcggacatggccgctggatcagcggcacacgtcggccgtcttgtactggtaggcgaagaaccagaaggcaaagtgctgccggtggtgctgcgttgccgcaatccagccgaggtgcagctgtag

SEQ ID NO: 501696 - DNA, 906 bp, Stenotrophomonas maltophilia
atggaagatctggtcgtccccagcgaggaattggcagaacagggcacattgccgactgccagctgccccctatgtagttccggtgcaccgctttatcgcattgtggatggggtggattacttcgattgcccggactgcgatttcatcttcgccgaccccatcgtcctgactcgtatcgatgtgggcgagttcatacgcgactatgacgttgactactggaccagcgaactgcaatcggcgcgtgatcgctcatatgggtcatcacttgcccgtgtgggcgaggccttgctttactgcacgatccccgtcaggcgctttctggacataggcagcggaccgggatatctgctggacgcgctgtcgcggtatcttccctacagcgcagacgtcttccacggcgtggagaagtttccaccaccggacgatgagcgaagtccgcacccgaactatcactgtatggatcttgctgatgtcggcatgtcgttcgagtgcggtgtctgtgtcgaggtcttcgaacatctgactccatcaatggccagaagcatggcatcggccttgttgaactgctcagttcccggatccctgttcattttcaacaccggcctgaccgattatgttcgccacgaggatcccggttacctggatccgtaccgccgcggccacatcgtggcgtggtccattactgctgcacggcgcgtgttcgaaccgttgggattcgtcgtccatccgctgaggggcaaaacctgggcgttcgcggtcgagttgccgaatgccaagcctcgtgcgctgcttccgttgcaggaccggatctggagcgcggagccggaaaacctggcgatactgcacgatccagaaatgggagaggtcatgatgatcctgggccgcgaaagcgcgagggcatattga

SEQ ID NO: 501697 - DNA, 1116 bp, Stenotrophomonas maltophilia
gtgaccgatccactggcagttgatcttcccccttcacaggtcccggcaggagggcagaagccgttcggtattgctgaccgtctttcctggctgcattcgccgatcacggtcgaacagggattgcgccgtcgttccgacaatttcctgctgatccgcatcattgctgcatcgatggtgatctatggccacgcgaaggccatcgcaccggcggtggaacaggaagattttttcgtctgggcagggttcggacactacagcggccacattgccgtcaacatattcttcctggtcagtggcttcctggtcaccggaagcctgatgaggcagcgtaatccgctgaacttcttcaaattgagggcgcttcggctggttccgggctacgccgtcaatgtggcgttgcttgcgctggtcctgggtgccgtgatgaccacgctgcctgtgcatgattacctgcgcagccccgaggtctgggcatacatcgtgaagaacctgcatctgtcctcggacatggcatggaaccttcctggtgttttcgaacagaatgcgaagacaagtaccatcaatggcagccaatggaccttgcctgccgaagtacgcatgtatgtgctgctgggagtcgccggtctgatcggcctgttccattcagcgcgggtggcgacgttcgctacacttgccatcctggccattggcgcgttcgtgccctactacctgccactgcatcaggactggttccgtctggggctgtacttctctctgggggtgctggcctacctgcatcgcggtgccatccagatcagctatgtgttcgcgatcggcatggtcggattggcggtattgacccgtcatctgcctggatacgaacttaccttcgctcttgccaccggagcagtggtgttcgcagcggcctatctgacacgccccgtccagtggcttgagcgctttggcgacccgtcttatggcatttatctgtgggggtggcccgcgcagcaggtggtggcgcgtttcgtacctgacgctggtctggttctgcacgtcgcgctagccctcgccttggcgatggttgccggctacgcctcgtggcacctggtggaaaagcatgctctcaagttcaagtaa

SEQ ID NO: 501698 - DNA, 1614 bp, Stenotrophomonas maltophilia
atgctctcaagttcaagtaacgctctacctcagctcgaccagcgaggacaggacgccatccgtggtcattccctgctgctttccttgggtctggctgttctggcctatctgctgatcacacgtatcgtgacaccaggcttcttcgagccgctggtgcctacccattccgacacgtggcggtactttgcctattccaagacagacttctctgcctcggatttcaccgcgccgcggcccttgatgctggtggcgctgaagctgatgggcgcggtggacagtgttcctgcgttcgtcctgctggttctgctgccggcgttcctcttgccggtgattctgctaaagagtgcgcagatcgtgctcgaacgtcgggtcacctggccgtggcagttcgtttactacgctatctgctacagcttgccctcgttctatgagctgcagactctggattttggtggctgtctttcgggctggttcgcatgcgcgacgctgctttccctgcgtcgtctggcgttgcagctacagaggcaatcgtccttcgccgcttgggccacgcccctgctgctggcgtggatcagcatggagtgcaagccgacttatggaatggtgcttgccgcgctgccggtggtcttcctggcgcgtatgggctggcgccgaaccgggatgctggtctgcggcatctcactggtcgtccttgcggtactggtgaaggaccgcctgctgggaagccccttcgtgggaagcaacgtcagtgaaacatccagctactacgtcgcctcgggtgttggcgtcatgtgggagtcgctgatgttctatctaagccacatggtgccactgggagcaggcctgctggtgctcatcggtattgttgccctggcgcgccgtcacggcgtctggtgcgcgctgatgttcgttgcattcgcattgctcgcgatcgcgccgatgttggctattccaaacaacaagctttcgatgtacgggtggtttggtgcgtccattctgttcctgcccgttgcgttcctgtcgaccgggccgttcgggcgctcgcgcgtgctacggggtctatcggtgcttgtattgggcgctgtgatcctgctggccttcaatgcgattgctcgcgcagaaccttcgttgcgctactggtatggattcaatcagaaggcgaacaagcagagtctgcttgctatcgaagcaatgcggccgttgcttcgcccgggtcaacacctgctcgttgctggtccgctgaacgcattcaatcctttcagaaatgatgagttcattgccctgcagttcccctatgcactggaatggacggtgctcgttcccgaactggatactccgctgcttccgttcagcgactccaggcgccacattgcaagtcgtgatctcgtggatatcagggacatcgacgtgatagcaatgatcgatgcgcagggacgactggcgaactttgtcgacgcggaagcctaccgcagtctgggcaagtccgaactgatcaattcgctgttctgccggcaggggcggactgcagacacagaagcagagctcaattgcctgcgccagctgaaggaagtcactgcggcggcggaactctcggcaaccgtgcccaaggactga

SEQ ID NO: 501699 - DNA, 396 bp, Stenotrophomonas maltophilia
gtgaacaaggcgtcgctggcaacgattgtccgcttcctgatttcaggcgggatcaacaccggtgccacctttgccctgtattgggttcttctgctatggctggactaccggtttgcctacgccatcagcttcatctgcgggatagcgttgagttatgtcctgaatacccgtttcgttttcaggacaagcttcagctgggccaaggtggttgtgtttccacttgtatacctggtgacctacgctgccggagcgtgcgtgctggacctatctgtacgtcgaatgggtgtgcctgcccacctggcacctttcgtctcaatctgcgtgacacttccgctgacgttcctgctcagccggtttgtattgacccgtctgtctccgcgggcacccaaccactga

SEQ ID NO: 501700 - DNA, 939 bp, Stenotrophomonas maltophilia
atgatgaactacttccttcacccgaacgcactgtgcgaatccgaccagattggtgagggcaccaagatctgggcatttgcgcacgtgcttcccggcgcagccatcggcagcgactgcaatatctgcgacggcgttttcattgagaacaacgtgaaagttggtaaccgcgtgacggtcaagtgcggcgtgcagctgtgggacggagtgcggcttggcgacgacgtattcgtcggacccaatgccaccttcaccaatgacatgtttccgcgaagccgccagcacctcgccgagtatccggagaccatcgtggaagcgggagcctcaatcggtgccaatgcgaccctgctgcctggtgttcgtatcggcagcggcgccatggtcggcgctggttcggtgatcacgcgctccgtcccccccaacgcaatcgttgtgggcaatcccgcccgcatcattggctatgtcaccgagaaaaacgcgcgtggcaagaccgagccgatgcgctcgtccaacgatacggttgaaccgagcgtcaatggcgtcaccctgaagcagctaccgcgttaccaggacatccgtggtgcgctgaccgtcggcgagttcgccaaggatctgccgttccagccgaagcggtatttcatggtctttgatgtaccgagccaggaaacccgtggtgagcacgcacacaggatctgccaccagttcctgatctgtgtgaatggcagcgtccgcgtgcttgctgatgatggcacgcgtcgtgaggaattcatgctggactctcccagccagggcctgcatcttccgccgatgacctggggaacgcagtaccagtattctcccggcgctgttttactggtgttcgcgtcggaagaatacgatgccaacgaatacatccgtcactacgacgaattcctggaactggcgaacggcgtcaagcggtga

SEQ ID NO: 501701 - DNA, 666 bp, Stenotrophomonas maltophilia
atggcagccgacctgcaggagccaccagaactggtggtgaagtttcatgaagttctggctacaggaaccgtcgatatcgcgatgggcgtgcgagagtcccgtgaggatccgggcctttcgaaaatcgcctcgtccacgttctgggcactctatcgtcgcttcgtcatgcccgatattccaaaggggggcgtggatattttcgcgcttacggcaggtatgcgcgatcgccttctgcgactcaatgaaagcaatacgagcctgctcgcgcagttgttctggctgggcgggcgccggtcgttcgtgccctaccagcgcctccgcagacagcatggcaagagcgcctggacgctgaagaaaaagctccgttacctttctgacagcgtctttgccttcaccgatcttcctgtacgcctgctgatggcactgggaaccatcgcgttggccgctgccgtcgcattgtcgatgttcatactggccgcaaaactctctgggcttgtcccggttcccggctacgccgggacgatggtgaccatcctcttctttggcgctctcaactcacttggcctaggagttgtcggtgcgtacgcatggcgcaccttcgaaaacaccaaggcacgcccattggccattctgcagtcgcaggaattcttcacggattacgaatga

SEQ ID NO: 501702 - DNA, 1104 bp, Stenotrophomonas maltophilia
atgagccaacacctgattcccgttaattcactgctgcgccatgtttccccctatcaggaggagcttgctgccgcggccactgcagtggttcgttccggttactttgtacttggcccatcggtgcagagcttcgaagctgccttcgcaacctactgcggtgtgaatcactgcatcggtgttggcaacggcaccgatgcactggaattgtccctgcgtgccgtaggcgtggaaaccggtgaccgtgtagcagtagtggcgaatgccgcgatgtacggcacgtctgcagtcctggcctgtggtgcggttccagttttcatcgatatcgcgccgggaaacgcaaccatggatgccaatcagctggcgtcggtgctgcagcccgcagcggtcaaggctgtcatcgtcacgcatctgtatggccagctcgctgatatcgagaccatcgtcgacctctgccacgcacatggtgttgctgtggtggaggactgtgcgcaggcgcatggcgctcgccgcagcgggcgccttgcaggctctttcggtgacatcgccagtttcagcttctatccgaccaagaacctgggtgcactgggtgatggcggcgcggttgtaaccaacgatcccgcactggctgaacgcgtacgtcgtcttcgtcagtatggatggacccagaaatacaccaatggtctgtcgggtggccgcaacagtcggctcgacgaaatccaggcagcgatgctgctcttgcttttgccgcatctggatacgtggaatgagtgccgtcgtgccgtggccgcccggtatgccgcaggcatcagtaatccccgcattcaactgcacggctgccagggcgagtcgtacgtcgcccacctctatgtcgttcgaaccgatgcacgcgaggaactgcagaagcatctgctggatgccggaatccagaccgatgtccattatccgttgccggatcataagcagccctgccatgcagacaggtatgccgatgttccgcttgccgcaacagaacgtgatgccgagactgttctcacgctaccctgcttccccgaactgacggatgaagaagtggagcgagtgatcgcagcatgcaacagtttctga

SEQ ID NO: 501703 - DNA, 381 bp, Stenotrophomonas maltophilia
atggaaaagatagtagcgttcatgggtatcgctcttaccctggcaggctgccagcgcgaagggattccgccgccccccgctcccaaggctgccgtcgccgcgagcgacagtccgatgctcaagctggtccccggcacgctggcggtgtgccaaccgggcagcgtggtcaccgcctcctgggatgcgagcagtgttcccggcacgaccgctgtgcaactgtgggtcgcagacagcacgggtgaaaagctcttcgctggcggccctgccgtgggttccgcagcgacgggcgagtggaccaccccaggcatgcgttttctgttgaaatcggccgatggcagtaccgtggtcgctgaagccaccgtgggtggtcctggctgctga

SEQ ID NO: 501704 - DNA, 198 bp, Stenotrophomonas maltophilia
atgaagaagtggatcaagcgcatggttgctgcgggtgtcctttcgatgacggtcttcggtggtacggcgtctgccgcatggtgcggccagccctgtttccagctctacaagagctgcatcgcacgcggcggtgaggttgagcagtgcctgcaggaacaagccttctgcgaagaggcgatgtgcggcggccacccctga

SEQ ID NO: 501705 - DNA, 1098 bp, Stenotrophomonas maltophilia
atggacaagccacgctacatcgtcgatatcgtcattgcggcgccgggaacaccgcttctcgacccggtaacgcagcagccgctgcgtaatccggatggttccccgcagacatccgggccggggcacatgttctacgtcctgcgagcaccgggaaaagatccggcgagctacggctttgcaccgatcgagcacggcagcatgaacggaccgggcgacatcgtggacagcgatgcaaagacctacaagaacccgcattacacgcgctctctggaaatcaccgaagctcagtacaacaagctcagagcattcggcgacgatccagtggcgcacggcttcagcaagcactatgccgacgtgcgtcacaactgcgtggacttcacctggggcgcattgaatcatgccggcatccagcgcaagcacagcctggacgtgaacagcatcggcggccccgtcggccagttgctgcccgatgtccgcattccgctgggcgtccagtcacagggcaaggacggctatcgtccgctgcgcaacatccatggcgtggacagcattgagccccctttccccaacagcgaactcaaccgcaccaccacccatcccctgcccgagcgcagcttaaagcagcgactgctcagcgaaaccgatggtattgatggccccttgggcgagcgtctggctgcggacgcgcgcgcaccggggcacagccttcatgccttggaccagaaagtgcgtaccgcactcgcccaggccagcgaacagcagggactgccccccggacaggagcacgaacgactggccggccatctgacccacgcggcggtgcaggccggcttcagcgaaaaggacacgctgcaggtggcattcagttcaaacagcaccgccgaggcacccggctacgtattcctgcatcgcagcggcgacaccgcctcgccggaccctgccgccaatcgccagcgcctgtccctgctcgatacgcagcagggcgacgcggacacgctgtatcagcaggccaacgtgcagcagcaatcccgcgacgcaagccggctggcgcaggacgagcaacaggcacaacagcaggcgtcgccgcgcatggcctga

SEQ ID NO: 501706 - DNA, 1023 bp, Stenotrophomonas maltophilia
gtgaaccagcgagtcatgtcgcaacgagatcaggcagggcaggtcaagctggtagagggcaccgggcctattaccaagatgctacctatgggtgagtttttggaggtgtacaagcgtgatgtgacttttcgcttgaggaccccagattccatagatccagaccggacaaatgtgaatttgccatgggtgacttctccagtcgcttgggtcggatcctcacacccggccattgcccgggtattgatccaatcggacgaacttttgaaccacgctacgctcgccccggggaagcagaggcaagacctaatgcttcaccttcatgcatgcaaagaagcgcttttggcctgtgacgcagtagcaattcgagtgggaggacgggtaaaggcgatcgttgaagccatccagtccgcaggactctccattgattcttcaggtcacggtttgaacccatttccgcaggttgaagacctggatgctgactgtgtaacgtttcttgtgcaggcgaacagggctgtaaagctgatttcgcaggtcccatcttattttctggagcttgcgaagcagtgcaataattttgatcatttgggaagagcgctgcgagcaagaattggcgagtcgccgctctgcatctttgttgaagaaaattcagagttcatagccaaaattgccgctcttcgaaacttccaagagcacccggctccagagaaaaagacggtcgttcggaatttccatcttctgcccaacggaagtgtcagtgtaccaacctggtttatcgtcggtagcgatgatgagactgcgggagcgattcatttggatatgcaggtgatcgccgagagtctcgtggagattgctgaaatcctggtcgtacatctcgtaatgcagacgttgtcatcaagcttcccgtatgcgctagaaatgatcccggaggccgaaatggacgcagacgcgcccataaggttcaggctgggattggatttttcgcagattcagttcgaagaggtcagggctgatcctcggccatga

SEQ ID NO: 501707 - DNA, 561 bp, Stenotrophomonas maltophilia
atgggcttcaacaagcagttgactcgccgccagatgaagatggggctctacaagctcactctggcccgctctgacttcttcgccagccgaaaggcttgtgcctacatggtcaagcatgtcactgggttcgatcacccgctttactatcacctgtacgcatcctccgttgtttcgtacgcaaagcccttcgtgaattccgctattggcgtccttccaagtagatgggcgaagtttgagcaccggtggatgaccgacgtccataatgacgtaatcagggcgcggcacgaggtgatcgcgcacaacgatcagaacgcccgcaagttgacgatagtgccccctggggctgcgcccgatgacatcgttcccatgtcgcgcattgggatcgcgttgaagcttgacacctactacatcagtggcggcttgttctcgtcgctcgggcaggtctgtcagtaccagattgatcgcctcaataaggcaattgatgatgcacttgacgagctgtatgaggggagagagctgccgtcggaatctttcgagctgacgctagacgacgagttgtag

SEQ ID NO: 501708 - DNA, 369 bp, Stenotrophomonas maltophilia
atggtcgatatcaatcgattgcaccgcacgctgtgggtttccttcgcattgctggcactggcggcctgcgcgcccgccgacgatccggcgcagaccgtcgaacgcgatgctggcacggagagcgctcctgcgcgcccggtcggtggggccatgcagatgcagccggctcagccggctgagcgggagaccctgcccgatgcggtggacgtgcagcgcaatgcggatggttcggtcgatgtgcgcaaggccacgccggagccggcggccctgcggcgcaccggcgacgggggcgtggagatccgcaaggtggatcctgcagccgggcagggcgccggtacggcgtcggccaaggccatgccgcagcagtga

SEQ ID NO: 501709 - DNA, 822 bp, Stenotrophomonas maltophilia
atggatgatgcgctggccccgctgccggccggtgagctgcactggctcagatgcggcgaactggaggttgcgctcgccgcaggggcgggcgggcgcgtggcgcacctgcgttaccggggcgtggattggctggtggatgcgcagcaggcgggcacggcggcgatcgcgtggggctgctacccgatggtgccgtgggccgggcgcatccgccagggacagttctgcttcgacggcgcgccgcatgcgctgccgctcaatttcggcgggcatgccatccatggcgtgggcttcacgcggccctggcaggtcgagcgcatggagacggccacggccacgctgtcgctggcgctgccacgcgacaggtactggcccttcggtggcgtcgccctccaggaagtgagcctgcaccctcacagcctgcagctgcgcctctcggtccaggcgggcgggcaggcgatgccggcggtgctgggctggcacccctggttccggaagccggaacgactgctgttcagtcctcgctcgatgtatccgcgggacagggaaggcattgccacgctgccctgtgtatctcctgcccacggcccatgggacgactgcttcatcgccgaacgtgacatcaccctggtacgcgaaggccagcgcctgcggctgaggtcggaccacgaccactgggtggtctacgacgctgcgccgcacgccacctgtgtcgagccgcagagcggcccgccggacggcttcacgctggcaccgcatcggctggagccggggcagcggctggcgttgacgttcgaactggcgtgggcaacgaacagtccctga

SEQ ID NO: 501710 - DNA, 492 bp, Stenotrophomonas maltophilia
gtggaatgggcggatctggccaagcgccagttgatcaccgtgcaccgcacaagcggcaaccgcacgctgctgaatggtgcgttggcgcgtgagagcctcaagctcagctggcactacgaagtgacccacctgtcgacctcattgggcatggtcgaggccggcatcggcgtgtcagcgctgtcgaagatggccacgccggacggggatcaccccaccctggtgacacgcgcgatcggcaacccggtagtgtcgcgcacgatcggcatcgtccgccgccgtggtgccctgctctcgcccacggcagagcgcgccacctctcctgtccgcagcaattccctgcggcgcctactgaaggcttcctcggtcccggtgcctcataccgggtcgagattcagatcggcaaccttgccgaagggcatgacggtcaacgccttgcagcttcccttttcgattgaatcactgggattctcagcggattttgcgatcccgtag

SEQ ID NO: 501711 - DNA, 1161 bp, Stenotrophomonas maltophilia
atgccggcaggccaggcattttcggagaaggaatcggatatcgctgccaaggcctacatgagtgcgaacggcgtgtcactcgacaccgccaagcgcaggctggaagttgaatccgagctaccttcggtcatcgccgaactgaaacggcgatacagtgatcggctcgcatttgtttcgatcgaaaacatgcccgatcaacacctcgttgttggactgaagggaaacatgatggaggcggtccggcgcttcagagtgagcgactcatccatcagggtcgaattcgaggaggggtatccgtacacggagaaggagttctccgaaaccatgcatagagtcgttccacttgtggtcgaactcatacctgatgcagtcagtgtggacggccgccccgagctgggcatgattgacgtttcggttcgcggagccgatgtaaaatcgtatgaagcggccaagcgcaagattgaagaggctgcgaagctgaaggtcaacatcatccttgggagggatcccttccgcaattcggcgtacaccgccggtggggcgatcctgactgccaatggcaggatgtgcacaagcggccttgcggttcggcacaagctgaccaaggtaaaagggctccttacggcagcgcactgcgatgatcagttgctttacagcaattacggtcatgaggttggtggcccgcaggtcatgatgccactgacattccaggacgcgctcttcgacggtagtcacgatgttcaatggcactcgcttcctgctggaaatacaccgctccaggaagtgttcgcagaattgaagggtgagtaccagacgaaggcattgatactgatccatgcggaccttccactgcatggcctcctttgcttccgaggggctcgcaccggattcagttgcggaaccgtcacatcggtgcagcacgccccgttgggcgtatgtggcgctgcagtctgtgcaccgacttggggaagagtggaaggctccgaacttgcatgcgcgtccggtgacagcggcgccgccgtcttcaacaagagcggctcaggctacgggatcgcaaaatccgctgagaatcccagtgattcaatcgaaaagggaagctgcaaggcgttgaccgtcatgcccttcggcaaggttgccgatctgaatctcgacccggtatga

SEQ ID NO: 501712 - DNA, 2484 bp, Stenotrophomonas maltophilia
atgcaggacgtagcgcaaggccaatgcaaagttgtgtccgacagccgctggtcactcagtaccttcatggaattctatgagcgggtattgagtcctcgcattttccacccttacgggaagctgctggccagcgaagtcgccagcgacatcgatggcggattcgtggtcagggacgtgctggaagtcgcctgcggcaccggggtgatcaccgcaagcctgtatgaggatcttgcgcggccacggggcctgcggctggtggccagcgatctgtcgcagatcgcggtgaacatggcccggcgcgtcctgagcccggagatccagcagcacgttccgctgttggccgacgtggacatggcagagcttccgttcgaggacaacagcttcgatgtgattgtctgtggcttcggcctgatgttcccgccggacaaggcgcgtgtggccagggagttccgccgcgtgctgcggccgggcgggcgtgtctatgccacgatgttccactacaaccagctcttcgaactcacccgccagcaatcgcagctgcatttcggcatgccctcgcggctgatggacgctgcgctgagcctgaccgacccgtcgccaatcacccgggctttcgcgatcgaaggcctgtccagggccaacgatctgcctgcggggctgcatcccctgtcgttctcgctggatgcggccggcgcgcgcgagttcctgttcaacgcctgcatcctgctcgaggagttcaaccagtgcgacaccggcacccgcgagcactacctggacctgatgctcgcgcagttccgcaaggacgtgcctgaccagcgctatcgggtggaggcatggctgctgcgcggccaggctgatccggcccatgcgggcacgacgctggatatcacgccccccgatttctcgccgctgctgcggtgccagcagctgacccatcgcgcgtcctgcgtgggcgccgagcgcgccgtccctgcgcacgaggcgcaggcgctcgatgcattcaccgcggccagggcgcagttcctgaccgagcatccgggcttccctgacgcatcgatagagaaaatgcgcaacgaggagtacgcacgactggatgagcagcacgtgacgtacctggatcatgtgggcggaaccctgccacccgaaagcctgctcgaacaggacctgcaggcattgaaacacgcgatcctgggcaatccgcacagcggatcgaaggcctcgcaggccgcctaccagcaggcacgggacgcgatctacgcctttttcggctgttcgccggacgagtacgaggtgatattcactgccaacgccagcagcgcgatccggctggtggcggaatcgtttcccttccagccgggcacgcagctgctgctgaccaaggacaatcacacatcggtgcatggcctgcgcgaatacgccagggccaagggcgcctcggtgaagtacatccccttggacgacgacctgctgctgcacggggacctgatgcagcgtgcgctgcagcggctgggcgatggcgccccgcatctgctcgcctttcccgcccagtccaacgcgaccggtgcgcgacatgacctggcctggatcgcccgcgcgcgggcgcatggtgcgatggtgctgtgcgacgctgccgcactggttccgcaggcgcggctggattgcggcgcccttcaaccggactttgtggtggcctcgttctacaagatcttcggctaccccaccggcgcaggctgcctgcttgcacgccgctcgtcactgcaactgctcaggccaccgtcctttgccggtggcggcgtctgctactactcgggcccgtggtcgcccaccgagcggttgctgtatcgcgatgccgggcaacgctttgagatcggaacacccaattacgccgcgttcccggcgatcgcccggggctttgccttcgtggcgcggatgggcggcgtcgaggccctggcgctgcgttccggtgcactggcccggtggctcgaggcgcgccttgccgcgcttcgccataccgtgcgcggcgacacaccgctgtgccgcgtgtacggcccgccggcacagcacaaaggagcgacggtgatgctcaacttcttcgactgctatggctcgatcatgccgcatgcccgcatcaagcgcctggccgaccgcttcggcatcaccctgcgcaatggatgtttctgcaacctcggggccgtccagcaggcaacctatgccaccgcaggtgccgagcactgcgaactggacaagaccgggaagatcctcgactgcaccgccttcgatgagaagatcctggacaagggagattgcggcgcggtcaggatttcattcgggctcgggtcgaactttgccgacgcctaccgcttgctcatgtttgcgacctgcctgctggacaccgatgtttcaggtcttgaaggtgcgctcgccggaagcgatcccgcggtcgatgccggccgtctccgtgccgcccctgtcgtaccggcctga

SEQ ID NO: 501713 - DNA, 594 bp, Stenotrophomonas maltophilia
atgaagcagagccctgaactgctgcgacgcctgctgcgtgccaaggaccggatggaccatgccagccacgaggactggccggtggcccgcctggccgaagtgagtgccgtatccgcggcgcatttcgcgcgttcgttcaagcaggcattcgggctgccgccgcaccgctacctgctgagccgccgcattgaacgggccgtggcgctgttgcgtgacaccgacctgccggtcaccgagatcgccgcgcagaccggctggagcagcctgggcaccttcggccgcatcttccgtgacatcaccggcgacagccccggcaacgtgcgcgcacgcgaacgccggcacccaccgctgcgcggcgccgtgcccgaatgccacgcgcgcgccgcgcagcggccctgcctcgacacgtccgtgctggaacaacgccgccgtggcgcgccgccggtggtgcccgccgcggagcgtcaggccggtacgacaggggcggcacggagacggccggcatcgaccgcgggatcgcttccggcgagcgcaccttcaagacctgaaacatcggtgtccagcaggcaggtcgcaaacatgagcaagcggtag

SEQ ID NO: 501714 - DNA, 585 bp, Stenotrophomonas maltophilia
atggccgccgttcctgcccgtgcctgcctgtccgtcctgtgcttcctgaccctgcccgcccttgcccaggacgcgtcgttcggcttcggtgaacagaccacccgtaccgagcagaccacgcaatccagcagtacccagacccagagcagtggcgcggtgaccacgcagaccaccaccagcggcagctcgcagtccgagtcgcgcagtgaaagcaaggggctggacgtggacttcggcttccacgacaacaacgatgactgggaccacgaccgccagcgcggcggccgcggcgtgcgcgaaggcgatctggtcggcagctggacgctgggccaggagaacggcagcacctgcaccatcgagctgaagaacatcgagtggttcggcggctacagtgcctatgtgcctgccggctgcccggatggcttcttctcggccaaccgctgggtgctgtcgggcaaccagctgctgctcaccgataccagcaacacggtgttcgggcgcttccgcgcgtcaggcggtggccgctggtccgggttccgtgaatccgacggtgcgcggttgtatctcaatccgaaggggcgttga

SEQ ID NO: 501715 - DNA, 1014 bp, Stenotrophomonas maltophilia
gtgtccagtccccgcacggaatccgtgatgaccatcggctaccacgcatcgcatgagcagttcccgcccaccaccttgctgggcctggcgctgcgcgccgaacaggcgggattcgaggccctgatgtgctccgaccatttccacccgtggacgaccgcacaagggcagtcgggccacagctgggtgtgggccggcgcgctggcggtgcagagcgcgttgaccctgggcatggtgacgtgcccgatgctgcgccagcacccggccttggtggcacaggcagcggcgacgctggagcagctggcgccgggccggatctggctggcgctgggtaccggcgaggccctgaacgagcgcatcaccggccagccgtggccagccaagcgcgagcggcagaaggcactgcgcgatgcggccgaggtgatgcggcggctgtggggcggcgagcaggtcgaccacgacggtggcttccaggtgcgccaggcgcgactgtacagccggccggcacttcccctgccgctgctgggtgcagccgtcacggaggacaccgcacgctggatggggggctgggccgacggcctgatcacgatcagccagccattggcgcagttgcagcgcgtggtggcggcgttcgaacagggcggtggcaggggcaagccgatgtacctgcaggccaagctctcctacgcgcgtgccgaacaggcggcgctggaaggagcgatggagcagtggagcgccaatgtcctgccaccggaactggccgaaggcctggaccagcccgagcagttcgaggcacaggcccggtcggtcagtgccgaggagctgcgccagcacgtgcatgtctcggcggatcttggccagcaccgggcctggctgcaggaactgcagtcactgggcttcgatcgcatctacctgcacaacgtgaaccgcgagcaggaccgcttcatcgatgatttcgccgaacacgtgctgcccgcgctgcgcactcaggcgccctcggcggccagccacgtatag

SEQ ID NO: 501716 - DNA, 357 bp, Stenotrophomonas maltophilia
atgaacgcatcggaattcccccatcagcgcgccccggccaaggccgatgaagcgcacgacatcgcgtctgatcccaacagcctgatggccctgctgcatcgcatcgggttgggcgcggccgccgacggccagccctggcccgagcgccaccagctgccaggccgctgcctggcattggccgacgccgacggtgcactggccgggctgcgcatcgtgcaggaaatcctgctggcggccgaacgcgcccgccagaatggcggcccggaccagtacgtcggcgatcgcgtgatggaaggtctgaagctggcggcattggcgctgaccagccacgccatctatcgcctgcagccggaatga

SEQ ID NO: 501717 - DNA, 246 bp, Stenotrophomonas maltophilia
atggcatggcataccagcggctctgtgctgacactggtaaatcccaccaacatctggtggaacacagtctacggcccgggccacactgttcccgtttcaggcatctacgtctgccttggctgcaggcgcgagatcacgagcaaccagaacgaccccttcccgccgcagtctcaccatcagcactcgacccagcagggcagcatccgctggaaactcaatgtacgcacgaacaccgacggcgcctga

SEQ ID NO: 501718 - DNA, 741 bp, Stenotrophomonas maltophilia
atgggttgggacatcacctaccatccagtcgcggattcggagatccgtgacatctatttccgtgcgctggaggacgtgacgctggtcgaggcgctgcaacagcggttccggatcgagccgttctacatggagcagttgcaggaacgcatcgacgaggcccgcgcgatcagcgccgaagtgcctttcgagaaggggcacgcgttgtacctggcgatcgtggccggtcacctgcgccggtatcattaccttcgcgggagcgccctttcgttcttcatcgacgacccagtgattgcccgttatttcgcggactggcggcaactggtgccgccgcagtgggcggacgccgctgccggaaaccacctgcgcgagaactacggtggtggtgtgttcatcacgcatgaccggctgaagcagatgcgcgcggactacggcggggacaatgaactgcgtgcgcgtctggacgagctgttttccgatggtcgactggccgtgttctggagcgttgtcgatgatgccatcggcaaggaatgcggattgctggaagcaagcgaggtggtccagccgaacccgatggacctcaatgcatcgaccagcatgagcaatctactcaactgcgcccccgatggcgcgttgctgtacgcggaggccgccgcggcccaactgcaggagttcctgggcgcccatacctctcctgcagttgctccaaaaagccgatggtgggagcggctgttccggcggtga

SEQ ID NO: 501719 - DNA, 189 bp, Stenotrophomonas maltophilia
atggggttggctgcccgcacagggaaggaccatccacagattcggatggcgtgtcttgctggcctgcgctgcgccggcccaagcggactgcgcgtgaccaacggcagctggaccttcgtcagcgaaatcgagatggccgccgagcaggagcgcgtcagcgccggcgcgcgtcctgcaggcgctgggtga

SEQ ID NO: 501720 - DNA, 1188 bp, Stenotrophomonas maltophilia
atgttcaatcgacaggccccgcgttgggcccattcgctgccgtcggcgcttgtcctgatggcgccgttcgatatcctggcctcgctggccatggatatctatctacctgtagtgcccttgatgcccagcgcgttggacgcatcgcctgcgcgggtgcagttgacgctgagcatctacctgctggtgctgggcctgggccagttgttgttcggcccgttgtccgaccggatcgggcgccgcccggtgctgctgctgggggcgctgctgttcactgtcgcctcgtttgcgctggcgctgtccagcaacagcgggattttcctggcctggcgcacagtgcaggcgattggcgcgtcggcagcgctggtcgcgacgtttgccaccgtccgcgacgtgtacgcggatgcaccgcagggggcgtccttgtatggactgttcgcttcgatgctggccttcgtaccggcgctggggccgatgctgggcgcactggtggctgcggcagcaggctggcgcgcgatcttcgtgctgctgggtgtgcttggcctgatcgccggcctgcgcgcgcaacgccagtggcaggaaacccgacccgcagggcgcagaggcgctggaccggcactgcagaaaattcttcgcagtggtgccttctgggtctacacgctgggattcagtgccgcgatgggtacgttcttcgtgttcttctcgatcgcaccgcgcgtgctggtcgagcgcatgcagtactcccagatcaccttcagcctggcgttcgcgacggtggcactggtgatgatcctcacgtcgcgcgtggcaaagacgttcattgcacgctgggcagtgcctggcactttcgtgcgtggcctgtgcgtgatggtggtgggtgtgctggtgatggcgctcgctgcgaagttgccacggtcattcgccagtgtcgtgctgcccatgtggggcatcgcggtggggctggtgatggtggtttcggtggctgccaacggcgcgttgagtgaatttgccgatgcgtcgggtacggcggtggcgctctactacgcgatgcagagcctgatcgtggcctgcttcgggacactggcgacggtgctgctgccgggcgatacggtatggccgctggtggcctatgggctgttgctgccagtggccagcctggtcgccgcggcgatgttgcgcggccgccgctag

SEQ ID NO: 501721 - DNA, 312 bp, Stenotrophomonas maltophilia
atgaatgacgtggagcacgatatgcctgagcccgtgcaaatcgatttcccgctgctgctgaaccgggatgaggtgatgcgggatgagtgtgaggatccgttggggtttgcacgtcggacgacgtatgcgctgctgacgctgtctgaggctggattgcctgccggcttcagcggcgacaatcagcagggactggaagaggccaggaggacggtggcgctgttccaggcacatctgcgtcggcagatgtggtttgtggacgtggcggagaagcggttggggcgtgttgctgaggctctggctgctgccgggtag

SEQ ID NO: 501722 - DNA, 255 bp, Stenotrophomonas maltophilia
atgaagccgcctgatggcggcacgtgtgtggatggcggccagcgcctgcgggggtgcggccgcgatcagggccggccggagttggagaccggcccgtccgcaccggcgatgcgcctggcgctgcgcatgagcgacagcgccaggtacatcgccggggtggtgcagtcgatccgcgcccagcatggaatcccaggcgaacgcgaacctcaatgcacttcgtcgtggtacacgaacttcggcatttcccagcggtag

SEQ ID NO: 501723 - DNA, 423 bp, Stenotrophomonas maltophilia
atgccagcgctgccctgcaagggggtgtcagtatccggttatcctgcgcgcatgaatccgatcctgcacgccgagataccggtccgtgatctggcccggaccatcgcgttctaccagcaatggctgcaggtggcggtgggcgaacccatcgtgctgcacgactgccggatggcctatctgccgttttccgatccggccgccggtgccagtgtggcgctggtgcacggcgcggactaccggccctccgagcagggtgcgcgcatctacatcggcgtcgatgacctggaggtaagcctggagcgtgcactgcgcgcgggagctgcgttgcgcttcgggccggccgacgcgggcgactggcgcgtggccgagatctgcgacagtgaaggcaaccggattgcgttgcaggcgcgcgcggttgcgtag

SEQ ID NO: 501724 - DNA, 870 bp, Stenotrophomonas maltophilia
atgctcaactggattgttctcacgctggcaatggcgtcgacggacggtgaagtagtcacctatgttcatacggatgcactcgggagtccggtggctattacggactcaaacgggaaggtgatcgagagattcacatacgagccttatggctctgtcgttggaatcgccgcggcagatggtcctggttactcaggccatgtgtttgattccacgacaggtctcaattacatgcagcaacgatattactctcccgaaataggtgcctttctcagtgtagatcccgtcgctgcctatggtgggaagtcttccctcttcaacaggtaccgatacgccaatagcagtccttacaactttgtcgatccggacggcagagttcctgtagttacgcggatgaaggacggttcggtgaaaatcagcttccctacaaagttttcaggggatggtgcgacacccaagaacatagcgaccttcaaagagcaggtggcgtcaatgtcaggaacctatgatattggcgggaaggagacgcgcgtgacggtcgaggtcactgacattgaaagaagtaccccgcgggccgcccgtaatgagataaagcttgtcagcggggaaacctcccaccgcagcggacggagttttgcggagttgggcggaaagaagggcgagatcaatgtcctggatagatttgacaagggtgttgttcctcatgaagtgtcacatcttggcggcgtggatgatctctatgacaagacaacggggctgcccaatcctgcacgcggcgacggaatcatgaatagggttcccggtgtggttgacagccatgccatcggtggaattgtggatggcgattcggcagtccagagacgggagcgttga

SEQ ID NO: 501725 - DNA, 462 bp, Stenotrophomonas maltophilia
atggacgacgctgcgctgctactggccctcgacagctgcgagtatctattcctgacgggtattggcgaaccggaggccaactgtctgcggctggtcatcgaagagggacaggtgacaggagagcctcgcccagtggacctcggcaatggacgttcgatcgagggcgtgcgcgcgatagagataacttcccattcgcagcggttcgagctgatttggaacgcctacatcagctacgccgtgcacaacgagtcctaccagagctgggacgactccgaagcctggagcggcaacctgttccgccgttacagccgttcgaagttcctcgattatctggaccatgccacctttgccgatgtcagttacccgggcccattcacgcactatcaggtgatatgccaggaccacgtcatcgacattgccgcgttgcagccgccgaaggtgcgccgcatggatccctcgtag

SEQ ID NO: 501726 - DNA, 1056 bp, Stenotrophomonas maltophilia
atggatggactacgcacctcgtcaatcggcttgataggccttgttctcattgcgctttcttccgccgatggatacgccagagatcaagaagagcccagcattactccccttcgcaccgtccatgcgacccctccaaggccagggccacgcatctggaagttcacgaagggatattcaaccgtgctggtcttgggcacggttcaacctctcaggaagggcctattcatagatacccgcagcgtggaggccgcaatttcagcatccgacgtggttctaagtccgccaggggtgacaatcgaacacgatggcggattttttggcggcctcttgctgtggccctccatccgcaaactcaagttcctcgacggcgacagaacgctgcgtgacgcacttacgggcgccgagtatgcgagatggaacgagctcaagcatcgctacaacctgcgcgacaccagcattgagagaatgcgcccgatgtacgcggcctggaaggctcatgacaccgcactgagggccagcgaaatcaggaccggcagccatctttccaaagctatcctccagacagcccgaaggcaccggaagcctatcgtcgacgctcgcttctctgtgccggtaaaggccgccaaacagacgattcagaatttccacattgatcctgcgctcgaccgcaggtgtttcgcagatgccacttcaagcctgcagccttggctcgatcgagtcgacgaaatcggtcgtgcatgggcggatggagacattgaagcagacgtacttctgcacgctccatcatcaccctctcggtgttgggtccgcctgaccaatgatgcaatcgccaacacgatgaacctgaaccttgatgtcgagagccgaactcactggctcgaagcgcttcgctccaccacttcccgccacaacaccgttttcaccaccctgccattggaggaccttctccattcaaaaggcatggccgccgcgcttatggaagaaggatacacttccgatgctggagcaatcgctggcgatcagccatttccgagctatccgaccagcgtgaactga

SEQ ID NO: 501727 - DNA, 978 bp, Stenotrophomonas maltophilia
atgcgcaacagccaggcctgtgagattgatcagtacgccccgattgtgaccattcgacacgatatccagacagagcagcagcttggcctgcatctctccgacaccgaaagggttgctatccactcggcatgcagaatgagcggactcgatctggactcatactatcgatggtatcaacagaaaagcaccatcagctcccaactggcacagcttgaccgcaattcacttctcgaagccatccgttgcattgatcgctccgactattcgtcaatcaatgaaaggctcccgagcgacagaggagttgtgatcgcacttccgcatcatggccactacatcctgtctgccatccgcctgatggagagcattcgccaccatcgtgatgttctcatcttctacggtgatccaaccaaccattccggcaacgagctattcgacgatctctatcgacgactgttcgatcgcgccggatgtcgcgctggcattgtccactcgaatgcaaaaggaatcgctacagcacttcgcgccctgaagaacggggcagctgtcatcatgatgcccgacgttcaccgcctacgcgaagaagccttttgtattccatttcttggccgccgcctggacgtcatgctaggcaccgccgctatggctcgaagaaccgggagttgcatcctgccggtcgtatccctcgttgaccacgattttcaggcaaccgctgttctcggagacctgatcaatccgagccacacgccagcgccggttccatcagacgtttctgactactggaccacattggagattttccgctttctagaacgcgagatgggtcctcagatcatctattggcagtacatccgacagcatctcctgcagagatcgaggttcccgcactttcaccccgacacagttgatgcggcatggagcatgttttcgaaagaccagcgaacccatccgcgccccatgttcacagcatgcctggattga

SEQ ID NO: 501728 - DNA, 174 bp, Stenotrophomonas maltophilia
atgaatgtatccgccaccctcttggacccgaaagccgtcgcaacgtggatgaaattctccggcgcaaacgcaaacgcgctggacaccatctttgaagccgaagttgatgacatcaaagttgcggcattcagcagcgactgctgcgggtccaacaattacgaagatccgcgataa

SEQ ID NO: 501729 - DNA, 1305 bp, Stenotrophomonas maltophilia
atgcaggctcatccgttccaggtcgccgcgatgtatttccgcctattgcgtcgtctaccgctggtgatgatgctggtcatggctgcaccgggcatggcagcgagtggagcggcggacggtgtaggtaatgaccagctcgagcaggtcgtcctgctcagccgccacaacctgcgcgcgccggtggtggcgtcaggcgccctcgccaaagcgacccctgaaacctggcaacgctgggacgtggcaccgggcgagctgaccaccaagggcggcgtgctggaggtctacatgggccgctacatcggccagtggctgcgccaggcgcagctgttgccggcgtcgggttgcccgcagcaggctgacttccacgcccatgccaacagcctgcagcgtacccaggctaccgcgcagttcttcgttgccggtgctttcccgggctgccatgtttcggtcgaacagcgcatgccgctgggctcgatggatccgttgttcgatccggtgatccgccgcgacgacgcggcattccgcacgcgcgcgctggagtcaatgcagcgagcgctggccgcggtggacctggcaccggctttgtccgtggtggaggagatcacccgctatccgcagtcggcggcatgcaaggggcacggcaactgccatctggcgctggccgataccaccttcagtacggaaccgggcaaggaaccacgcgcgtccggatcactggcgctggccagcgggctggtcgatgccttgttgatggagcactaccagggcagtggcatcccccgcgaaggctggggccggttgaccaccgaggcgcaatggcaggcgctggcgcagatccgcaaccgctaccaggacatcctgttcggaacgcccgaggtggcgcgtgatgtggccgctccgctgctgacaagagtgaatgcgttgttcgacgacccggcgtcgccgaaggtgaccctgctggtcggtcacgattccaacatcggttccgtgctggcggcgttgggaatcagcgactacagcctgccggggcagtacgagaagacaccgatcggtggcctgctgcagttcgaacgctggcgtgggcacagcgggagggcgcactaccggctggtatatgtctatcccaccaaggagcagttgcgtgacgcggtgccactgagtgaaatgcagccgccggtacgggcgacgctggtgccgcaagggtgtgcgaagactgggtgcactgaagcgcagtttaggcaactacttggagctaaagtgagggctttcagcggagatggcaaaagggctgtcgatggtgtctga

SEQ ID NO: 501730 - DNA, 435 bp, Stenotrophomonas maltophilia
atgaaaaaacagctgatcgcgcttcgtggcgccagcaactcgggaaagagctcgacgcttctcatgttttaccgactgctggctgcgcactctgccacgcgattgatttcgtttgaggctattggccacaagctcgacttcagtgcaatggttcagatcaacggatgcaagatcggaattttcaaccgcggtgatgtttccggaaccgtggatggtctgatcgaccaacttgcacaggcaggatgcaaggtgatcgtctgtgctgcccgttcgaagggtgacgttggcgatgtgctggcctcgtatgagcgcaggtaccagttgcaggagattgtcaaaaagaccggtggggaagacgagtctgattttgcactggtcaatatgggcgtcgcgcatgatctcgccgctcgagtctactcagcagtggtcgtctga

SEQ ID NO: 501731 - DNA, 747 bp, Stenotrophomonas maltophilia
atgaatgaaccgatgtacttctatgtgctgctggtggtggtgttcgtgctggccggcgtggtcaagggcgtgaccggcatggggttgccgatggtggcgatgggcctgctgggcagtacgctgtcgccggtgtcggcggcgtcgatgctgttcattcccaccttcgtcaccaatgcgtggcagctgctgtccgggccgtcactgggccccatcgtgcggcggttgtggccgatgatgctcgcggtggtggtggtgacgctggggtcggccgcgctgctggtgcgggtcgatcgcactgggtcgcgcgttgccctgggcctggcgctggtggtctatgcggcctatgcgctgcttgcgccggtgttccgcgtgccgcagcggcgcgagcgttggctggggccgctggtgggggcgttgtcgggcgtggtgactggcgccaccggcgtgttcgtgatgccggcagtgccgtacctgcagtcgctggggttgcagcgcgaagagttggtgcaggcgctcgggttggcgttcaccgtgtcgacgatttcgctgaccaccggcctggtgctgcacggtgcgttcggcatccagcagctggggctgagtgcactggcggtgctgccggcgctgctgggcatgtggttggggcaggtgatccggcagcggatcagtgcgcgggtgttccgcgcctgtttccttgggttcctgctgctgcttgggctggaactggtgctgcggtcgctggtctga

SEQ ID NO: 501732 - DNA, 345 bp, Stenotrophomonas maltophilia
gtgtgctcgttccagatcggtgcaatgaaagccatcttcctcgctgcagtgctgtcgttggcctcgatcccaacggcctattctcaagcgttgcccacagagctgacgcagctgggcatcgtcgccggcatgccctacgccaaggccaagcgcctgatggatgcggcagggtggcaggcgagtccggttcagggcgcgcctgagtcactcgagggctttccggaagtcggatgccagaagggcggaaagcagtgtgcgaccaccttcagaaaggacggtcaacagatcgcggtgcgcctgggcaccaccctggcagggcagccgttcgtgcagggcgcggactga

SEQ ID NO: 501733 - DNA, 381 bp, Stenotrophomonas maltophilia
atgttgcaccacctatccctcggcgttcgtgaccttgatatcgcaggccgcttttatgacgccgcgctcgccgcactcgggtaccgccgggtgttcgaggacgagaccgcgatcggctatggggtggtcgatgatgaagacgcgttgtgcctgaagctgcgtgatgacgccgcagcgccgggccccggcttccacctggcgttcgctgcagcgtccgcagcggcggtggatgccttccacgcagcagccatggccaacgggggcgctgacaatggtgcgcccggactgcgccccgattacggtgacttctactacgccgcgttcgtggtcgaccccgagggccatcgcatcgaggcggtgaccaaggcgcggccggcgtga

SEQ ID NO: 501734 - DNA, 1437 bp, Stenotrophomonas maltophilia
atgtaccgcacgctcgctgccgcattgctctgcacgctatgggtgattccgcctgcttcggcgcgtgacgtccccaccgctctctctacccggctcgacgcccagctgcaggccaaccgcgaacgctacggcatcgccggccaagccgtactggtcgcccgcaacggtcaggtgctgtaccagggcgccagcggtgaacgtgatcccgccacccatgcgcccgccaccgtcgagaccatcttcgccgcgcagtcgatggccaagctgctgaccagcacgctggtgatgcaactggtcgatcagggcaaggtggatcttgatgcgccggccagccgctatgtgccggacctgccgaccgcatggcaggcgatccacgtacgcgactttctcaaccacagctcgggcatcggcgagtactacgatcgtgtcgacaaccgttgggtcagcaagggctaccctggggtagcccctgaccttggcgctgcactgaaggtggccggcgcggcaccgatgcagtccgccaccggcagccgcgtgcagtacacccaggccaactacctggtgctgacggcgctgcttgaagcgcattaccgcaggccctacccggccatcgcacgcgaacgcatcctgcagccgctgaagatgaccagcacctcgtggggcgttgccagcatgccggcccggcgcgcggcggtgccgtacatcggcaaggatggcgcgttgcaaccggccaatgaagatccctggcccaactacggctggggccatgccgacctgcagaccaccgtgggcgacatgaaccgtttcctgcaggcgctggcgaccggcaagctggtccgcacggcgaccctggaaaagctctggcagccgcagaaactgagcggtggcggcagcaatttcttctccactggctgggataccacccgcagcgacggctacacccaggtcggccatgatggcggcacccgtgtacgtgcgcggctggcctacaagggtacgctggccgacggctactgggtgttcgtgtacctgaccaacggcagcgcccgcaatgtctggtccagcaccttggtggagagcacgatggcggtcgcggcgccgcaggagtttccgcacgcggtgctgtccgagcggctggtcgcgtatgcgctggatgatgatgcaggcgccgcccaggcgatacgcagctggttgcgcgataacaaccgggtgacgggcagcgagctggaacgtgcgatcaacgccagcggctatgccatccgccagagcctgggtgcacgcagggcgttgaaggtattcgccctcaacagcgagctgtatccggattcggccaatgcgtgggacagcctggccgaatgtcatgcggcattgggcgagaaggaagcagctgatcagttctacgcaaagtcgaagacgctggcgaagccctcgccatga

SEQ ID NO: 501735 - DNA, 2760 bp, Stenotrophomonas maltophilia
atgtctatggaatggcgcccctcgggctggggccagcgtgtgacccgctcgccggactggcagttgcggctggatggcgaacagctcgcgcttttgatcgacggcaggcagtaccgccagcatgtggcgaacgaacacagcgtgcgggtcgttcgcggcgtactctggtcccgggtcgaactgacgaccgagcgcggtgaggcactgtccgtggatgggctgcccaacagccagggctcccggcttgcggctgccgtgcagcacgtgcttttcgcgcgctccaggcgggggcgcaaggcactgtttgagcgcgttctggcgcagatccaggcgtggctggccgaggcagatgcgcttaccgaccgaggcaccaccggccgccgctggatcacgcacgaacagcagcaggcgctgttggccgaccgccccaccctgcccctcccgccagccgagctcgagcagctgttcctcgacgaggaggtgcatgacgacctgcacgcgcaccgccaccgcatggcgctggacgcgctgaacgactggcagctggattggcccgccgtgtgggcgaacgccaatgaggcaatggcgacccgtgaactgggtctggccaagcccttcctggaccgggtcgagagcagaccgttgaccgaggaacaagcccgcgcggtcatctgcttcgacaaccgggtgcaggtcgtggccgcggccggctcgggcaagacctccacgatggtcgccaaggccgcttatgccatcgaccgcggctttgtcgaacccgaacggatcgtgatgctcgccttcaacaaggatgccgcccaggagctggaggagcgcgcgcggcgatgcttcggccggctcggcatgggcgacaccgtggtcgaggcgcggaccttccacgccctgggcctggccatcatcgccaaggccacgggacgcaagcctgatatcccggaatgggcgatcgacgcgacgctgggcttcaacaagctggccgaactggtggacgacctgaaggaccgctcgacccacttccgcacccagtgggacatgttccgcctggtgttcggacgcgaccttccgccgttgggtgccgacatgatggccgatggctacgaccgcgatggtgcgccctacatgcgtaccctgcagggcgagcgggtgaagagcctggaagagtgcgtgatcgctgactggctgttctacaacggcgtggcgtatgactacgagcggcgctacgagttcgataccgcgacagacacccaccgccagtatcgtccagacttttactacccggacgcccggctgtatcacgagcacttcgcgctggatgccgatggccagccgccgcagcactttgccgattacagcgaaggcatgcactggaagcgccagcggcatatggcgcgcggcactgccctggtcgagacgacctcgtttggcctgcgcagtggacaggccctgcaacaccttgccgagcggctgggtgcgtctggcgtcgaactcgacccgaacccggaccgcgagctgcctgatcagggcgccaagccgatgccggacgcagacctgattggcctgatgcgcaccttcattgcgcatgccaagagcaactgcctgacgctggacgatatggcggcgcgcctgcggcagatgcccgaggatcagttcaaggaacgctaccggcgcttcctggagatcgcccggccggttttccaggcctgggacaatgcactggctgacgagcgcagcatcgatttcgaagacatgctcaacatggccgccgggttgctggaacagggccactatgaatcaccctacgatctggtgatggccgacgaattccaggatgcctcgcgcgcccgtgcgcgcctctgccgtgcgctggtcagccaaccgggccgccatctgtttgcggtgggcgatgactggcagtcgatcaatcgcttcgctggcgccgacgtttcggtgatgaccggtttccgtgaatggatgggacatggccaggtgctgaaactggagcagacgttccgctgcccgcaggcactgtgtgatgtgtccagccgcttcatcagccgcaaccccgcgcagatggccaagaaggtccgctctgctgcgccggcagtgggcccggtgctgcagacgttccagatgaaccggcgtgaggaggtgcaggatggcgttcgccagtacctttcgaagctgcaccagcaactgttgtcaggcgcggtggcgcaggggcgcaatggacgcgtgacggtctttgttctggggcggtatcgcgcggatcgcggtgcagtgccttcggattggaagagggcctttggcagcacgatggacgtcgagttcctgaccgcgcatcgatcgaagggacgcgaggcggactacgtgatcctgccgggcatgatcaaccgcagcttcccgagcctgcgcgcggatgacccggtgctatcgctggcaatgccggatggcgatacatatccgctgagcgaagaacggcggctgttctatgtggccctgacgcgtgcgcgacgatcggttgcgatattcaccctgcagggcaggcactcgccgttcctggatgagctggtgaaggacggagcagtggaagtgaccgcgatttcaggcgcggccatccacgaagagcgctgcccggtgtgcagggtgggcgtgttcgtggaccggaatgggccgcatggggctttccggtcgtgctcgagttacccgttgtgccataacaagccgaagggtgggcgtcgtgggtga

SEQ ID NO: 501736 - DNA, 408 bp, Stenotrophomonas maltophilia
atgcccgaacgtcttcccgaccatccccgcctgcacgcgctgctgggtgccgccgtgcgcgatcttccagctgccttggccgaaacgctggaggacgcgctccgcgaatccgccgagttcgtcaccccatcggcgttctttgcacatctgaaaggccacggcaggaacctgcgtgccgatggcgaggcctggagtgaaatgtgcctgagccccggccgcgccttcgacatggccctggcgacccgaagcgtttcgggcatcacggcgttgactgcggtgctgcacgctgcgcatgtggcgcgggagagcgacgatcccgcctgctgtccctccgccgccgtggtcgagggcctgttcaatgcctgccaggtgctgtcactgcaggtggagcgctgcctggttccatga

SEQ ID NO: 501737 - DNA, 756 bp, Stenotrophomonas maltophilia
atgtccggcgcaacgcagaccggccgcacgatcaacggtcacacctataccgatgcccccgtggacgtgaagctggggccgaacaccttccgcattccggccaactacctggacagccagatcgcaccatggccgggcgagggcgtgacgctggtcatcgagtggccggacatgaagccgacggcgccgggtgcgcgggccaatccgcgtacgaatgatttccggaaggagattcccatccggatcaactacgttgatcgcgttcccgttgaaacactgctttcaaggctgtcgtcaaatgaagccatcacggaggacggctctgtggaaagggaggatcccagggatcgtctcgatcaacgcgttgcaaagccgcagatcttgggcctgacgccctatgcaatcgatgaagcgaagatggtggtgtacgcgaagcagtatgaggcgcggtacgggaggccgcctgtgcgcaatcccgcctacgagagagactggtacatcgcacggcagggtgacggccggatcagctcattcatcaaatgtgacggcgaggaattccgacgcgacggcgtgcggctggaggggcgcgaggtgatcagtgagccaggggaagtggccgcgggctgcgttcattacttcgtggacatcgacaacaagctgtccgtcagcctggactacaagagagcgtttctgaaggactggaagcgcatggaagaggccgtcagggacatcatcgcgcgcacccggtccaagtga

SEQ ID NO: 501738 - DNA, 1323 bp, Stenotrophomonas maltophilia
atgagtggattgaccgaacgcgatctaagcatccttggcagctatgccagagacggcaaccgcgagctttactggaactacctgtcgcaactgccgggagccgatggatacgggacactggcactgggtgttgtacgcaatgacagcctgccgggacgcgtcgcgaacgcgtatgcacaaagctacgcaaagacccagcaggaagagggatcccggttttcaaatgcacagttgacggagcggcaatgggagtcctttgggcagaccctgctcgaaagagatattgagttgcggcagcagtggatgaacgagcgccgtccagacctggcactgaatcttcccggcaaggacgtgatgctggctcacgaccgcgcatttgaacggcatgaactcgatcccaactgctggacgccgcgcgtgttgctgcaggcggctgagcagaagagcggccccgagaagctggaacagatctggaccaacatgctcaacaatgactacgccggaggcccgcgcgtaggcaacaccagtgtcgatgccatcagccagatgggatggacgaaaggcggccagtacctgacccggttgagcgtgctggaagccacccaggcactggaagggcgctcggcggtcgatccgaacgtcatcggtggcaacagctactacgcgatgtacttcgaagcggacaggaagtgggccagtgtcagcgcgggtggcggccacgtgtcgatgcgcgagattaccgaccccgcacgcatcgccgagctcaacgacgcgcgcgaggttcgtctggagcgccaggaaaaacgcacccagttccacccggacgacccgtaccggaccatcacccgcagcccgctgaccgcagccgtggacgacgtgccggatcccgcgcaggcgccgacccgcctggccgacattggtcccggccaccgtgagtacgcactgatgcagcaggtgcgcgaaggcgtgtccgcgatcgatgcccgcgccgggcgtccccacgacgagaacagcgagcgcctcgtggcgagcgtgatggcattggcccgtcgcaaccagcttgaacgggccgaccatgtgctgctgagcgcgcagactgccgagcatccggccggccgcaacgtgttcgtggtgcagggcgagatgagcgatcccgcgcatctgcgtgcctccatgcctaccgatgttgcggtgcagacgccggttgcacaatccctgcagcagatcgaggctgccagccttgagcgccagcaggcggccatgcagcgccagcaggatatcgatctgcaggcgcgcgagagtcacgcgatacgcatggggtga

SEQ ID NO: 501739 - DNA, 681 bp, Stenotrophomonas maltophilia
gtggcgggggcctggtcgcgaagagcggatcatgcggttggcagggtgggtaggccgtgcaggggacgctgcaagtacgtccatgtaagctcggtcgccgcatccatgcggctcacgcccctgcacggcctacccaccctgccttcgacagtttcctgcggccgcccaccacggaagaaagaaagaagagcaacagcgggtcgcgcgcttcgcttgctcgcagccgagcatggctccgctctacagaaagcactgcaggaccaaacaaaaaggacgcggcgaacgccgcgtcctttttgttttccatcagttcgtcaccaaccaatgctcttgcccaccgtcaccgggaaactgtcgaaggtgggacgggggcggctggcaggaccgttggagccttgggcccgaggcatgcctcgggcgggttgggcaggacgcccaaccccggtcttgccgtgtgcgcaggacagcgcacacgagcaaggcgccatcgagcccccagggatgggtttacggcgtgtcctgccagccgcccccgtcccgccaaaccgtcagcaacccagagccgctttggctttggctttggcttctgcccgccgcaggcggaccaccgcgcgtcagcgcggcgcctccacatccaacccgatcgggcagctcacgccggtgccgccgatgccgcagtag

SEQ ID NO: 501740 - DNA, 1293 bp, Stenotrophomonas maltophilia
atgtccgccgtccccgctgcaagcgcgcgcccgaacgtggccacctccatcgccatcgttggcgtgttgttcttcctgatcggcttcttcacctggctcaacggcccgctgatcaccttcgtcaagttggccttcgaactcagtgaggtcggcgccttcctggtgctgatggtgttttacctgtcctatttcttcctggccctgccggcgtcctggatccttcgccgcaccggcatgaagaagggcctgagcctgagcctgctggtgatggccggtggtgccgcgctgttcggtgaattcgccacccagcgctggtacccgggcgcgctcggcggcctgttcgtgatcggtagcggcctggcgctgctgcagaccgcgatcaacccctacatctccatcctcggcccgattgaaactgcggcacgccgcatcgcgctgatgggcatctgcaacaagatcgccggcatgctggcgccggtgctgatcggcaccctggtgctgcatggcatcggcgacctggacaagcaggtgcaggccgccgacgcggtcaccaaggtcgcgctgctcaacgaattcgccgccaagatccatgcgccgtacctggcgatggccgcgctgctggtggtgctggcggtggccgtgctgttctcgcctctgccggagatcaagtcctccgaagccaatgcaacgccgtcaggtgcaccaggaaccgccgagcgccgcagcatcttccagttcccgcatctgtggctgggcgtgctgtgcctgttcgtgtacgtaggcgtggaggtcatggctggtgatgcgatcggcacctacggccacggtttcggcttgccgctggaccagaccaagatgttcacctcgctgacgctgggtgcgatgttggccggctacgtggtcggcctgctggcgatccccggcctggtctcgcagtcgcgctacctgaccatttcggcagtgatgggcgtggtgttctgcctgggcgcctgggctacgcacggctacgtctcggtgggcttcgtggcgctgctgggctttgccaacgccatgatgtggccggccatcttcccgctggcgatccgcggcctgggccgcttcaccgagaccggctcggccctgctggtgatgggcatcgccggcggcgcgatcattccgcagctgttcgccgtgctcaagcagcacatcgacttccagctggtgttcgtgctgctgatggtgccgtgctacctgtacatcctgttctactcggtgatcggccatcgtgccgggctgccgcaggacaaggcctga

SEQ ID NO: 501741 - DNA, 3027 bp, Stenotrophomonas maltophilia
atgacccgtgccgtcccgcgcgctttccgtccgcgccgcctcaccgtttccgtgcttcaggcactggctgtcccgtccatggtgctgttgaccgccagcgccgcctgggccggctgcagcaccgtcgcgccggtcgccggccagacggtcacctgcgatgccaacgcgccgaatccgcagacggtgcccatcacagccagcggcgaagcgggcatcaccgtcaacgtcgccagcggtgcccagttgcagcagagcggtggggcgtcggccgttaccctggtcggtgcaagtggccacctgttgaccaaccaaggcacgatcagttcggtgggaggtgtggcggtccagctcggtggcggcagccgtgtcgagaattcgggcagcatcagcaccggcaacaacaccgcgctgcagttcgtcggcgcaggtgacagcgtgctggtcaaccgcggaacgatcagcgggcgcaccggcgtgcagttcgattcgggcaacgaccgcctcgagatgcaggccggcagcatcagcggcggcgtcctgcaaggggatggcaacgatgtgctgctgctgggcaatggcaccattgacagcgttgaccagggcagtggcgatgaccagatgaccgtcaccgtcggcaccgtcaccggcgtggtggcgcagggcagtggccgcgatgatttcgtcatgagtggcggcacgatcggcgcgctgcagcagggcgacaacatcgataccttccgcatgagcggtggccgcatcgtcggcgcgttcgaggatggcgaccaggcgtggatgaccgctggccgcatcggccgcgtcaacatgaagctggacaagaacctgtgggaccagtccggcggtaccgtggacggcaacgtggtgaccggcttcgacaccgacaccatcatcatttctggcacggcctatatcggcggcaacatcagcgtcagcggcggcaacgacagcgtgaccatcaccgacggcaccgtgcgcgggcaggtactgctcagtaccggcgatgacaccttcaactggagcggcggtggcattgtctacggcgcgatcgacatgggcccggacaacgacgtcgccaacctcggcaacctcaaccagggcaacctgggggcggtgccgctgttcgacggcggcagtggcatcgaccagctcaacctcagcaacgtcaagacggcgggcgtgggccgtttccagaactgggagacggtgcggctggccaacagcaccgagctgagcttcgatggcgatctggtgctgggcgacagtgttaccggcaccggcacgctgacggtggatgacaccagtaccgtgtacgcgggcagtggggggcatgcgatccgcccgttcaatagcgctgcactggtggagatggtcaatgccgggcgcatcgacttgaccggtaccggcgcgggcgacgtgttcaccgtgcgtggcaactaccgcggtgacggcgggggcctgtacctgcgtaccgtgctgggcgcggacaactcccccagcgatcgcctggtgattgatggcggtaccgccaccgggaccaccggcatcggcgtgctcaatgccggcggcagcggcgcggccacgctggccgacggcatcctggtggtgcaggcgttgaatggtggccgcaccgcgccgggcgcgttctcgctgtttgcgccggtcgcggccggtgcctacgaatacttcctgttcaagggcggtgtcagtgccggcaccagcgagaactggtacctgcgctcgacgctggtgaccggcccgacgccggcacccaacggtggtggcagcgccacgccaccgccgctgacgccgccggtggcaccaccgcccccgattaccccggcaccgccgccgccgccggaaggcgccaccgatccggacctgaccgcaggcgagaccgcaccaccaccgccaccgccggaaccggcgccggtggcaccgcccagcgatccggcggtgccggacgtgcccgtggccggcggtgcattgcccggtaccggtgcaccgccgacgccgggtgcacggccggccgaaggtgcggtggtaccgctgtaccgcgtggaaaccgccgcctacacggtggtgccgccgctgctgcgcgagacctcgctggccagcctcggtaccttccacgagcggcagggcgaacagcgcctgctgtacaaccagggcgcattccgcaccgcctggggccggttggtggggcagagcagcgagatccactggaagggggatgcgcagccgggcttcgatggcgatgtgatgggcctgcaggccggcatcgacgtatgggctgcggcgtctgatagccatcgcaaccagatcggcgtgttcgtcggccgcacccgtgcgcagggcaagaccaccggcctggcactgggctgggagaatgtgcaggtgggccagaaccgtttggacgacaagcacgtgggcctgtactggaccttcaccgacagcagcggcgcctacatcgacgccgtggcgatgcagagccgctacgacggccgcgtgcgttcctcgcgcggggtcggcttcggcctgagcggcgacggcaccagcgtgtcggtggagggcggcaagccgctgctgcatgtcggtcagtccgcatggtggctggaaccgcagctgcaggtgatctggcagcgcaccgcgctggacgaccgtcgcgatgaagtatcgagcgtgcgcttcgacaacgacaacgcctggaccggccgcatcggcctgcgcctggccggtgattaccagctggccgacaacggctggcagccgtatttcaagctcaactactggcacgggcgttccggcgaagaccgcatccgtttcgacggcgacgtgatcgtcaattcgcagcgctcgcgcgcgctggaagccggcgtgggtgtggtcgggcgcttcaaccgcaccatcagcgcctatgccgtggccgactacacgcgggagctgggcggcgaccgcaacgagaagcgccgcatcatcgaaggcaacatcggcctgcgcgcggactggtag

SEQ ID NO: 501742 - DNA, 1485 bp, Stenotrophomonas maltophilia
atgagacctctaaccaatgcagccctggccaatgcagcctactccccaccgtcacatccagctccaggcgataaggaatcgctgcgcgttgatggtgaagacttcgaagttctagggcgacgtgacgcagtcagcggctatcaaggcgttgtgtaccggaacatcaagaccaacgagatcatcatcgcccatcgaggcaccgagtttgatcgccaggccatacttgatggcggcgtcgacgcagcgatggtcagcgccagagtcaacgcacagattgatgatgcgctcgtactgaccaagcaggcaatcaagcaagctgaggacaacggatatggtccggtgtacgtcactggacactccctaggcggcgcactcgcgcagatcactgcccaccactacaacctccctggcgacgccttcaatccctacggcgctgccgggctggcgtatcgcctgcctgaaggccagccggccagtgcggcgcccttcaccaaccatgtgatggcgggcgacctggttagtgcggccggtcctcattacggcaaggttgagatgtacgcactccccaaggaactgggagtcctgcgcgatgccgagcagggccagcgcatcgcctcgctcggatcgcttgggatgaaaagcggccatgtcatgtccgctgcgattgcggtccagttgggtgattcccatcgaatggttcacttcattgaccgtatgacggacaagggtccagtgcagtccgtgctggacgaccccgaggcgcggatcacagatgccgaggacctgcgccggatagcggagtatcgcaaagacatccaccagttgcgcctgggagcaaccgtacttgtcggtggtggccctggactcctgcgcgacggggtcaattaccttcgcggcaccgaggaagccggagcatacgcccgtcgcgaagccgaagccgtgcagcgcgcagaaaacgcattgaaaccaggggagcgtttgctccaagaggcaaccgaaatgggctcgccctctctgagcaacccaggcttcactcccaagagctcattgcaggagagcatcgagtcaaccttggacaaggcaggcctggatcccagaaaggaaggccaccccgaccatgcgctctaccggcagattcgcgacggtgtatcggccgtggatgccaggcacgggcgcagcttcgatgaaaccagtgagcgtgtgacggccggcctgcttgcaacggcgaagcgcagcggcctggaacgcgtcgatcatgttgtcttgggcaacgctcccagcgatggttcaggccctcgcatgttcgtcgtgcagggagcgctcgacaatccggcgcacctgcgggcatcgattgcggtcagcgaggccgtcaatacacctgcagagcagtcgctcgccaaggtcgagcagatttcgcaggcccatcaggtcgctcagcaagagcaaacccaagagcagacccgaacagcgatccgcatgggctag

SEQ ID NO: 501743 - DNA, 264 bp, Stenotrophomonas maltophilia
atggatgccgcggccaagcccccagggatgggtttacggcgtctcccgcaaccggacccaccccgccatcccacggatagcccgctgttgctgttgctgttgctgttgcttcggctgcggccgttgcctctgcgggtgcagggcgcagccctgcagacaccccccctgagcattccacgcagtggtttgagcgccgcgcacacgccggccacggcacgctatgcggcaacggaatcgtccgtcgcccaccgagaaccatcatga

SEQ ID NO: 501744 - DNA, 663 bp, Stenotrophomonas maltophilia
gtgagctccaatcacatgcccagctccatcatacagatctcacatctgatcactgcaacactactatgcatgtgctgcgcaggatgtacagatgacagagcatcagatgccaacaccactctcaatacgagcgcggcagacgcacaaatcaatcaagtcagatcgagcgatctcagcacacagcctttggttgtgcgatcaagaacagacaactcgacagcgacctcccgtcccgtagcatcctcactcgagtatcttcaatcagaatctgcactcatcttcgagggcggaatctcaagtcaagttgccggagacctcctacgctccggcagaagcacatcagacgtgatcgaccgcatgacccaggacgctgcaaccagcactgaggcacaggatctagccaagcactatcgatcctcaataacacgcgcgatgggtgaggacgcccaactggagcgtctgtcatgcggccttagcatctgcatcggcgtcgctcgggccaaaagcaatgccgaccatgaagcctggggccgcaggcttgcgtcagaccaatcctctcccacctacagctacgccgaagcctctgagaatcttggctctggatacgagaacagattcatattctccaccgatccagtaatgaattcgatcagcggcaactaa

SEQ ID NO: 501745 - DNA, 309 bp, Stenotrophomonas maltophilia
gtgaaacccagctattccaaatcgagccttgagccggtcgtcgtcacccagctctccgcgtcgaagctccaggtccagttcaatgaaccgatggaaagcatgtattacgcggcagggatgagctatgtcgtggaaggggacaccatgaaagtcgttgttgatcgctgccccatatccggccaatgcacaaccatgctgcggcgcgacgtgaagcccggacctgctggcccggcccgtcaggaaattcccttgatggcgccgcgcgtggtgatgctgtacgccgatggcgaaacacagatttttccgtaa

SEQ ID NO: 501746 - DNA, 882 bp, Stenotrophomonas maltophilia
atgagcgacaaggtcgtcctcggcatccatagtcacgtagatcccaatacacaggggtcgttcaatcagttcgtggacggccacgcctggatctcggtgacgcgaaacggccatacgacgttccatggcctgtggccagacaaccatccactcgttgaggacaatggcccaggttcggacatccgcgaaggcatggaagcccgggccacaccttcggcctcacgctattacgaattgactcccgagcaggtcaagcgacttgaccaggccttgggcgaaaatgtcacctggtcatatggcaatacctgcgcatcgtgggcgaccagtaccgtgaacaaggttaccgggcagtccctggatgcaggcgaactgctgttcaccgatacaccgcgggagctgatcgagtccattcgcaaggcagagcgcgtgcggcccaccagtccttcgcagccgcaaccggcaaccgaacggccggaaaccagcatcccatcgctgagcgatgcctcggcatcgcttcaccagcaggcactcgccggcgtccacgcgctggacgcatcgctgggtcgcgcatctgatgaatccagccaacgcatggcggccagcctcacccaacttgcccgggcacaaggtctggaacggatcgaccatgtggtattgggcttgccggctggtcagcccccaaggccggagaacatcttcgtcattcaaggagccttggatgacccgggccatctgcgtgcccacatcaacattgaaacggcccttcagccacccgttgcggagtcgctgcggcagattcatcagttggacaagcagctggccgcctcgccgcagcaggccgagcctgccctggaagagacccagcgccggcagatggtgtga

SEQ ID NO: 501747 - DNA, 822 bp, Stenotrophomonas maltophilia
atgcagactgcaaaggcggtatggccctgggtgctgggtgtggtggtgatcggcggcgcgggcggttggttgttccgcgatcagctgaagcacctggcagatggtgtttcggtgccggtgcagtcaactcccgtcagcaccagcgcagcgccacaaccgcaggcggccgcggaaccctcgccagcaccgccgccgatcaggcatccgctggataccgaggccgccgccgacccggcgctgccgaaactagctgacagcgatgccgcggcctggggcgcgctgagccaactgttccagggcgaggggccgctgaccctgctgctgcgcgatcacctgatccagcgcctggtcacccaggtcgacaacctggacaagccaagcgtgccgccgacggcgctggccgcacggccgctgccgggcaacctgcaggtcgagcctggcgagggcggggaacgcatcgcggcaagcaactcggcacgttacgcgccctatgtgcaggcgttcactgcgctggatccggcggcaacggctaccgcgtacaagcggttctatccactgatccagcaggcctatgtggacctgggccgacccgacggatatttcaatgatcgcctggtcgcggtgatcgaccatctgctggagaccccggaactggcgcaggcgccgttggtgcagcgcgatgagcgcggtcgctaccgcttcgtcgattccaccctgcagtcgcgctcgataggccagaaggcgctgttgcgcatggacgccccgcaggcgcgggcagtcaagcagcagttgcgggcgctccgctctgcgatcacccgctga

SEQ ID NO: 501748 - DNA, 1731 bp, Stenotrophomonas maltophilia
atgaacgccgtaaccaccgccaatctcgtcggcatcactggcctggcccgtcgcctggtccaggatggtgcgctggacgaggcttccgcccgcgacgcgatggccagggccgctgccgcccgccagccgctgccgacctggttcgcgcagaacaaggtggtcggggcggcccagctggcggccgccaatgcggtcgagttcggcatgccgctgttcgacgtgtccacgttcgacgccagccagaacgcgatgagcctggtcagcgaggagctgctgcgcaagcacaacgtgctgccgctgttcaggcgcggcggcaagctgttcgtgggtaccagcaacccgacccattcgctggacgagatcaagttccacaccaatctggtggtggagccgatcctggtcgatgaggaccagatccgccgcacgctcgagcaatggcatgccagccatgacacgctgggcgacgcgctgggcggtgacgacgatggcattggcaacctggatgtgtccggcggtgacgaggacatttccggagccggcgacgccggcatcgacgccaagggcgatgacaccccggtggtgaagttcgtcaacaaggtgctggtggacgcgatccgcaagggcgcctcggatatccacttcgagccctatgaagatgactaccgcgtgcgcctgcgcatcgatggcctgctgaagatggtcgcgcgcgcgccggtgaagctgaaccagcgcatcgccgcacgcctgaaggtgatggcgcagctggacatcgccgagaagcgcgtgccgcaggacggacgcatcaagctcaacctgtccaagaccaagcagatcgacttccgcgtgagcacgctgccgaccctgttcggcgagaaggtggtgctgcgtatcctggacggcagcgcggccaagctgggcatcgacaagctgggttacgaaccggaccagcagaagctgttcctggaggccatccacaagccgtacggcatggtgctggtgaccggcccgaccggttcgggcaagacggtgtcgctgtacaccgcgctgggcatcctcaacgacgagacgcgcaacatctccaccgccgaagacccggtggaaatccgcctgcccggcgtcaaccaggtgcagcagaacaacaagcgcggcatgaccttcgccgcggccctgcgctcgttcctgcgacaggatccggacatcatcatggtcggcgaaatccgcgacctggaaacggccgagatcgcgatcaaggcggcgcagaccggccacatggtgctgtccacgctgcacaccaacgatgcgccgcagaccatcgcgcgcctgatgaacatgggcatcgcgccgtacaacatcaccagctcggtgacgctggtgatcgcccagcgcctggcgcgccggttgtgcaacaactgcaagcgcccggccaacctgccagagcacgcgctgctggctgaaggctttacccaggcgcagctggacgcgggtatcgaactgtacgaagcggtcggctgtgacgagtgcaccgagggctacaagggccgtaccggcatctaccaggtgatgccgatgaccgacgagatcgccacgatcgtgctggctggcggcaatgcgttgcagattgccgaggccgcgcagcagatcggggtgaacgatctgcgccagtcggcgttgaagaaggcggcggcgggcattaccagcctggccgagatcaaccgcgttaccaaggattga

SEQ ID NO: 501749 - DNA, 1224 bp, Stenotrophomonas maltophilia
gtgagcagaatccatgtgagcatcatcggcgccggtctgggtggtctggcgctggcgcaggcgctgaagcgcggcggggttgcattcgacgtgttcgaggcggacaagacgctcaactcgcggccacagggctatcgcatccggatcgacgccgagggtcaacgggccctggcgcgaacgctccccccagaactgtacgatctcttccgcggaaccgtttcgacaacggcgacatcagggcgctttctcacgccaggtttgctgcctgccccgggccgcaagcccgatagctggcgctcggccgacagcgtggacgaaggcgcacaggggggcggggacgtaagcgtcaatcgacgcaccctgcgcgagatcctgatgtgcgggatcgaagaccgtgtccatttcgatcgcgcattcgatcgctacgcattgaccagcgatggcagggccgaagtgcgtttccggtccggtggtcctgcgtcgacatgtgacgtgctggtaggtgcggacggtgtcaattctcgggtccgctcccagctggcgccggatgcgcagccggtggataccggcgcagtctgcatttacgggaaagtagatctggaccggttgggcggcaaccattcacgtctcgaaggaaccactatcgtctttgcagacagattcgccgccatcttcgatcagatgcagtttgaccggcacttcctggagcatgcctgcgctcacctcagctgcagcgtcacgcccacacctgactacctctattggtgcctgatcgggcgcgctgaccgcttcggggtggcgtcggatcatcgatcggatccggatcacatccgcaaggcgatagtggctgcgaccgatgactggcaccccgatcttcgggaaatcctgcagcagagcaaggtcggggacaccgcgatgctcccgatccgcagtgggcgtcctgaagtgccatggccggttgggccggcaacgctgctgggcgatgctgtccacgcgatgacgccagcaggtgggttgggtgcaaacactgcactcgccgacgcggccgctctggccgagctgatgctggacgccgaccgtggcgcgctctccatttcgaatgcgctggcgcagtaccagtcggatatgcgtgagagggcccggcatgcggtggatatctccaaccgaggtgcggacagactgttcgggcatgcggtgcccgaacattgccacagtgcccgctga

SEQ ID NO: 501750 - DNA, 828 bp, Stenotrophomonas maltophilia
atgagcaatggcgttacaggcagcacggcagacttcagtgagatgcctgacggcccgcttctcgttggcctcaggggagacgacagcccggcacatgagttccggctgggaacgcgcgaatacgactggcaccagcatgtgcgtggccagttgttctgtgttgaaaccgggttgatccaggtcaatacaccgcggggctcctggcttcttcctccctatcgcgcagggtggataccacccggtgtgcgtcatgaggttcgcgtgagtggcgcgctgagtggctggacgttgctgatggcgccctcgttctgcagcaacctccctgcaacaccctgcgttgtcgcaatcagtgacgtgctgcgggcactggcgcagaggaccacggaatgggacaagcgcgcttcgttgacgcctgagcaggagcgcatcgccacagtcattcaagacgaaatccgtcgggctccgcacgagtccttgcatgtgccgatgcccagggacccccgccttcttcgcgtggcccgcgctgtcctgcgggatccgggaaatccccgcaccctcgaggcgtgggcatcgtccggggcaatgtcatcgcgcaccctgcgccgcctgacgcttgctgagaccggattgagtttcggccagtggcggcaacaggtgaagctgatgcacggtctggagatgctcgcgcggggcgtcccggtggcggaggtttcggatgttcttggctattcttcgccgagcaacttcattgcgatgttccgcagagcctttggcgattctccggcgcgctacttctccagcagaaatcagcatggcgccttccgctga

SEQ ID NO: 501751 - DNA, 459 bp, Stenotrophomonas maltophilia
atggaattcaggcaactgccggcagatgcgccggaacggatgcagctggcgcggtggtacaacgcacagtggggtggaaacgccggaatgtcgctggaacaggaaatccagtggctgaaccgggagcaggacgctgaaggatttccgcacttgattgcagcgttcgacggcgaccaactggtcggcgccgtccagctgaagcgccgggaactggcgtcattcccacagtacgagcactggctgggcagtgttttcgttgccgatacgcatcggggccaagggctggcgggcaagctggtcgagcaggcggcggcgcaggcaatgcgcatgggcgtctgccatctctacctgcagaccgaagcgctggacggcggcctgtacgccaggctgggctggacaccgttgcaggagaccgataacaagaattatcgcgtgctggtgatggtccggaatctgtaa

SEQ ID NO: 501752 - DNA, 2418 bp, Stenotrophomonas maltophilia
atgcgtcatcgctaccgcttttctcaacccaagctgctgccgctggcccatggcctgctggctgcgctggccctgatacctgctgcaaccacgtttgcaggtgacttggacggcaccacacataccgttcgggcaggcgataccgtcgaagagtggaccctcaagaacgacgcaagactctgggtgccggacgccgagacccagaccatcaccgctgacagctcctacgtctacaccggcggctccaccatcacccgcagcggcagccatcagtacgccgtcgacctttctggcacggccaagctcgagtccgaacaaagcacactccgtggtggcggcgtccgtgttggcggcgcctcaacggtgcacatggttggcaatcgcgtgctggtgactgccgcagacggcctttcacccactgaatcactcagcatcggcctctcgatgggtagcacgccggccagtccgccgttgcccggtgcatgggccatcatcgattccacctacatgcgggtggaggacactgccgccggcagtgatatcgccagcggcctgggcgtgcgcatggagaacggcaaggtcagcatcgtcaacgggtcgcgcatcgatgcagacaacgtgggcgtactgatgtttggcacgcgcaacacccccgacacgctgcagctcttcgtggatggctccacgatcgcgtccggccgtggtgccgccatccgtgttgcggcggaccagcctgccgacttcgtcatcaacgtcagtaacggcgcacagctgcatggcggcaacggcaacctgctgcaggtcgattcccgcaccggcagcgctacgccgggggccagccacgtgaccttcaacgtggatgatgcgcggcttgcgggcaatgtcagcttcgacgcagcgactgtcgacggcaccctcgatgtcttcctgcgcaacaaggcacagatcgacggccgcttcttcaacgtcagctcggccagcatcgacggcgacagcacctggctgatgaccggcgacagcactgtcggtcatcttgcgctgggtagcaccggcacggtggcgctgggcaatggcagtacgttcaacacgctcaccgtggacaccttcgatggcgccggcggcaccctgctgttcaacacccagctgggtgacgacagctcggccaccgacacgctgatcatcaagggcgattctaccggccaagcgaacgtgcgcgtgctcaatgccggtggcgcaggcgccaagaccgacaagggcatcgagctgatccgcgtgggcggtgcgtccaatgcgcagttcgacctgcagggccgcgccgtgggcgggcagtacgagtacttcctgttcaaggacgcgaccaacggcggctggtacctgcgctcggaacttgccggcacgccggacccgtgcctggtggatcccacgctgccggagtgcacgccggtcgatccggtggacccggtcgatccggtcgatccggtcgatccagtcgatcccacgccggtactgcgcccggaagccggcgcctacctggccaaccagttcgcgatggaccagctgctgcgccacggctggcgcgaccgccagggcggcaacacctccgccgttgatggcgtgcgtggctgggctcgcgtggatgccacgcagagcacgctgtcggcggtggaagaccagctggacctgcgcgtggaccgctcgcgcctgcagctgggtgcagacatcggcgtgttcgacaacggccagggccgcgtcggcgtgatgggtacgctggccaagtccgatgctgcttcgcgttcgcagctgaccggctacagcgcacgcggcaaggtcaacggtgacgcgctgggcgtgtacggcaactggagcactgatgcactgtatgtggatgccagcgcgcagcgcggccagttccgcaaccgcgtgcagggcgaaggcctggccgaagagcgctacgactcggacatctggcagagctcgctggaagccggctatcgcttcggcatcggccagatcggcagcaccgcgctgagcctgcagccggaactgcagctggtctacaccgacgccaacaccgatcgccacgaagaaaccaatggcaccgtggtgcgcagcctgggcgacagcggcctgtccggccgtgtgggcctgcgcctgcagggcgaaggccgcagtgccgccggtgcgtcggtcagcccgtatgtggtggccaactggtaccgcgatggtgccagcaacggcatggcgttcgatgatgaagcgctgacggccggcgtgccgcgcaaccgctacgagctcaatgccggtgcgcgtgtggacttccgctccgggttgagtgcctggggtggcttcggcgtgatgcgtggtgaccatgggtaccgcgaagccacggccaatctgagcatgtcgtacaagtggtga

SEQ ID NO: 501753 - DNA, 192 bp, Stenotrophomonas maltophilia
atgtttccggcgccgctttctttcacgcgccgcaacgcctctgtagagtcgagccatgctcgactgctctactcgcctctagcggtcgacatcgtagatcgtgcgaaccagtccgtcgtctgtcgcatgactaccccgcaccacaagctgcagctctgcttccataccaccgaacaaaggccccccgcttag

SEQ ID NO: 501754 - DNA, 261 bp, Stenotrophomonas maltophilia
atggtgcgaaccacctatgagactgtcatcgggtttgaggagtggccgtttgagggcatgcaggttgtcgtcctggcgactcgcagccagatcgatgacccgcgtgtgcgagtggcaggttctgtcgaggatgcgagtcggctccttgatgctctgggcgcccaggacgtgtacatcgatggtggccgcaccattcaagcctttctgcgtgcggatctggtcgacgagctcacgatttcggttgctcccatcgtgctctaa

SEQ ID NO: 501755 - DNA, 549 bp, Stenotrophomonas maltophilia
atgaaatgcgcgacccgccttctcctgctcctgtctattggccttctcacggcatgtgatgccctcccacatacgcgcggctacatctatccgaatgaccgctacctggaagaaaacgtagcgaagtggaacagcatggtcgacacggtcaatacgtggaacgacagcccatgggcagaggatttctatgaggcaattgataacggggatgacctatccaagtttcgctttcgactgcagaatgcacacaaggatgccatcgagagacgaacagctgcagagcgcatgacacatcgctccgaggcagcggatctgcaccagcatctactcacatcactacatagcgtcgaagacatgttctcgatcatggtgaccctggcagagctgccagaaggctacaccactgagcaatccgcatcgattctggctcgcttcgaacccgccatcgagcgcatggatacagaccttcagaagctgagtgacgcacaagacgcctttgccaagtcagagaagatccagctcacgacaagcgatcccaccagtcgctag

SEQ ID NO: 501756 - DNA, 270 bp, Stenotrophomonas maltophilia
atgcagcccgtgaagttcaacgtgctttgcttcagcaggttgtcgcccaccttcagctcatcggccttcacgttgtccaatgtgatggccggtgccgtcaacgtacaggtgccgggcaatacgcggccggaaatggtgagcgtggcggccgctgcactgccgatgggcagtgacagcgccagaagggtgaatgaaggtaacagcaagcgtttcatcgggcactccagaagatcagtggatagatgggctggcgccagccagctcgggtga

SEQ ID NO: 501757 - DNA, 2520 bp, Stenotrophomonas maltophilia
atgaccaccgttcgctcctgcgcgcgtttccgcgcactcgccctctcccatctgccgtgcgcgattgcaggggtgctttccatctcgcttccgtttgcagccgctgccgcaccggccatcgagttcagcgaaggattcctgatcggcgggcagtccatcgatatgcgccgctacgcacagggcaatccggtcgaggaaggccagcaccgggtggatgtgtggatcaatggacagttccaccagacccgcgacgtcacgttcaaggcgtcagagggcgaagcccatgcgcgcccgtgcctgcctgcagacctgctggatgcactgcagttgcgtgaggaacaccgccaggcctttcacgcacaggtggccgacgtcggctgtatcgatctgccaaccgccatcgagggcgccaccgcaaccttcgacgacagtgcgctgcagttgcagctgaccgttccgcaggcgatgcaggcacggcgtgcgcgtggccatgtgccggctgaacagcgcgacgccggaatcacggccggattcgtcaactacaccgccaatcactaccggagtacccatcgcgacagcagctacgtaggcgtgagtgcgggcttcaacacgggcgactggcgcctgcgccatcgcgcttcgttcaatcacagcagccagggctcccgctatcgaaccatcagcagccatctgcaaagggatctgccagcgctgaacagccagctgttgctgggcgagggcaataccggtggcgagctgttcgacagtgtcccgttcatgggggctcgtttgtacaccgacgaacgtatgctgcccgactcgctgcgtggctatgcaccggccgtgcgcggcatcgccgagggcaacgcggtggtcagcatccgccagaacggcatcgtcatccatgaagtcagcgtcgcgcccgggccgttcgtcatcgacgatctgtacccgaccaactccgggggtgatctggaagtggtggttaccgaggcggacgggcgcagccagcggttcaacgtgagcttttccgccgtgccacaggcgttgcgcgcaggtacgtccaggttcagcgcgagtgccggaacgctgcgcgacgccggaggccgtctggcccatctccgtttcgccgaagggacctacgcacgcggtctcagcaatcacctcaccgcgttggggggtattcagatcgcgcagggctatcgcgctgcgattgccggtgccgctgtcaacacgccagtgggtgccgtcggcatcgacatcacccactcgcaggcagagctgcccggacgccccagcgttgccggcaacagcctgcggctgaactaccagcgctacgtggccagtaccggaaccaacgtgggtctggcggcgtaccgctacagtacgcgcggatttcttaccctgaacgacgtggcccgcgctgcatccgacgattggggctacgccggccgcgcccgacagcgctaccaggccaatctctcccagcgcctgggggcggcaagccagctgttcctcaatggtggtcacgtggctttctgggataccgcgcagcgccagaccgatttccagttcggcttcagcagcaccgtggggcgcgcgaactacggtgtttcggtgttccgctaccggctgggcaatggccgccctgacacacgctataccttcaccttcgcagtgccgctgggccgtagcgagaatgcgccgagggcgagcacccagatcagtcacgccagtggcgggcagcaggtgcaggcgggggtgagcggctacctgggcgagcggcgcgcgatgaactattcggtgtccagcacccaaggcgagggtggcaacagcagcagtgcctatctggattaccagggccactacgccaacgtcaacgccgcctacagccgcgcgaccgggcacagcagccagaccctgagtgcttccggcgcgctggcgctacacgccggcggcctgaacatggggccgccggcaggcgacggtttcgcgctggtgcatgcaccgggcgcagaaggcgcacaggtgggtacgggtgtggatatccgcgtggcacgcaacggttacgcgttgttgccgcacgtcagcccctatcgctggaaccgtatcgatctggacccttcagggctgccactggaggtggaaatgctgcagacctcgcagcgtgttgcgcccaccgccggtggcatcgtgcgcgtaccgttcgaagtgcgccgcgagcgcaccttgttcatcgatgccaccgatgcattgggccagccactgccgttcgccgcacgcgtgcagcgcgaggatggcacgcctgcaggcgcggtggggcagggcggtgtcatccagttgcgtggcgcgccgcccgaaggcgcgctgatcgttgacccggacgggccgcaacgctgtcgcctggcctatcaactgcctgatgcgcccgatgcctacggcctttcgtgggcccaggccacctgccaaccctttgctgactcacccgagctggctggcgccagcccatctatccactga

SEQ ID NO: 501758 - DNA, 996 bp, Stenotrophomonas maltophilia
atgaaatcccctctgccacgaccgctggtgcttcccgcactgctcctgtcatgtgccgcgctcgacgctcaggccgcttgccgcctcctgggcggagatacgttcatcgaccacgagttcgatgtggccttcgtgcccgaccttcatcgcccactggcctcggtgcagggaaccctgaagttcgcctgcgactccgcaggtgagacgcagggcaccatcgtgcccagtctgctggggctgtcctatgtcggcgacgtctacaacgaagcaaatacggcgatgacagcggcgtacgcgatggggccggaatccgcattgctgatgttccgattcgagtcgctgtcatacatggattgtctcccgggagatgactgtcccattgatgagggtcaggcaggcggctactccctgcgcgacggcaggggggagccgttggaccgcatgggcaacgggcgcgagggagaggttctggtctgggtggatgtctattcgcggggtggccagatggtgtccacgcccaagcgttcgatcggatcgacggcaacgatgcagtcgggcaacgtggggcgccaccatctgaacatcggggtgcgcttcaaggcccagacctgcgcggtcactccccagtctgtaacgctcgacccgatcgacgcccgcacgctggatcagcaacagagtgcaggcgagaagtccttcaatgtcgcggtcaactgcggtgccagcggtcgcccgctggtgctggaaatgagcgacgtgcacgacctggccaacaccggcgatgtcctgtcgcccgcgccgggctccaccacaaccggcgtggcgctgcaggtcctgcagggcggtacgccggtgcgcatgcagcagccctggagctacggcaccaccaccggcacggtcatgtccgtgccgttcagcgcccgctatctgcgcacgcctgcggaacttcgcaccgggagcatccttggcgaggtctcgctgctggcggactactactga

SEQ ID NO: 501759 - DNA, 516 bp, Stenotrophomonas maltophilia
atgtcgatcaaactgaacctgctggcgctgtctgcgctggcgatcatggccgcgcctgcggcccacgccgaacagctggaaatcaccggcgaactgatgacctccacctgcagtgtcggctccgcaggcggcaccctcaccgtgccgatgggcaaggtggacctggcatcggtcaatgccggtacccgtgccggccagaagaatttcagcattgccctggactgcaccggctcgggtgcggcgcaggaagtcggggtgcgcttcggtggcacgccggatggcagcaccggaaatctggctctgactgctgcttcgggcgcgagcaatgtgggcgtagcgctgtatgacgccgcgggcaatcaccagaagatcggtgatgacccgacccagtgggtgaccatcgccgccggtggcactggccagctggactacagcgcgtggtatgcctcgccggcccagaacgctacggccggcaccgccaacgcgtcgggcgacttcgtggtgctctacaagtaa

SEQ ID NO: 501760 - DNA, 723 bp, Stenotrophomonas maltophilia
atgaaactccgcccatcgttgtggttgccggctttgctggccatcgcgcttgtgctgccggcgcaggctgcggtaaccctgcaaggcacgcgcatcgtgcacgacgccagcaaaggccgcgatgtcacggtcaaggccagcaatgtgggtgaacaacccgcgatgacgcaggtctggatcgacgctggcgacagccatgcgcgtccggagaacgtgcgcacgccgttccggctgacgccgtccgagccgcgtctgctgcaggccaagcagggacaggcctaccggatcacttatgcgccgcggccttcggaagcgccgctgccgactgatcgcgagtcggtgttctacttcaacctgctggatatcccgcccaagccggccaatgccggcgaccgcaacctgctgcagttcgcggtgcgcacgcgggtgaagctgttccatcgccccgccggcctgccgggccaggcgcgcgatgcgccgggccagctgcagtggcgcatggcggcaggggcattgcaggtaagcaatcctactgcctatcacgtgacactgacttcgttgaccttacccgatggcagcagggtgccggcggacatgatcgcgcccggtgcacaggtacggctgccgctgccagccggtgcttcggtgccgaacagcctgacattccagtggctggacgactacggcaccacgcgcgatgcccaggcaaaggtcattcactga

SEQ ID NO: 501761 - DNA, 1890 bp, Stenotrophomonas maltophilia
gtgtcccagccgattcttcccgagcgcgtcggcggcgcgcgccgtgccttcttcgagcgcggtgcagtgccggctggcgtggtacccgacgccatcctgcagtcgtggcggcgctgccagcgccagggcctatcggtggatgcacggcccgacgtggcgccggtgcccgaaccctccctgcgcgaactgcgccagcgccgcgagcgcctgtggcggctggcccggcccgagctggaaggcctggccggctcgctggccagcagtgatggcatcgtgctgctcaccgatgaggaaggctgggtgctggatgccgagggcagcaacagcttcctggaccgtgccggccaggtcgcgctgatgcccggcgtgcgctgggacgaaggcaccgtcggcaccaatgccatcggcaccgccatcgtcgaaggccgcgccctgcaggtacgcggcggcgagcatttcttcgccccgcacggcatcctcacctgctcggccacaccgatcttcgatcccttcggccagcgcgtgggcgtgctcgacatttccggtgacgcgcgccacgcccatctgcatgcgctggcgctgggtcgccaggccgtggaccagatcgagcaccgttactttgccgacggactggacgactgcgaactgctgcacctgcatgcccagccgttgctgctgggcagcccgcgcgaagcgctgctcggcttccgcaacggccgcctggtggctgccaaccgcgttggcctggggctgttcgggctggaccggcacgacatcggccacgcctcctacgaggccctgttcgaccagccactcgcgcggctgcacgacgacggcatgctgctggaccggcagggacgcgcgctgtacggccacagtgaaagcaagcgccgcgcacgcgccggcagcgtcgtgcccgcacgcgctccgcgcgtggtccccgtggctcccgtgccggcggcgcccggcacggtgctggccacgccggtgcagcagcagttgcaccgggccgtgcgcgtgctcgatgccggcctgccggtgctggtgcagggggagacgggcaccggcaaggaagtattcgcacgcgagctgcaccgccgcagtacgcgcgccggccagccgctggtggcggtgaactgcgcggccctgccagaggggctgatcgaagcggagttgttcggctacgaggaaggggccttcaccggcgcgcgccggcagggcagtaccggcctgctgaggcaggcccaggggggtgtgctgttcctcgatgagatcggcgacatgccgttggccctgcagccgcgactgctgcgcgtactgcaggaacgcgaactgtcaccgctcggcggtggccgtccggtaaagctggacttcgccctcgtctgcgccagccaccgcgacctgcagcaggccgtggccgacggacgcttccgcgcggacctgtactaccgcatcgccgatcatgtggtgcacctgcccaccctgcgcgaactggacgagcgcggcgccctgctgcaggcgctgtgggcaccgatggcccaaggccgcgtactgcaggccgaggtgctggagctgctgcaacggcagcgctggccgggcaacctgcggcagctgcaggcctgcctgcgcaccctggtggcgttgagcgaccctggcgagccgatcactgcagcacacctgccggcggacctgatgagcacgccgctgtcgccgcaggtgacggccgcagacagcgcctgcgctgtccgcggtgggctgcgcgatatcgccgaggaggtgatgcgtcaggccctgcaggccgccgacggcaacatctccgcggcggccaagcagctgggcatcagccgcagcacgctgtaccgacgcctgggccggcccgccacgcgctga

SEQ ID NO: 501762 - DNA, 1542 bp, Stenotrophomonas maltophilia
atgaatgccgttgcttcaatcccgccctcgccctcaaccgacccggccggtcccggcacgctgttcaaaccccgctacgacaactacatcggtggccagtgggtggcaccgcgcagcggccagtacttcgacaacatcacgccgatcaccggcagggtgctcacctcggtggcgcgctccaacgccgacgacatcgaggccgcgctggatgcggcccatgccgccaaggaagactggggcaggcgctccaccgccgagcgcgccaacctcctcaaccgcatcgctgaccgcatcgagcagaacctggaactgatcgcgcgcgccgagacctgggacaacggcaagccgatccgcgaaaccctcaacgccgacatcccgctgatggtcgaccacttccgctatttcgcaggcgtggtgcgcgcgcaggaaggcagcctgtcggagatcgacaaggacaccgtggcctaccatttccacgaaccgctgggcgtggtcggccagatcatcccgtggaacttcccgttgctgatggcggcctggaagctggccccggcgctcgccgccggcaactgcgtggtgctcaagccggccgagcagaccccggcctcgatcttggtgctgatggagatcatcggtgacctgctgcccccgggcgtgctcaacatcgtcaacggctttggcctggaagcaggcaagccgctggccagcagcccacgcatcgccaagatcgccttcaccggcgagaccagcaccggccgcctgatcatgcagtacgccagccagaacctgattccggtgacgctggaactgggcggcaagtcgcccaacatcttcttcgccgacgtgatggccgaggacgatgatttcctcgacaaggccgtggagggcttcgtgctgttcgcgctgaaccagggcgaagtgtgcacctgcccgtcgcgtgcgctggtacaggaatccatctacgagcgtttcatggaacgggtgctcaggcgcgtggccgcgatcaggcagggtgatccgctggacccggacaccatgatcggcgcacaggcctccgccgaacagctggacaagatcctctcctacatcgacatcggcaagcaggaaggggccgaagtgctgatcggtggcgagcagaacaccctgggtggcgacctggccggtggttactacgtgaaacccaccgtattcaggggccacaaccgcatgcgcatcttccaggaggagatcttcgggccggtggtagcggtgaccaccttcaagaccgaggaagaagctctgcagatcgccaacgacacgctgtacggcctgggtgccggcgtgtggagccgggacgccgcgcgcctctaccgcatgggccgtgccatccaggccgggcgcgtgtggaccaactgctatcacgcctacccggcgcacgccgcattcggtggctacaagcagtcgggcatcggccgcgagaaccaccggatgatgctcgaccactaccagcagaccaagaacctgctggtcagctattcgccgaagaagctcggcttcttctga

SEQ ID NO: 501763 - DNA, 243 bp, Stenotrophomonas maltophilia
atgatccaggtggcgctggcccaccacgatcgtcgccttgtcgaggacatcggagtagaactgctgctgcaatgggagtctccgcagcgtgtcgacatcactcttgatctcgtagccgtgcaggtggccattgatgacacacacatcgacccggcaggcgccgcgcgcaagccccatttcctccaccacaagcgtgtttggatttgcgacatgctcagcaatgaccttgcccagcagagctga

SEQ ID NO: 501764 - DNA, 1095 bp, Stenotrophomonas maltophilia
atggaacaaccgatgtacatgccgatcctcaaatggcgacagggtgagtatctcgcggtgggtcgtaccaacgaaggaatcaaggatgggatctatcctctgttcgagatcccgatcgagcagtgggacttcgagaacgatgcgccggccaagtcactcgatgaccacctgaagaatgtgggcagacgtctgagcagtaactggaagtcgcgccgctgcctgtttgattcgccccatcttgctggggacgacaccatggcggacggccagcatcatctggagcggatcttcgacctcattcgcaccgcgggatgccaagccagtcccgttaccggcattgaccggcacgtcgactaccaacaggcgatggcacgcatcgtcgcacgcgatgatcgtggctgcggattgcggctcgtgccggatgatcttgaaggagggcgccttgctcggatctccgggctgctgaaactgctaggggtggtatctggtcaggtggacctgatcctcgacagctcggccgatgtcgccgactcacccacgctgcaggcatcgacttggcaggcatggattgcggcggttccggatctggccgactggagatcaatcaccatcgtaggaggcagttttcctgccagtctgagcccctcttcgagctatcgcccacatggcgatgtgaatcgccgggaatggcgcgcgtacacgcggctagccgacatgcattctggacggatgccgtggtttggtgactatgcctgcgcttctccgcagacggaactgatggatccgcgcctgttcgaccccaacgccaagatcaagtacacaatcaatgatcagtggcggattgttgtgggtacccagatcaagcgcaatggccgcgaccagtaccgcgatctatgccagcacgtggtctccgatctgccggtggtcttcatggggcgcggctacagctggggcgatgcgtacatcgaggactgcgcaaaaagtgtcaccagtaccgggggaagctcgacctggccaacggtggcgaccaaccatcatctgactaaggttgttcgcgacctcgccagtctgaccggcgcttcaactgttccctga

SEQ ID NO: 501765 - DNA, 528 bp, Stenotrophomonas maltophilia
atggcgcttatcgccctggatgacccacgctgggccgaactgcagcatgcctatggggctgcggatgacatcccggagctgctcgccaatctcagtatcccgaaagacgaaagatcggaagacgatccgatcgaggacacctggcacgagctgtggagcagcctgtgccatcaaggggacgtctacagcgcttcgtttgcggcggttccgcatatcgtgaacgcacttctgcttcagtcaaaggcactcacgtttgacttcgttgggctgccgatcaaaattgaagttgagagacgagaagccgacatcgtgctcccggactttctggagccgcagtactcagaggcgctccagaacctcgctcgctttgccgccagcgtaatcctggagacgcatgatagaagcatgagttcagcgttgctgacatcgctcgcgttggcccacggcaataccggcgtcgcacgcatgcttgggcagataaccgcttacgaggctgatgaagcggtcgatctgttcctgaatcgctag

SEQ ID NO: 501766 - DNA, 300 bp, Stenotrophomonas maltophilia
atgaacaacgtgatgggaattgccctaggcgggatgcgtgcggcccagcaaggcgtgcaggtggccgcgcacaacgtggccaacctggcgactcccgatgcccagcgcgtgcaacagctgcgaagtgaggcggagcagggcggggtgcaggccgcggtgaccccggccggcgccgatgccggcgcgccattggaggacctgctggcggcgaaagccgaggtggtggccttcgccgccaatgcctcggtgatacgccgccaggaccagttgctgggttcgctgctggatcggaaagcctga

SEQ ID NO: 501767 - DNA, 531 bp, Stenotrophomonas maltophilia
atgaacggcgccaccactgattcccgcggtattgcccaggcctcgatcctggcagtactggccgcaggcatgctgcccgcgcagctgttcggcggcctgctgttcgcggtggacctggggcgtacgccggtgccggccctgaccggtggcggcctgatgttcgtactggcggtctgcaatgccattgccgtgctgctgccgatggcactgatcctgcagtctcagcaacgtctgcgccggatcggtttcgtgctggtcggcttcgggcttggcgccctggccatggccacctgcgcgtggccgggcgaggacagcggcctgttgctgcggcgcctgcgctacgtcgatacgttcgatgtgatcagccatgccctgcaggtgctggccgccggcggcttcggtgtggtcgccggattggccttccatgcggtgttccggctgtcactggaaggccgtccctgcgcggtccccggcggggcaggcgggcgagggcgcctgaacggccttcagcgtcctgccgcagccccctga

SEQ ID NO: 501768 - DNA, 651 bp, Stenotrophomonas maltophilia
atgacggtgcggcgcccccaaggacgacgaggacgagcgacgccggtggcagggcgacattttgatgatggtcgtggtcttcggtcgttctccgaccgggtcgccgtgcgctgccatcgttgcgatacgccgggctgggtggttaccagcaagacttgctgcaggacgtcagcgcggttccgctgcaccggttgcagtgcgtccctggatggcacggactgggtcggtgcgatgcgcctgcagggacatcggccgtgcggctactgcgggcatcaatggctgtgcgtcaatcggcacattgcatcgggtgtacccgcaccgaccacttttcctgctcgctgtgagcagtgcggacgaaccagtgatgtttcggtcacggcttccccgctgcgtgaagcagaggctgcagatccgcatttcggactgccgttgcgcttggtcgaaccgacccgcgcaggcttgctctgggcctacaacgccgagcaccttcaggcattgcatgactatgcggtatcggcgctgcgcgagcgcggcgctgtacacaatggatccatgttttcgcgcctgccgcagtggatgaagctggcccgcaaccgagtgctgctgcagcgtgcggtggagcggttgcagcggcgcttgctgcaggggtag

SEQ ID NO: 501769 - DNA, 300 bp, Stenotrophomonas maltophilia
atgccgcaacgggggttggattgtagcgtcgagccacgttcgacggctgcacagccagtggggcatggctcgacgctacagaacgcagcggcggaggcgctcttcggcgacaccatcaccatctacaccgcgctgtgcgaacaggcccgcgagaaaacctggcgcagcagggtcaagcacgcacggcggctgggtgccaacgcgaccatcggcatgcgctacgacgccaccgacgtgatgaccgggctgaccgaagtgctgtgctacggcacggcagtggtggtggaaccactgcgttga

SEQ ID NO: 501770 - DNA, 645 bp, Stenotrophomonas maltophilia
atgaatttgctgagcttgatcttcactgtgctcgcaacactggcgtcaacagagaatgcgaaggctggcagcgggaaatgggtgcacgctggcagcaacatcacactgcaatacgacggcgaggagaatggtcgctaccggaacctgtcggtgatgaagcagggcgagctggtgcgccgcatagcactgagcaagcgctcgtactctctgttcgagtacgaccccgagccggccacgtcccctgacggtcggtatgtgcttgtcactgacgtggaatccggggaggttggcttgacggatgggcgcggttctctgcatgaaaggcagtactgcggtttcatcgacacacgaagcggttgcctgcttgcgcgtcagaccgggcaattctgtggagggcaattcaatgacgctggcgcttgggtttctcccgcccttcctgacctgcacccctctgaggtgcgtcccactgcggaggactatgcctcagcccgcctgagtccctcggatgcacccgatggttccctcgacaatctgcttcgctgcgacccaccaggcccatgcaacagggaccactacgggaagctgatcgaggcggggatctttgacgtcactccctcgcagagaagggcactgtacggcgggtag

SEQ ID NO: 501771 - DNA, 594 bp, Stenotrophomonas maltophilia
atgcaggatccggccggattggcaagcgaccgccacgttgtgaaggcggtcatcagctcgaagcgtcagggcaacgttcagatcgaaaaaagatcacccctgatcaaggcagcgtgcggaacgaacaaggtctggctgtcctggaacaacgcggcaccaaacgcaacactggtgacctgcgactacggcggtaccgcgcatgacaattggggttggttgatcgagacgggactggaggacgatgagacgcgggtacgccgtttctctttgggcaaggtgtccagcgtcgcggagttcaagcggattggcgtacgggtgccggatactcttacctcgcatccctggtgctcaggcgacaagccgaagatgccattgaatgcggtatttgcaacgttggtgaagatgcccagtcagactggagatgcgccgtactgcttcatgccccacttcttcacgggaaacaaaggtgctcttttgcggaagattcccgcggcggacgaagtatcgccggatgttccgtggacagaggccggcccgatcgccagagagatcgagctcctgcgtgattggcggctggagtttgcgcctgagtag

SEQ ID NO: 501772 - DNA, 540 bp, Stenotrophomonas maltophilia
atgccttcgttgaatcgcattgtccttgctatctatgccggcctgtctctgctcatgctcgcccgacctgttgatgccagcgcaatctatggcgtcaaccacacccattgggcgatcaaccgtttgagtgtcgatggccgttcggccgttgacagcattggcccgcatcaaggcggcggtggagggtgctgttacatggttccagatcagtggcggccagggatgatggtacgggtcgattgggaaaccggggtagaaggctcaaagggatttcctggatttgcagatgagtcgaaatacgacgcctggctgcaacaaatcgaggcacaaaagaaaaagcacagcaaagtcgtccccgtcccggactacaccggccagaaagtctgcggcatcaccgtgcatttcctgccctgcgatgagattcaggtcaccacttcctgttacgcctacggcagccccgagtacccgatcaagattccgcttgagttgccagaaccgcagtcatgcccggcacaacgtaccgaccagcagaagacgtag

SEQ ID NO: 501773 - DNA, 216 bp, Stenotrophomonas maltophilia
atgggaaagcaaaagcccggcttcggccgggcttttgtcgttctggggtcatggatttcctggttgccggccagcggccggcactacccgtggttccgcatctcggaaggggtggggtcagagccttttcctttggaaaaggatccgaccccgggcctctctctggagcagagccctcttgttgttcaaggggcgcgccgacaggcgcggggataa

SEQ ID NO: 501774 - DNA, 516 bp, Stenotrophomonas maltophilia
atgcaaccgcgcaagaccgaactcgcccgaaccgcgctgcaggcccaccgcgcgccgctggacatgcgccagcgccggttgctgatcctgtgcgacggccagcgcagcatcaccgacctgaccgtcctgctcggccaggatgcgcccgcgatggtcatccagctggtgcaggccggctacctgagcaccggtaccggtgccgcagccccgccaccgccgccgccgccggcaacacctgccgcagcggcggccacagcgggcgagcgccgccgctcgctggtggctgcgcgcatctacgtgctgggcatcctggaaatgcaacgccacccgcaggcggcggccttgttccgcgacctgcagcaggcccgcgcggaaagcgacgtactgcaggtgctgcaatcagcgatgcagatgctgcccggactgacttcggtgggctattgccagcgtgtacgccaacgcctgctggaggcgctgccgttggagcactgcgacgcgttcgccgaggtggcctga

SEQ ID NO: 501775 - DNA, 567 bp, Stenotrophomonas maltophilia
atgaccacaatacgcagttatctcccgttgttggcagccatcctcaccgcctctcccgcccttgcggacgacgcccccaaggatgtagcaatacagcactacgcggaaaccatgcacataggcacgttcgaagccgcgcaacgaatggatgcggaacgggccgcaggtaaactcagcgcacggcttcagagggagaagccggagacgttcgccggcctttacatcgagcactcccctgaattcaggatcgtggtgaggttcaccggcgatgcctcacgccaactttctgcttacaccaaggaccgcctctacgtcgcagaaaccgcgccacgttctctcgagcttctccgcgccacccaagaggaggtgtccgatcagctcgtcaaggccggcattgagtttgcagccacggtaaacacgaagagctctatcgtagaggtatatgtacgtgatcccgatgccgtacgcgccagactgtccaaacttctctctgtcgccgacttcatccacataaaagagaccacaggtttcatagagccaacaaacaccgtagcgggcgggcggtga

SEQ ID NO: 501776 - DNA, 294 bp, Stenotrophomonas maltophilia
atgtcccgtatcacccgtcgtagctacaccgatgagttcaagcaccaagccgtggagctggccgagtcgctcgggccggccgcagcggcccgtcagctggagatgtcggtcaagacgctggcaaattggcttgacgcggtccgtgctggccggtcgttgacctctgaggctcgcaggccagccaccgacctggaaagcgagatcagccgccttcgggccgagaacgccaatctgaagatggagcgggaaatcctaaaaaaagcggcggcgttctttgccagagagtccaagtga

SEQ ID NO: 501777 - DNA, 840 bp, Stenotrophomonas maltophilia
atgaggatgagtacgaccgccggcgcctgcccggtgcctattcccaaacgatccatcacatccgggagagcgagatgcgctgctactgcgccgccaccctggagacagattcagggctgcccagctctcatggttcatccggagcagcgagaagtattccgcccgccttctggctcaaatggagcacctcggggccacggctgcgcaagcgctcccaactctgccggcggcactgccggcccaactggaccttttcgcatgaccgctgtgagccacatggcagacgccacctacaggttggacaacacactatgtcgtccacccaccctttacagaccacaggccaacgctgcgaagaatgtcggtccatgcggccgccgcttgcttcaatatgtcggccatgtccaagacttttccgtcggcgaacaccctcagatcggtgtatctatcgccggtgttccggtcagaagtggcaagcagctgaagtacagctaccggatgcgttgtgagcaaatcaggaaagcgatcacttctcgagtgcttgtaagcattgctaatcgtcctgcagatggcgagagatctgtgcttttccgccaaacccttggccaggacactgaacacgtggtctttgtcccgagtggagtgcctgatggtcacaccgagataccgggcgatttcatccaccagttgaggtcgttcttccgacacccattcccagaaccagtccccgatgtgccaagccgttacagcagcattgatcgcgcgaaaggtcctgaactcaggtcggctatcgagcatgagggtccggtcgaactcatcgatctcaaagttcaactttga

SEQ ID NO: 501778 - DNA, 195 bp, Stenotrophomonas maltophilia
gtgaaacgtctgacgaccatgtggggcaagaacaacttccgcggccatgagcagtccctgatcggcttctggatcaaatgctacagcccaatttggcgcattgaatatgtagatgcgccctatgaagtcaatggctcatgtgccgggccgaatcaaggcgtcgagcagctgcgcgctgcgctggccacgaactga

SEQ ID NO: 501779 - DNA, 615 bp, Stenotrophomonas maltophilia
atggtcgaggtccgactgttcattgctcgcttcggccatcgaccgatcgacaccctgcgcccgatggaaatggagtcctacaaggcagatcgcttgaccaaggacaaggtggcaccagagaccgtgggcaaggaggtgcgcaggctgcaggccgcgttccggcgtggtgtgaagtggaaggaactggacttcaacccgctggaggaaacccaggcgccgcgcggcgtccgcagcgtagcgatgcagttctacgaccgggccgcgatgcgcaagctgtaccgtgcgaaccccggtggggcgcctctgtggcttttcatggcccacacgggtctgcgccgcggtgagctgcttggactgggcaaggactcggtggcagggagcaggctcagggtcgagagcgagccagacgaagatggccaggcgcgcacgaagtcgggcaaatggcgcgaggtgccgctcaaccggtatgcgcgctgggcgctgcgccaccttcccgatccgctggtggcctgcacaaggacaccgtgtctgactggttcgcatccgatgccaagcgggcggggatcggcggcagcctccaccggctacggcacaccttctgcgcccacatggtga

SEQ ID NO: 501780 - DNA, 372 bp, Stenotrophomonas maltophilia
atgcacccacacttggaacacatcggcaccacccgcatcctgcgcgtcgacccgcagggcccgatgctcgatgccagcgccctgcgcgatctggtcggcgatgccctcgggcaccaggccgagtggatcgccgtgccggtgcaacgccttttggcggacttcttcgagctgcgctccggcatggccgggcagtggctgcagatgctggtgaactaccgcctgcgcttcgccgtactgggcgacgtcagcgcctaccgcgcacaaagcgcgtcgctggatgcatggatcaccgagtgcaaccgcggccgcaacggctgctttgtcgccgattgggacgccctgttggcaggtcttcccgtgtcggccagctag

SEQ ID NO: 501781 - DNA, 3975 bp, Stenotrophomonas maltophilia
atgggcgctagcacagatcgaccgggccgaggcaattcgcaactcatagggcaggacgcagctagtgcgttcagcgcgagtaggccccgaagatgggcaatcagtggtcagaacgaagctgattacggcattgactacctagtaacttctttcaaccgtgaagaagttgccgaacatatattccaggtacagcttaagggcaccaccaacagctcagcacgactgtcagacggaattaacttctcacactcgtttgatcgagcaacactgaacctatggcactctgcaatcacgccggtcgtggtcattgcagtcgacttcatagatgagcaagacccgaaaacagcgcccgtttactacaaatttataagccccgaactcgatgatctgctgacgggaatacctgaaaatcaggcaagtgcagtcattcgaattcctcgacgccagatcctcacaagggatcttgatctatccaaagaatttgatatatatctcaccgaatatcatgaggcgcgacgacagaatcgagagcgaattcatgccggcggggacagaatagcgcaggagtcatactctctacatattgctcgagacagcacaagatcgcgagatcaattattcgaaattgcagacgcaggcctcgaagaagtaataagtaccacctcgtcatcaggcaaattacaacaggcgttgaccattgttcgagatggcgatgtcaggcgcgcacttttcgaatctgagagcttaatcaacgactcatccctgactagcgatctcgagcgcggcattgcagaattcattcgatatcaatcactgtcgcttgctggaaaacacgctgaagcagatcaccatctcagtaacgcctccctacttgccccggaagtggacgccattaaaggagcgactgcacagaatgaacttgacgacattcctctaggtccgagcggagcaactttaagagtcgcgcttatcgaacgtctgagcagttcaacaggacccagctgccgcataattctgtcgaagctccacgcgttggagcggaatttttctgctgcaagggaatccatcaaagaaatttcgagcaacgcagcggctatcgcaagggtcacgattacaatcttagagggggactggccgaaagtaattagagaggttaccagtgcttcgaccctgcctggcctcaccaggctgcaggaactgactttggttatttttgaagcgcgcgcacgctttcagctatccatgggacagttgacatggcccgaagaaggcgaactgaccattcctcccagcggcattcagggtatggatctagaccaacttagcgaggcgcacgaactggctcgaagagcacttctaatagcacatggcctaacttggccagctgtaatcaactacatcgtcgatgtagttgcgatctcagcgatggcacttggtcgacttgatgcaatcatgccaacgcttgcttcactcgcccttgaacgtgcgcacgattatcagatacggcaaaccgtttcacggctcgcattgaattccgatcaaccagcgctcgtcattaagctaagggaaaaagcgggccctgcagcgcttaccgcagacgaggaactaacagtcggcgtggccgcttgccagatcggaaatccaactcttggctttaagtacgttggggccaccgatctttcggcactcccagatagcgacataaatctggcctcactccttatgattggcgccgcagcaaatgcagcgtctcggaatgacatatattccaagatcagcgagagactgagaaattcaaataactctatgatttatggagcgatgctcgatgcaactgtggcagtaagaaattcttccctttctcgtgtcgacgcactgcaaaatcttgctaacgaatgggagaagcttggacgtccggacccgatcgcaaaacatgtcattctaaactctgacacctcagatcgcgaagaggccgagcgggtaatcctgatgggcgagcatctgtccggtcacgcggtctttgatgaggaccaagtgcttgccataggcagatcctatcttacgctaaacaactatgactcagccattgaagttctttccaaaggctcccgccagtaccggagcccacgaattatgtctctacttggtatttccttagagcttggtggctatccaggtcgtgcattcagtattttcaccgaactcgtcgacaacggaaccgcgagcgaatcaacctgcagaaattttatcaatggcgctgtccgcttcggactgacagagaaggcagagacaatcgtgcgcggccaattaatgtccgcgactgaccgaaaggttaggcttcaattactctcaatgctctatcagatcgagtcactctcaagtagtcgtaacaaggtcctgtgggatattgccaaccagtacggcagcatctcagatcgcgatgacgaggaagaggaagggactttcctgcaacttgcactaatggcaagcagtggcagcgagaattcaggggatgaccagctagccttagacctgagatctcgaattgattcattcgtggccaagtttcctagttcaaagcacttcagatctttcaagatgcctgactcaagtcatcctgacgatctgatcgatgcgctgaacgccgcaattggcataacgccggaagaacagcatcgccacaagtcaacgctacgcgcacttgagatgggagagctaccagttccgttctcttggcgtccacgcatattcttaagaaacgtgccagacgtgttgactctgtggcatctcaggaaagtagccccagtggaaaatgcggcgtggcacttcagcacatatgctgccggcttgtcgcggacgaaaccgaaagatctgcgcacaggccctgtggtaatctccttggtatcgctgctggtgcttgatgaactggagattctagatctagcgcttgacacttttgaaactgttatcgtggcacgcggaacactaatttccctccagaacaccagaggcatggccggctcaggcgttggcaaggatcgcgcgagcagaatcatcactgctctgactgctcgactccccaagattcgacacccgcatttcccgccggacgattcaattaacaaggagagaccgtggcatgccgaggaaaaccttgcggtaagaacgatcgactgcgtctactactgcgacgacatcattgaatccatcatggtctgccatatcgatcctagtgagatcgaaccagacgcaccaagtatatcaacggtggactttctatcattcttgaacagatgtgggttaatgaatgcagaggtagtgtccgataagctcgcgcaacttgtcggtctaaaaataggcatccaagttgagacagcctatctgctttcagcgatcagcgacgaactgcgctcatcagattcatggcaagctgccaccggtgccatttttcaaaattgcagtttcgcgaaattactgaatggcatatggacaccaaccagaccattcgagaatctacttacacactttgcagagacaatttccagttacatagaacccgaagaagcccagcaaggcgccttgccattgctttgggagcgctggatcgcggcaattagactacaagataaaccgaatattgccactctacagaaagcggcattggcttttatcgtcgccgcccaaaggattcgcgaaaaacaaggcgtagctcgtttatggacttccttctggaacgcaataggccattccagcgttgcccctgatcagcacgatgatccagatatagtcggaacacgagcagttgctgcgatgctcggcgatctacaggggagaaaagcgagcgccgacgtcgcagacgtatccaagcacattcgatcaggcctggatagtaacgcgcagctggacgcaatctactctgatcaatacttgcagtcgagcgcaagcgccgccatcaatgctatccgcgaaaaataa

SEQ ID NO: 501782 - DNA, 531 bp, Stenotrophomonas maltophilia
gtgtccgaaccgccgccgcgctccgggtctccgggcgcggcggtttcgcaattgcaggacgtgcaggcctgccagaacgcgttctcgctgccgaagggctggcaggtgcagcccgcaggcgaacagcgctggctgctgaagggtaccggcgagcgcccgctgcaggtcatcctgcggtgcgttaccgatctgggtgacaggcttgaagatcctgtggtcaccgccgagctggggccgctggagccgaaacggatgagcgcacagtccgcgttctggggcaatgccgtggattccggttacccgatgcacgccatgcaacggcgcatcgtgcccggcaccgaagtgcaggaaatcgccgaactgccgcgcgccgaccgggccaaccccaacgcgccgcacagcctgctgatgctgcgctgggacgaggaagacccctcacatattcaacaacgcgaggcgttcatcgccacgctgacgcagagccttgaagcgccgggcgctgcgaaaaacaccactggaacggcaccatga

SEQ ID NO: 501783 - DNA, 948 bp, Stenotrophomonas maltophilia
gtgaatgaagagacgacggtcgatgcgataaagcgcatcaaggatcttaacttcttctggttcttggtcgacgcccccatggctatggattcgcagctcattgagcggttccatgacgccgtgattaggccggacagtattccgagagttgcgaccgaaaccatgggcgagagaaccacgaccgatcaggttctcggcaccgatggccagggatctggggagatccccttcgttgcaaagctcgccgtcaccggaaagtttgagcgacgttctgggagagagagttccgccacgcgcactgagcagagcgacgtaccacggactcacgagcgtctaatggaggagattgtcgccttctacctactgaatttccctgatcgcgtacttcggatggatccagtcgccgagacggtggtccggtcagactctgagacgaatcagggctacgatgttcttgacgctacatgcgccaccccagggccacgccccatcgtcctgattgatgctcccaggctgacaaaggtcatgcctatggcaggcgagtttatcaatggaaagctggacgtcatctatgactcgctgctggaagcactgtctactcaggatgctccgctcgagagaatggatggcgagatggacagcactaagaaagctgaaaactggaaacaactcgccgatcgattcgacgctacaaaagccagggtagtgctcgaggaagcatcacgaaggaatgacaactcgcgcttcgactggattgattttcgactcgtatggggctcctcggggtcaccatcgcccctgcacctgcacatgatgcctaaagggcaatatcccactggcatctttgcacatgcacttgtgaggcgcgcctatagcaacggagtccggatcgtcggcacgctcaagagcggtggtgacatcaatgttctggcaatctacgaacggtag

SEQ ID NO: 501784 - DNA, 1221 bp, Stenotrophomonas maltophilia
atggatgaaagactcagggacttggaggacacctccccggacatagcggccgagatccgcaaacgtggtggcctttacgacgaatgcgcgatcgaagatgtcctcgacagacatctgttcctcaatgcaatcatgcattttgggcacatggtcaggctgacaactgaacgctactacgccgggacaggacggcggcttcaatttggaatagtcaacagtttgaagatcatggcgttcgcgagttcaagcaagaatgatgtggacttcatcggcgtcagcgtcggagccctttcattcgtatctgcagtctcaactcgaatgttgagcaaccctaatgtgctcacacatataggcagtgcgggtttggagaagcataattgccaggcgctccccatgcccggcgagcaggatcctgagtccttctcgccaatccgaccgaattgccctgttaggggcgcgttcgcaaaacactgggcactgaccggcttggactttattttcgcgcatgagatcacccatttgacgagcggccacttggcccttcagaagaaggccaagcacgctgacccagccaaagcacgccccaagctctcactccttgaagttcaggccatcgagctagatgcggacagaggtgctaccgagtggatgctcgagttcacggaattcgttagaaactcagaagaagaattatgtctagatagcaatcatgctttgcggcaatcctgggacgccttctacaaggaagagtccgcgacgatgatgtactgcttcatggcaagctacctcgcgctgaggatgcatagaccaagatgctgggacccgacccatcagtttctaacatcccagccagagccgccgttgagaatgggtacgctcatggggtactacgctgacgcacttaagcagatctacagtatttcctgggaaaaagcacaggaacaggtgtctgcttggtgcctcgtatctgaacaagcatttgcagatcttgttgcagactccggtcgcggcgaagtagatgatggggttatttcaagtttcttcgaacgcgttggcgactactatgagaaggtaagcacagcctacgaatttctggctccggagttgaacgaactcgcaatgccggaggcccgagcgcgtcctgaggtcgaggatctaggttgcggcacaacttcaggcacgcgaccgttacccggcgtgggcgatatgggcttggcatga

SEQ ID NO: 501785 - DNA, 735 bp, Stenotrophomonas maltophilia
atgtcgcgtgagcagttggagagtgatggaatcgatgggcgttccgcccttgtagtcttctccggtggccaggattccgctacgtgccttgcgtgggcgcttgaccggtttgaacatgtcgagacgctcggctttcagtatggacagatacacgaaatcgagatgaccgtccgacaggatgtgcgccaggccatcagcagcatcaagccggagtggaagactcgcttggggaccgatcacgtacacgatgccagcatcatcggtcaaatcagccaatcagagctcaccggcgcaagcgaaaccaaacttcgaaccgcagggctgcctgcgacctttgtccctggccgaaaccttgtgttcctcaccctcgccgcagccctcgcctatcgccggggggcaaagcacatcgtcacgggagtttgtgagactgacttctccggctacccggactgccgcgatgacacgatcaaggcagtgcaactcgcggtgaacctgggcatggattctcgatttgtcgtgcacacccccctgatgtggattaccaaagcccaatcttggtcgctcgcagacacgctgggtggagaggcgttggtgaccgccatcaacgagaaaacccacacctgctacataggtgataggtccatccagcatgaatggggctatggttgtggcaagtgcgatgcctgccggttgcgagcagttggttgggacgcctacatcaaggacaggaagtag

SEQ ID NO: 501786 - DNA, 384 bp, Stenotrophomonas maltophilia
atgagtgagccaattttcaacatctgcaaagagttccgcttcgatgccgcgcaccagttggacgcaggccccgatggcgatccccgataccggcaaattcacgggcattcctaccaggtcgaggtttgggcccggggctcgcgcaatgcgcggggctgggtgatcgacatgggcgacttcgagcgtcgcatcgaacaaaccaacgctaagattgaccatgtattcctgaatgatatagatgacatgggtgcacccacaatggagaacatcgcctacttcatctggcgtgatctccgcgacttcccctgcctgcacaaggtcgtcgtcaagcggggtcagaacggcgagtcctgtgagtatcttggagaacacgatgtcgcgtga

SEQ ID NO: 501787 - DNA, 633 bp, Stenotrophomonas maltophilia
atgtacgcagttaaggagatcttctacacccttcaaggcgagggtttccaggtggggcgaccggcagtattctgccggttctccggctgcaacctgtggtcgggcagagaacaagaccgttccaaatcggcctgcaccttctgcgacacggacttcgtcggggtagacgggcagaatggcggaaagtacccggacgacggcactctcccctacatgatcgccgaccagtggcctcatcacgtgatcgagaatcgcctggttgttttcaccgggggcgagccactgctccaactcgacgagccgctcatccgcgccatgcatgcgttgggattcaagtgcgcggtggagtctaacggcacccttgagccgcctgcgggaatcgactggctgactgttagccccaaaggatcggccccgctgaaggtcacacgagccaatgaactcaagctggtgttcccccagcctgacgccccgccggagaactttgagcacttcgtggccgaccagtacttcctccagcccatggacggaccagaccaagcagcaaacacgcgggcagccgtcgagtattgcaagtcgcatccgaagtggcgactgagcatgcagacacacaaatatctaggcatcccatga

SEQ ID NO: 501788 - DNA, 1095 bp, Stenotrophomonas maltophilia
atgaccaagcaactgaccttcaccgccattgccccgcagcagtcgcccgactcccaagtagcattcttcgtcgccactgccgaccagatcgaccagatcgccacaattcagcgcctcacccgtgacgaagaaggccttccgaccggcttccagcgcccgcagattgcaaagcacatccgcgaaattggcgactatctggcacgtcctgacgccattctggccaatccgatcgtgctcgggttcgtcggctgcgcgaagatcaagaaggcaaaggatggaacggcccaactggtggtggacatcagcaagggcgcaccgggcctcatcgttgatggccagcaacgctttagcgccttgcgcgagatcggtcgcaaaggcttccaggtccccgtctccgctttcatctgtgaaagcctagaagagctgacccagcagttcattctcatcaacaacaccaagcccttgaacaaggggatgatctatgaactgcttcccttggctcgccaagggggcatgcccttccgcctggagtcacggcgtgaagcgtccgatctggtcgcagccctgaacttccgcaaaggctcgtctcttcgcggcatgattcgtggccagaccactccgcacggcgtaatccaggacacggtcatgcagaagttgatcatgaactcgatgtctgacggtgcccttcgcatgtaccgtaacgaccacaaactgctgcaaaatcatggctcggagttgatcagcgagtacttccatgcggtgcgccacgtcttccacgatgcatggaaaggccacactcccaccacatcacggttgatccacagcgtgggcatcacggcgatgggctttgtcatggagtacttgcactctgcactgggggcaacaacccgcgaacagttcattgaaccgctgactgccctgcgcccagcgaccgcctggacagagggggagtgggtgttcgggccggaacgccggcgctggaacgggctgcaacaggtttcagccgactggaagctgctgtccttctacctggtccagaaggctcgggaggccgtggagaaccccaagggagtcaaagcccatgtacgcagttaa

SEQ ID NO: 501789 - DNA, 1281 bp, Stenotrophomonas maltophilia
atgaagttcatttatgccgatgcactggatttcgtcgatccagacttcgacttcgccagcgaccgtacctccgaggggcgtgtagttcaatgggacgatgagtacccgcacgagttccttgagcgctccccgtacgacggcatccttgtctctcgtggtgtggtgggtgacatccagcatcagggcaagtacacccttccgcaggtgatgcgattccgccgcgagggcgcacgcaagttcctgcgctacaccctggacaagtaccctgacagcctgttgttcggcgactgcggcgcttttacctaccgtgaccaggccgtacccccgtacacccccatcgataccatggagttctactccgatggtggcttcacccatggttgctcggtcgaccacatcatcttcgactttgacgagggatccggccggtcccgggccgagatgccccaggatgtcttggatcgctatgatctgacactgcagttggcggccgagttcttcgctgagagcaagcgcctgaaagggttcgtcccgatgggagtcatccaaggctggtctggccccagcatgggcagcgcagcagctgagttggtgaagatgggctacacctatctcgccgtcggcggcttggtgccgttgaagattccgcagatccatgcggctctgtcggctatccgcaagtccatccccgcccacatcaagctacaccttctgggctttggcaagatcgagaacctggccgagttcgagcagtacggcattgccagctttgacacgacctcaccgctcgtccgagcgttcaaggatgcggtgaagaactacttctcgcgcgacagccaaggtcagctcagctactacaccgccattcgcgttccccaggcccgcgacaataacaagctcaaggccaaggctcgccgcggcgtcctcaaccaggaggtggccatgaagctggaggcggcggctctggagtctgtccgcacattcgctggcggcaagatgccaatcgaaccggcactggacaatatcctcgcgtactggaaggcactgaactggcgcgaagaccatgacgatgcaagccagatgcgctcgctggtgaagcagcgtgccatctaccatcgcacgctgatagagcagccctggacgcgctgcaactgccgagtgtgcaccgaaggtggcgttgaaacgcttcttttcaggagtagcaaccgcaacaagcgccgcggattccacaatctccatgtgttttacgaacaccttctcgctcacaggctcgcagcatga

SEQ ID NO: 501790 - DNA, 1128 bp, Stenotrophomonas maltophilia
atgagtcgcaatactggaccatccgttcgcgctgttcgcagcaaacaagcaggagtgcccctttacgcgttctttctgcctggtgcgaaagtgcttgagattgctgacgtctcacggctggagcgatccaaggacggcctagacggatttcagcgagacgctatccagaagcacatcagcgcgatggtggactacctcaacagtggggacgtcctcttccctaacgccattctcctggcgctctcacccaaggccaccttcactcgctcccgcggcccttctccagagggattgattgcgtgcggagatccgggcgtcctgaagcttcctgccgcccgtgatggcaccaagctagcgtggattgtggatggacaacagcgttccactgctctggccagggcacttgatggcaacctcccggttccggtgatcgcgtttgtatctgacgatcttcaggttcaacgcgagcaattcatcttggtaaacaaggctcgtccattgcccaagcgattggtggacgagttgcttcccgaactcgatgcaagacgattgcctcctgatatggccatgcgtcagatacccagtgccctggtggaccggttggacactgatcctggctcaccgttccacggcttgatccggcgcactacgaccactaaggatcccgctcgcgttgtgacggactcggccttggtgcggatgttgcagaagcagatccaccagccattgggtgcccttgcctcatatcggtctctggatggcggaagtaccgaccctaccgcgatgtacggccaggtacttagcttctggaacgcggtcaagcgcacattccctgaggcgtggggcctgcctcccgagcaaagtcgcctcctgcacagcgctggcatcaccgctttgggcgcgcttatggactacctcagcccccgcctaaccaaacgagggagcgaggaacagttctatctgtctgtgcttggcaacatggcaccagattgcgcatggacgtcgggccgatggtccgacatggattgtgcttggaatcaggtcgaaagcaccgccaaggacatccgcctgctcagcgatcaattgatccgcctctcccaaattcacaactcaaggcagattgcctaa

SEQ ID NO: 501791 - DNA, 942 bp, Stenotrophomonas maltophilia
atgattgattttaataacatttcattgggaaagggcgtcaattgcctggtggtgaactgcagcgctcgcaaggcacaactgtcaacgtccgggccccgaggccgggatctcagccccggaagccaatctgacgtcgcgagggagtggctccggaccattgctcaagctgaactagggttgacggttgcgaaggacctctatctaggttctggcttgcagcgtgtatggcgaaccgccaggtatttggccaagccgatgtggatcgtttccgccggcctggggctggttcgtgccgatcacccggtgcccagatatgacttgacactgtccgagcagtcactagatgccatacagtcccgagtccaagggggattcagtcctgtcacttggtggcagcagatcgaacgtggacgtttcgcccatcccgtctcagcattggagaccaacggaggcgatagtgggcgcatcctgatcgcactcaccaaaccttacgcgagaatgatcggtgaatgcttggcgggcctcccaccagagcggatcgctcggcttcgtttttttggtggcgggatcaaagcggcgctacccaaaattctgcatgcgcaggtaatgcagtacgacgaccgcttggaccacttggtatcgggcataaagttggacggcgctgcgcgtgcagtggaacacttcgccagtctggtagcccggctcgaagagtgctcagtggagcaagaccaagctttgatcgatgctgctcttgaagccgttcctcgtatcgcctcggtcaagcgtgagcccattggagatgaggaactgaggacactgatggccccttggcgggccaatggattgtctttttcccaagcgttgcgtcggttgcgtgacgtggaactacgctcctcagaagagggacgcttccgtagaatctattcgcaggtgaccccatga

SEQ ID NO: 501792 - DNA, 1467 bp, Stenotrophomonas maltophilia
atgggtgacacggtttttgagtacgtcgcgcaacagtacgagcctcgcgatggcgccggggaggtgttgctgtttgtggcgccggcaggtgaaattcgcgcctgggcgggcgtcccgcgtaaggcgtttgactaccagcatggctttcagcggacgctgagtccgtcccgaattgaagatgttgccgcgttctttaaagaggatgctaagaacatcacgccgacgtcagtggtggtgggtctgaccggcggcgtggagttggaaccaatctcggaggtatccgctccgcacggcagggtggtgcgcatccgtattacgactgaggacttggaacaggttgcgatgcctgacctggccgataaggtattggcccatctccgtgagcgcctgcctcaagatgttgtgcaagccattgacagcgacgtggcaactgcaatggtggaggctatccggttggaggaatcccaagaggttgaagaagccgccgaagacgaggccgaagggctggtccaacccgagcagggcgcaaccgcgaagtcgtatcttggagacttctacgcccgccttttgggctacaaaaacgggctgctgccttggccgaacgaggatcaactgcggcaggttctctactcctttctccgccctggaataatcgtcgacgggcagcatcgaattttcggcgccgcattggcagatgaaggaattcttctttcggtctgtgctgttcccaatgcaagttgggccgagagcgtgtaccagttcgtggtcatcaaccagaaggcgaagccgatcaagcccgccttcctcagttccatcattgcaacgtccctgaataacgatgagatcaagagcgtctacagtcgccttgagacgtcgaaagttaaagtcgaaagcgctgacatcatggagcgcgtcaacaccgacgacaagtctccgttcaaggggatgatcgacttccaggtggacggtgctcccggtttcctgcagtacccgggcatgtctaacttggtcagggacttcaagaacattcctcgctcctacccgatattgcttaatgacgccacttgggacactgccgagggcgagtggctcgaccacttctttgcattctggaatgggacgcgggcgtatttcgaaggaaaagatggccggttgtggcaggagtcaacagacgctaatccctctaatcttcttaagattgtctcgctgcaggagatccagggccttgtgctgtctaactgggccgatgcgagggataaacagttgtccaagcccgaactgacgcagcagtgggcgctcaactactggactgatttcccgccaacctttttctccgatgagtggaaaaagaaggggcttcagaccatggtgggtcgcagaattcttcgtgatgctattaccgaaacccgccgcaacatcgggcgcaagtcttgggggcatcgcaagctcggcctcttccaggagtaa

SEQ ID NO: 501793 - DNA, 846 bp, Stenotrophomonas maltophilia
gtggactggatcgattttgctctagccaaggatgaggcgagtttacgtgaagcactaacagggctccccgtagaccaactcaaactgttgaagagtcaactgttgagcgtgttaggcgctgatgcagatgaatacgagcgctcgacaatcagaattctgatcgagcgcacccgtgcattcgctctacccttatcgctttggactcgcccattagatgcgtcctggagcatacgtgatgcgggagttcagcatctcgtcgctcacggccttctctcgaccgaggagcggctcgtctctgtccaagggctgtaccagcggttcagggtgcgcaagaggagtaagggggcgaagatcaatcagaagaagctggaagctgcgggcttccggtgccaaatatgcggcttgcgattctgcaacgaagatttggagaagtggagtatcgtgtcgccccatggctataggggaacaccaaaacctgatccactgaagatccactggactagtccggcctacttgctgccctccattgatcatgactggcccatttcgacatacggcgacaattcaccagaaaaccagaaagtggtctgcaccgggtgtaatggagggaaggcaaactttgttgcattggagcagacgtatgcatggacgggaatattggagagggagcagttggaggacggtgctgtctcaacggcgctcttctatgcccagctacgaaggcacccgaggtgtagccgcactggtgcaactgccgaaacaaccgaactaagcgttaatctaaaggatccagccaagcctgtcgtgttagacaacctgattacagtcacaggccctaataactga

SEQ ID NO: 501794 - DNA, 132 bp, Stenotrophomonas maltophilia
atggaagaagagatcaagcgcttgaccgcccgacgcaagtcagcgctggtccttgggatcatccagagcaagacgacggtggctgcggccactcggcggttcgacttgaccccggccgagatcgagagttga

SEQ ID NO: 501795 - DNA, 2025 bp, Stenotrophomonas maltophilia
atgacagatcaattgccaggccaagaatccgagggcctgaaggccatgcttggcacgatcctccgcacgtaccagcaggcgcgatctgaagtcagctttggcggagagaatgaagtcgcagaagtctttcgggagctaaaggaggcagtcgagcgccttccgactgttgccggcaacgagcatctaaaagtggtcgcgagctacggcaagggcaactgggcaacaatcccctggctatcaatccttgatcgacgggaaaccaccaccactcagcgtggggtctacgtggtctatctcttcagcgaggcaggagacggggtctacctcactctcgcccaagggatcactgagttcgagtcacttcatcggaaggaggccgttcgaaggctcaatgaccgtgcagaaggggtaagggctctcatccccagcctcgccgaagcgggcttcgacttttccgcagtcatagatctccgctccaaaggcagcaaggcgcgcatgtatgaagcatccacgatcgcgtccaagtactacggtgtggacgaactcccgtccgacgaatcgctgatcgtcgatctcgaagcagccctgcaggcttacggcgcaatcgtcgatgctcacaaagatcgggtggcgccacgacttgatcgccgcattgccctcgtggggacatggcagacaatctctcgggactatggctctgtgcgagaaggcatagatagcaatggaggatgggctagcggctggacattcaggctccgagaaggtgtccgtgacgagctgtcaagcggcttcacgctctacataaatggcggcaggcggcagattgtcgcgaaggctcgcgtgggggcgctccgctgcgcgccgtctgcggacgggatggccaatccatggccctcgctatcagggacctacgatgaaggaaaccgactcaacgatagcgccaatggcgcctataaaacgtggttcaagctcgaggccatcgagtttattgacccattcccggtagaagagttggaattggtaggcgggctctccacctctaaaagcgtagtgaatcagaacgcatttggttacgtgtacgagcgcctcaaagactcatggctcagggacagtgaaagccaggatgctgctggcgtggacgggtcaagcagttcaaccgagctcgaggtcgatctagacatgtcttggttggtggctgagacactcctcgccgaagaagcgcttggcggcatgatcgattgtctgcgcgggagccagccgcagctgattctggccggtccacccggcaccagtaaaacctgggtggcccagaagctagcaacccacctaaccagcggtcgtaagggggcggtgcgactggtccagttccatcctagctacacgtatgaagccttcatcgaaggtttgcgcccagtggcaggtccttcaggcgtttcgtttgacgtgacggccggcgtagtgctgcaagtagtgcgtgatatgcgcaaggccggacatctcaacgatccagaccacccctacgtcatcatcatggatgaggcaaatcgggcgaatctcccaagggttatgggggagcttttgtatcttcttgagtatcggaaccaggcaatcagtctgcagctctccaaggagttcaagctgccttccaacctgatgttcatcgccacgatgaacaccgccgatcgcagcattcgttccatagacgcggcgatgcggcgccgcttcgaaattttcgagcttgcacccgatactgatgtgttggagcgctacttcaattccatagctcttccgtcagaagtcgtcattgaaggtctgtccaggctcaatgaacatctcactagggacctggaccgacaccacactatcggccattccttcttcatgcgcaatgacatgtccccaaaagttcttcgggaagtctggacgcgaaagttgttgcccctcattgaggagtattactacgatcagccggacggcatgggcgccctgagcgttaaccagctatggcctgattatgctgactga

SEQ ID NO: 501796 - DNA, 447 bp, Stenotrophomonas maltophilia
atggaagcgggcaatgtcgtggggacctgctttctggtcccaacgccaggcatagtggagagcgctttacgcaatatcctcgcaaatgcgctttcgccgattgacgtgaggaagcgtgggctccgcctaacggagggtggaatcacgctcaatcccgacgtcgtcgtggatggaggtcgcatcgtgggagacgtcaagtacaaatacttcgggggtgactgggaccgtgcaagcttcaatcagatcgtggcattcgcatcaggctttgaagcagagagaggattcatcgtgggcttcaggcgcagggaggatggcttggtacccttgccggctgcaatcggaaaaattcgggtcaggaagtttgcgtgggtggcgtcacctgggatagatcctttgctgagcgaaagcgcgatcgctgaagagatccaaacttggatcggcatgtaa

SEQ ID NO: 501797 - DNA, 642 bp, Stenotrophomonas maltophilia
atgaagcgaagccccacgcaaggccctcaagcgggccagttctacttgttctcaccagatctggaaagcagccgtcctttccggggcgccgaggttgagaacctgacggtgttgctcgatccaccgcgcatcattctgcgcccggacaatgggggtttcccggcgcttcgcgagaagccacgcatcgtcttcgacgcttccaagggccctgagccacgtgacctggagggcggcttcagcgggtactggctcgtctcggaacggctgtggcaggtgatgaaatccgtggatccgcatgcgttcgactttgttgagtgtgatgtccgcctggccgatggcacacctatgccacggcgtttcctgtgcgacgtggtgcgtgaactggacgcgatagacgaggagcattcaaggcttgatatcgagatcgatgaggacttcgtcaacggaaagttctattcgattgcaggcggggcgagtctggccattcgctctgaggtggtgcgagatgggcatgtcttcctgactccattcagcaccttcgtgatcgcgagccgcgaatttgttgatgcggttcacgcggcggggattccgacgagtcctcgggatagcggcatctccttcgtggacgctgcggcagtctga

SEQ ID NO: 501798 - DNA, 642 bp, Stenotrophomonas maltophilia
atggaatcgaattccacccatcagccgcgcaagggcgagttcttcaagctacgaccggatgctacccgtagaggaaagggtcacggggtggtctttgataacgaggacgcgttgcttgtgactccccggctgatcctgctgcccgaagcccgtggcttccctccactgcgtgaaaccccgcgcttggtctatcgggagcggcagggtttccctccacgggacctggaaggcgggttgagcggctactggctggcctccgagcgtttgcgccaggtcatggaagagattgaccctgacgcgttcgttttcgctgataccgactaccgcttggaagacggttcaaaggggccaacctacttcctttgcgacgtggtccgcacgctggatgccttggatgaggaagcatcccagctcaacatcgtgatcagcgacgagtacaaggcagggaaatactaccgcctgaccggtgatgtccggttggcgttcaaacgcgaagtgatgggttcggctcacgtgttcagattgccgttccatggcggggttctctgcggccgaacgttcaaggattcggtggaagcggccggcatcgtcacagcgaggagatccaacgggctctggtttgaagatgtggtgaactgctga

SEQ ID NO: 501799 - DNA, 411 bp, Stenotrophomonas maltophilia
atgagtggctactggttggtatcagagcgcctcaagatggccttcaccgaaatagatcccgttgcctttgagttcgtggagtgtgattacgtgcttccgaacggcacagagggcccaacgtactacctgtgcgaggttgctcgcgagctggatgccgtcgatgaggaagcatcgaagtttcgggtcatcgtcgatgagggctatccgggcggaaagttctacgaccttcgtggcggagcaagcttggcattcaagagggacgtaatcggggacagtcatgtcttcaggagcccgtactccggcgatcttgtctactgcgatcgcgtgttccgggatgccatacgcactgcgggagttggaagcgagtgtgaaacgcgtggcctgaggttcaaggacgcagccaatgtctga

SEQ ID NO: 501800 - DNA, 630 bp, Stenotrophomonas maltophilia
atggatacgctggtgcgccgtcgcatggcggcgcagtcggtgattgccgatagtggttcataccgtcgttcgccaacgaattcccgcatgtttcgactgttcctgctgcttgtctgcgcggtgccagccactgcaatcggcgcacgtgaagggcatgcaccggagtgggtgcgggaggtggctgccgacaaggacctgcaggttgaccccgaaatggttggtgtgaggcttgagccgaccgcgcggggcgcgttcctcgacacgcgtgcacatcgaatcggggcgaggcgtttgcgcgcgctgtatcaggtattcgattccaacgcggataacccgatgggcctttgcggcgctgggcgcgagatccatctgttcgtctacgaattgaccctaccgaagcccattgagcgcggcagggtgttgatcagcagctgccttgaagccctgtctctggcgagccagaactcagggcgatccaacagtgaatccgacttttcctcggtcatctggcagggggacgggttcaccatcgagtggtcgggtatcggacccggaggcgatacgtcgagccactacgcgctccgaaatgaccgcttcgtcccgactcgatcgggtgaggggaatcgctga

SEQ ID NO: 501801 - DNA, 894 bp, Stenotrophomonas maltophilia
atgcattctgcggcgcagcatgagggggttcggcagggctgcgccctgcacccggacagtgccggccgctggccggcaacctcagaagcaacagccgaagcaacagcaaaaggcggctatccgtgggatggcggggtaggtccggttgcgggggacgccgtaaatcccgctccgcggtccggcccagccgctggcggctatgcgttcgggcgcttgcgaagcagtgcttcgcaagcaaagcgccctcacccatgtaggctcggtcgccgcttgctcgtgtgcgcagtcctgcgcacacggcaagaccggggttgggcgtcctgcccaacccgcccgaggcatgcctcgggcccatgcggctcacgcccccgcaaccggacccaccccgccttcgacagatctccgcgatctgcggtagatccacgccaggcgtggatgaatctctgtcagataacgaaatcgattggggtcagatccgttttccaaaggaaaacggatctgaccccacgatcccatgtcgttccaggatcagtccaaccgtcaccgggaaactgtcgaaggcggggcggtgtcggattgcggggtgtccgcggcatggatgccgcggccaagcccccatggacgggtttacggcgtccccgcaatccgacaccgccccgcccaacccgcaggaaaccagagccgtttttggctttggttttcgctgttgccggccagcggccggcactaccccacagatgcagggcgcagccctgccgccccccctcccctgcgcacgaaaacgatttcactgatttcagcaaaccgtcatccctacgccacgccagtaccatattgcggagcagcatgcgcccacgggcgacccgtgctaaaaatcgcccgcccatcgcttag

SEQ ID NO: 501802 - DNA, 276 bp, Stenotrophomonas maltophilia
atggaagaagcgcaattgatgcgcatgagaagcgagatcaatgaactcgtctcgcaagtgcagttcctcaccggcaaggtcatcggattggaggtatcgctcctcaccctcgctcgacagtgggggaacagccctcaggaggtgattgaagccctccatcacacgatggaaacaatggatgacccaaaagccacgcagtttcctgctggagccaagcagaccgcgatggcattgatcgagagcgtctctagcgtccttcactcgcgcaatctgtag

SEQ ID NO: 501803 - DNA, 198 bp, Stenotrophomonas maltophilia
atgaacgaaaaatggaatccgcgactgtcgctgcggaactggttgatgaggcccagcctggcggaaagcatgaagatcgagggcacggcgctgagcgaccacgtgcgcagcgccccgcacttcagcgttgacgtgcggggcggaagggtctctgggatttcgctcgggcctacagattgcgcgagtgaaggacgctag

SEQ ID NO: 501804 - DNA, 489 bp, Stenotrophomonas maltophilia
atggcgcagatcactccccaacaggctggcggcgtgaacgtcgtggccttcctcgacatgctggcctggtccgaaggtacggacaacggccggcagccgaccaacgaccgcggctatgacgtgctggtcggtggtggcttgttccgtggctacgccgaccatccgcgcgtggtggtggatctgccgcggctgaatatccagtccactgccgccggccgctaccagctgctgcgccgctactacgacgcctacaagaagacgctcggcttgaaggatttctcgccgctgagccaggacctgatcgccctgcagcagatccgggagcgtcgcgcgctgccgctgatccaagcgggcaaggttgaggaagccatcaaggcggtccgcaagatctgggcgagcttgccgggcgcgggctacggccagcacgaacacaggcttgccgacctgttggccgtgtaccgcagggccggcgggacgggggcgccatga

SEQ ID NO: 501805 - DNA, 516 bp, Stenotrophomonas maltophilia
atgggcaagatcgataaagatcgcttgagattcggcggactgtcgcttgtccttagcggccttgtcgcgtggaagtttcagccgctgatccatgggaacacggatgcgttgaacacaatcgtcaccgtgttttcgatacttgctggcttcttagttgccgtcatcacaatagttggtgacggagtactcttgggtaaggcgagctggcgacgtgatgaacaagccatatccggagtgagaaagcgcctgacgcgccacaaattgatgttccagatctatctggtggttctggcattggtgttcgccattcagctgcatgggaagagtgccgattggatgccatggtgcgagcggctcatgctgttcctagccagcttcgctttcttggcatctttgaccttgcctggtcagatattccaagagcggataaagaagcttgagtcgcagcgggggcctctacctcagaggcttcaaaaggcgctggagcctgagacgaaatcgtcagagaaggaatga

SEQ ID NO: 501806 - DNA, 957 bp, Stenotrophomonas maltophilia
atgactcgccgcaaagctccaaagaacctcagtctatatcgggccgtatacgtcccgaatgctagaactcttcagcagtacctgaatgcagcatgcgatgctgtcgcctcgttagatcaacgcgaggttgcccatccttcattggggacattacggatcaaccatcacatgatggaaagggatggattgttcatccatttgatagcaaaggtcacgggtgagtcagcgtccacggtgacggaagtgcgaggagctcgcaacgacagcgaggcactgcttccacctcccgcgaatcgttcatttaagaatgcggatctgttcgccttaatcagagggaatcatctgaccatatgtacagatggtgtgcgtgttccggcctttgagtactacctgaagaacttcctgccacaggctgggcagtcgaacaattctgtgatgttcgagataaagaacgtacaaaacgcgggtactgtggcgattctgcagcgtggtggggttaaagagatcaagctcacgggtaccctattcaacgccactgtcgaaaggctgcaggacggggtgggtccactccattcgatgtcaagcgtcgtaaagaacctcaaagatcagttggcatcggtctttgaaaaggatgaaagcgacgatttggctgaacacgctgatcagcttcaggtagaagttgttgtcaaggcgcgtggagggtcgagagcagaggaagttgttctgcagaagatggagagtgttggaattgagcttctcgatgacctcgacaacgatgtcggttatcaaataaagaccaacaacaacaagacaatcacacctggtgagatggtgatccactaccctgttgttctagagcgtggtgaatcttccaactcgctgtaccggggcgatgtcttcgacaagctggttgaagcaatgtctaagtttgagcgcgagggtgatctggaactttga

SEQ ID NO: 501807 - DNA, 435 bp, Stenotrophomonas maltophilia
atgaggctggcaagtactgtgaattctcatgtaatccaggccgcagttgacgccgtatttctgcgggttgtctgttcggcgaatggtcgggtccgcattggaatcagtcgggagccgcttgagggcctgcgtaagcttgcagggcgggaagcgatagccgcgcagtgggcttggatcgggagcgcggcgaaggggaaggccatagaaaggtccctgcgcaagcgctgggccagtcgctaccgggctggtgaggggttcggctttgactatcgtacggaggggggactgttccgcgacgagctggacgccaccttcggggcagtcgttggcgttctaccccaatggcgcaaggtggtgccggacgaaacggcggaaatcatcggtagtatgcggaaggaaaggcgccgcccctcgctcccagtcaaaaggaattga

SEQ ID NO: 501808 - DNA, 228 bp, Stenotrophomonas maltophilia
atggtcggctcgccggatgagtataggtggattgatcgcgcgctctccgacctctaccggcagaacatggtgcgcgcgctggtggtgctggaggagttcaccggccgcggtagccaggccaggcgggcggaggtggtggccaagaagctgggcggcacgttcaccaaatggcagtaccggaaggagctggacaagggaatggcattcatggaggcagcacggagatga

SEQ ID NO: 501809 - DNA, 219 bp, Stenotrophomonas maltophilia
atgaccttcatcccagcgggatcccaagcactcaggtatttcgccgacaccctcgaccagcaggctcaaaggctcgaccgcctgctgtggcgtgatcgcggccagcgttcaaccaccgccgaggcttaccgcctggcggcctcgctcgcccggcagcaggcttcgaagctggaactgctggaaggacaggcagctacgtgcactggaggccggaaatga

SEQ ID NO: 501810 - DNA, 1434 bp, Stenotrophomonas maltophilia
atgcgctttgaccccaatctcccgccgcatagcgttgaggcagagcaggcggtgctcggtggcctgatgctggctcccgaagcgtggccgctggtgtcggacacgctgtgtgctgaggacttctaccgtcacgatcaccagctcatcttcgagtccatccgcacgctggcggagaagcagcgcccgttcgatgcggtgaccattggcgagtggtttgaatcgcgcggcaagctggagttggtgggcgacggcacgtacatcacggagttggccagcacgacgccgtcggctgccaatgtggctgcgtatgccgagatcattgtgcagtacgccggccgtcgccggttggctgacgttggccgcaaggcggtggaatctgcccggaagcaggacggccgcgagttccccgaactcttggcggagctgacgcaggacattgccgggctgcagccggcccagcgcggcggactccggcttgccggtgagacgatgattgggtggtggaagcggtggcaggatcgctaccattcaggcgctgctttgaccgggcttgagtcgccttgggcggagttcaacagggtgacccatgggttgcaaccgtcgacggcgtatctgatcgctggccggcccagcatgggcaagagcatcgcggccctgaaccttgccgtctacaacgccctgcgcggtgtcaccgtcggcatgttcagcctggaaatgagcgtcgatgactgtcacaaccgcaacgtcgctagcgtgggccgcatccctcatgactgggtgatcaagccgaccgccgcgtgcgaagacagtgagctttacctggaccgcatgacgccgacgattcgtgatctaaaggtagctccgctatatatcgatgacacggcttcgatcaacgtgcgccagttcgaggcacgcgcccggcgtatgcatcagcgcacgccgttgcagcttctggtgctcgaccacatccacgacttcgatgtggatcctcgcatggcacgcttcgagtacggccggatcctccagaagggtaaggacctcgctaaagagtggaagatcccgctcgtggccctggcacagctgaatcggagcgtcactggtcgaaccgaccggcgtcccaccctatccgatctccgggaatctggggagttggagcagaaggcggacgttgtagtgctcctgcaccgcgaggactattacgacacccccgagcagcaaacccatctgcagggcgtcgtggagatgcacttcgcgaagggtcgaaacatccgtgccggcgagcggatcagcctgcagaaccgcttcgatcagatgcggatcgacaattgggacgggccgatgccgcgtaaaccggaggccgcgaacgacgatcaaccgccgcgacggaccagctatggccctggccgtaggtcctacggggggatcggtcgatga

SEQ ID NO: 501811 - DNA, 729 bp, Stenotrophomonas maltophilia
atggcctgggcggtgaagtggaagctgccggcccagcagaagctggtcctgatcatgctggccaaccgcacaaatgcggatacgggtcgctgcgacccttcccataagaagctcgctacggattgcggcatgagcgccgattctgtgaagcgtgcgatctcgggtctcgagtccgcaggccttcttaccatcatccgtaggacgcgcgagggcgtgagcttgcccaatcattacacccttcatctgggagtggtgggtgctgacagcactgacgggtgggtgcacacagcacccagggtgggtgctgacagcactacaaaacaggaatctaaacaggaagtagaaacagatacgtcgcctgacggcgacatggatgccgatgagggagaggaggggcagaaggatctgctcggagccaagtcaattggtgggtgcccacatgaagcaatcatcgctgcctaccacaaagagctcccgaactgccctgaggtgagagggtggagcaagaagcggcaggaccatctgcgtgcgcgctggaaggaagagccgtgccggcaatccgtggaatggtggcgcggcctgttcgcatggatgaaggagagcgattggctgatgggtaagtccggtagcttcctggtctccctaccgtggctgatcaagtccgaggagaacctgctgaaggtgatcgaaggcacttaccacaacaatcgcaaaggggagcagggttga

SEQ ID NO: 501812 - DNA, 336 bp, Stenotrophomonas maltophilia
atgccacacgcaacttcgcgggaaaacccgaaatccggtccgcgccacatcagcgcggttatgaacgacgccctcgaggcgctcagggagcgccaggcgaggccattggtccgcctgcaggaacgcttgcctgacggccgcattgccgtagaggtctatgaccgcgcccggcggggcgatgagccgacctatgatttctactgctctgggccccagcaggcgttggagtggatccagcagatgtctggcaagcgctggatcaccacggagcacctgggggcctttgcaacgttgatgttggctgctttcccggaagtctcgggggcatcggcatga

SEQ ID NO: 501813 - DNA, 687 bp, Stenotrophomonas maltophilia
atggatacgacccttgctgagcgattggtcgcagcgcgcgagcgctccggcctgtctcaaaccgccctcgccaagtctgtgggaatttcccagcaggccattgcccagctggaatccggcaaagccaagaagacgggagcacttgccgagattgcccgatcattggacgtggacccgctctggctggcgctgggggtgggtgacatgcttggaacaccgcctcaaggtccccaggcagacgacaacgagtacaccgacgtcaccggctactcccaggctgttggcttgggggcggcgggtgccgaggcagaggagtacgccgagacccacagcctgaagttcaagaagaccagcctgcggcggcggggcatctacgggcgcaacttggccatctattatggcaagggcgactcgatggaaccgaccattgaggacggcgacgcaatcctgttcgacacctcagacacccgggtcgtagatggcgtgctgtacctgatccaggtccatggcgctgccaacccggagtactacgtgaagcgcgccatggtgctggatggcacggtattcttcgcaagcgacaaccccaagggtgaccatcactggcagaagccgcggcggatggactccaagcgggaaccaatcacggtcgttggccgtgtccactggattggcggatgggctgactga

SEQ ID NO: 501814 - DNA, 474 bp, Stenotrophomonas maltophilia
atggccagaaccgacccccaagtgaatttccgaatccctgcggagctcaatgagcgtctcaaggaggcggcggcggaaaacggccgcaccatcacggccgagctcgttcagcgactggaggcgagttttcgcaggtcggtcgatgatgagaaggtcgtcgaagtggtgcaggggctcaaagagcgcctgcaggtcactcagcagcatctcgaggtggcgaaggcaggtgcgctcacatcgagcgcaatggtcacaaccatgatcgaccgggcatgggaggggcatgaactccccgcgcatgtaaagaggcttcgtgaagccagcgcagcggtagcaaagctgtacggagaagccgccgctgtctccggtgacgagcttagccagcgagccgcgcaactcttgcggtttcacgacacccagctgcacgcagacaaagaaccaaaaaaggtccctggcccaaagaagaagcgctga

SEQ ID NO: 501815 - DNA, 738 bp, Stenotrophomonas maltophilia
gtgacaagcctcgtaacactcagtggcggcaccgccgttaccagcactctgatcatcgcccagaacaccggcaacgaccatgccagcgttatcaagctggtgaggacccaccttgccgatcttcaagaatttggaggggtcggatttgaaatccagaccttcgccacagcaggtggcaatcagcagagagagtttgccgaattgaacgagcaacaagcgactttgctcctgacgtacatgcgcaacagccagatcgtgcgcactttcaagaagtccctggtgagggccttctttgatatggcccaaaggatcaagatgcgggcctccgatccgatggccgtcttgaacgatcccactgcgatgcgtggcctgcttctgacctacaccgagaaagtgatcagcctggaacagacggtcgccgagcaggcaccgcaggtggcgacgctgaatcggatagccgcagccgatggctcactgtgtatgcgagacgcggccaaggctctgcaggtccgcccggtagatctgcggcgctggctggtggctcatggctgggtctatcaacgtccgggccacagcggttggctggcctatcaggagaggatccagcagggtgtcatgtgccacaaggtcacgactgtccagcgcgaagacggaaccgacaaggtcgttgaccaagccaggatcacaccaaagggcatcgctcgcattggcgccgaactggcaaaggcagcggcatga

SEQ ID NO: 501816 - DNA, 255 bp, Stenotrophomonas maltophilia
atgagtagggaaacgcctaccccccacggtagaccaattgtcatgacagtgaaggcaggaacgaccgtctacatcggcgagggcatccaagtacaactgcgaggcgcccacaagaacaaggcggaactacacgtctacgcaccgtcgacccattctgtggatagggcggtcactttccagccggactggaacctcaaaaacagtgacggcccgagcgcgccaacgcccgagccgtctgccacgccgcacccgtaa

SEQ ID NO: 501817 - DNA, 384 bp, Stenotrophomonas maltophilia
atggcgaataacagtgtacccccggcagagccggccgcagccccccgcctcgcaatcagcgagcactacctgacctccatgtggaaggacaaccctctttccgattgcctgaccaaccgcctggtccgggtcgaccagaacacgaaggccgccatcgccatcctggacgtcatccgacgcgacttcctgtccaagcaggatctgcgggatactagcgaggaggacgagcgcgtgctgtatgcccccctcagtgagcatgccgtggactgcctcatgctgggtatggagagcctcctctccgagtcggaggacctgctgacctacctgcgtgacaacgagcgggacgtctgccgccagccgttgaaggaggccgcccgtgtctga

SEQ ID NO: 501818 - DNA, 252 bp, Stenotrophomonas maltophilia
gtgtctgacactcccctcaccaaagaagagccgttcagcctgatcccagtgcaggacaatgccccgctgctcaaggtctgcgccgggatcgacacaatgcacagtgacctgaaggccaacatctacttcgactatgtccataggcggttgagcaacatggacagcgaaaggatcaccgatgacgacttgttcgtcttcgctgaccttctcgaaatatgcagggcgctgcgctatgccggaggcgcccaatga

SEQ ID NO: 501819 - DNA, 261 bp, Stenotrophomonas maltophilia
atgagccgctcggccaacctggaagagaccaaggaaatcgcaatccccggatcgccactgatggtggcatccggccaggatctggacgtcgcactgagcaaggccaggcttctcaccgatcacgtgcaagccctactgtggcaaggcatgcgagatgcaggcggcaaggatgtctctttcggatacgacgaggttgtgacgatggatttccttctcgatatcgcgacaggcctgtatagagccgcaggagccgaagcatga

SEQ ID NO: 501820 - DNA, 333 bp, Stenotrophomonas maltophilia
atgagcatgttcgatgacctggtcgatttggctcacctagaggccgagcctgactaccagctctccgccaaagcagtcagggacatccggcgcgcaatcacgttcgggatcttcgccgctgccgagggagccaagatcaaccaggcccgtgcatcggcgcagatgatggggcaggaatgtccagaggtcgctcactccgtcgcccctggagactcgttcgaacagaccatccaagagatggccggggcactgctgtggctggagtacgcgtcgcacctccgcaagcctggcgcgacttccagcgccttgagctcggctgaggaggcggcgtga

SEQ ID NO: 501821 - DNA, 3747 bp, Stenotrophomonas maltophilia
atggcttcgcgcaaattccgtttcatggccgcaggcggcgccgcactggcgctcggggggggctatgtcatctacagcctgatggcggcccaggcccagggcacgctggcgcaggcgccgctgaacatccaggtgcagacgccgccggccttcctgatggcgctggatgattccggctcgatgctgtgggaaacgttgaacaacacgcgcgatggcgtgtaccgctgggatggcagtggcttctacaaccagggtgccgtcaacggctacgatgggtctgggcagcgctacctgtacgtcttccccagctatggacgcgacgaccaggtagccatcccgccgctcgacagcttcggtttcgcccgatcgccggacgtcaacccgtcctactacgacccgcgtgagatctatcctggctggaagaccggcttgtccgatacagcccttgccaactatctggacatcagggcgtccagcgcgccgctggacccgcgtccgggcaatgcaccgaacaagatcgccggcgcgctggacctgactgtggactcgctgttgaccagcatggacaccggcgggcggaccggcgcgaactggcgcttccgcttccgttccggcatgacgctgccggtcggaacgcgtattgagcgtgggcgatgcaacctgagcggtggggctgtccggcaggaaggctcgttcgacaacgtgacgcgccagactaccatcagcagctcaagctgcgatgctgccgtcgccttctatccggctacgttcttcctggcagatccgtccacgctgccggcggaatatgggtacaccgcggctcctgttgccgttgcaaatcctccgggcggccgtccgggtacgttgtacaagtacgaaatcaagcttgcgaacttcggcaacaatcaagcgaagtacaacgctgccatgcagagcttcgccaactggttcagcctgtaccggacgcgacgcgaagcgctgatcggtgcggccacgaatgcgctgtacgacactaccaatctgcgcgtgggctggttccgtatcaatggccgccgcgcggtgaccatgttcaacatgaccaacgagccggagaagcagcagctgctcagccagatcatcggcgaaatgcgggccagcagcagtacgcccaatcgttccgccgcacagtaccttggcgaacaattccagcgcacggatcagaacgcgccggtactcctgtcatgccagaagaacgcgggcatgctgttcaccgatggctatatcaatgagtccggcaacacgacgctgatgaaggatctcgtagcgccgtactacaacagttctctcgtgccgggcaaggagaccaattccgtgccggtgccggccgagtgcaaggggccgaatccaaatccgtcgctggattgcaagacccacctgcacatgaatttctacggcgtgacgctgggcacgcagggcaaggagttcggcgtccggtacctgccggatccgctgcgcccgtgggtgctcagccccgacccgtacgtcgtcaagcccaacttcccgacgacgacgcaggacctcaagcctgaggccgttgatgagctgtggaacgcggtctatgacacccgcggtgaaatggtcaacgccacgcgcccggccgaaatcactgcagccatgcgccgcatcatcagcaacgtcgcccagggcgccacgccgtccggctcgcgttcgctgaccggcgcacgcatcggcgtcggctcgttgtcggttgagccgttctacgaggccaccaacaacggcaccgactggtacagcaagttgcgcgccttcaagctgagcgtcgagccgtccacccgcaagatcgtttcggaagaggcctgggaagcatctgcgaagatgccggcgcctgcatcacgccgcatccggttctggcgcaacggcgcgctggaagacttcaccggcagcaatgtcagcctggccaatctgtgcaccaagtcgtcgacgctgtatccgggcatcctgatctgcagcgcgtccgagctggccggcctgacaacggattccaccacggccgtggcctacctgcgtggtgaaacctccggcgagaagcgcaacggcggcaagctgcgtgatcgcagcacggtactgggcgacatcatcacctccaccccggtgctgagttcgcctctggatgactatgggtttggccgcctcccgggcacgatgggcagcagttacgccgcctacatgaccaccaagcgcaatggtcgccgctacatggtctacgccggcgccaacgacggcatgttgcatgccttcgatggtggcatgggcgccgacggccagatggacgccgacggtggcaaggagcggttcgcctacattccctcgaccgcgttgggccacatgggcaacctgttgctgcccaacgacccgaccaaccagaacgcccagcgtttccagcaccgttactacgtcgatggcccggtgacgatcagcgacacctacggcagcaacgggtggaccacgtcactggtgggcacggccggtgccggcggccgcagcgtgttcgcgctggatgtgtccgatccgggcaacttcggcgccaccggctccctgctgtgggagatcagtgacctcgatgcttcgcttgacgatgctgtgcgcgccaacatcggccatgtgctgggcaagccggtgatcgtgccggtgaagaatgccgacggttcggtgggcttcaaggcgatcttcggcaacggctacgagagcaggagtggcaaggcggtactgttcgtggttgacatggtggcaggccgcacgccgaccatccgcatgatcgaggcgatcgagtcgggtaccaacctgccgtcgggcagcaacgggctgggcaacatcgtggtggttgatcgctggggcggaaccgggcagaacgcgcaggtgcgcgatggcctggccgatacggtctatggcgccgacaagcgtggcgttatctggaagttcgacctgcgcgggaccaccgcgccaaccgtaccgttgttcaccaccgatacccatgtcgatcccgccgaccgccggacctaccgtcagccgatcaccggtggcatgacggtgaccaccggaccgtccggtggcgtgatgctgatcttcggcaccggcagcttctcctactacggtgacgagagcgatacggcggtgcaggcgttgtacggtatcaacgacaccgcagcgggccagccgacgacgacgctgacctcggcaaacctgagctcgtatacggccgagatcggttccggcgtgcggacattgcgtggcgggaccgtgcctacggtcagccgcggctggaccgtggtgctggccaacaaggagcgtgcggtcggtaatccgaggatcgtgtccggcgtggtgttcttcccgacctatattccgtccgacgctcagggttgctcggtggacggtgcgaactggttgctcggcctgcaggccagcaccggccaggccgcgatgtcgcaggtgcgcttcggagcccccgacggccgatcgccgggggcgggtacggccggcgttgctctcaacacgggcggcaacgcgccggtgagggacgtgacgacgtcagtggtgccgcgcctggcgccgccggacagcactcccggcaacccgccgccgcagccgcccggcgaggcgtgcctgatgcagatctcggtggccggtgctgatccgatgtacctgccgtacccctgcggccgtcagtcctggaggcagatccagtga

SEQ ID NO: 501822 - DNA, 1302 bp, Stenotrophomonas maltophilia
atgtcgacgatcaccgctgccgcgccgcccgtgaattccccccgtcgtgtcctgctggccagcctgatcggtaccacgatcgagttcttcgacttctacatctacgccacggctgcggtgctggtgttcccgcacctgttcttcccggacagcagcgaacaggcagccctgctgcagtcgctggcaacctttgcggtggccttcatcgcacgcccggttggctcggcagtgttcggtcatttcggcgatcgcatcggccgcaaagccaccctggtggctgcgctgctgaccatgggggtgtccacggtactgatcggcctgctgccgacgcacgcacagatcgggctgtgggcgccggcgctgctggcgctgtgccgcttcggccagggcctggggctgggcggcgagtggggcggggcagtgctgctggccacggaaaacgcaccgccgggcaagcgtgcctggtacggcatgttcccgcagctgggtgcaccgctcggcttcctgctgtcggccggcatcttcctggtgcttggccgctgcctgagccaggccgacttcctgcagtggggctggcgcattccgttcgtggccagcgcgctgctggtcggcctcggcctgtgggtgcggttgaacatccacgaaacccccgacttcaagcaggcgctggagcgcaaggcgccggtgcggcttccgatgtggacggtgctgcgtgaccacccggtgccgatgctgctgggtaccctgggtgcgttcgccaccttcgtgctgttctacctgatgacagtgttcagtctgggccatggcaccgcggtgctgggttacagccgcgagcagttcctgctgatgcagatggccggcatgctgttcttcgcgctgggcatcccgctgtcggcgcgctatggcgaccgctggggaacgcgccgtacgatgatcgtggccagcgtgctgatcatcggtttcggcgtgctgttcgcgccgctgttccagccgcacagcccgtggctggtcaccgccttcctgtgcctgggcctgttcctgatgggcctgacctatggtccctgcggtaccttcctggccgagatctacccggtggaggtgcgctacaccggcgcatcgctgtcattcaacctggccggcattctgggtgcggcaccggcgccctacctggccacctggctggccgagcgcttcggcctggtcgcggtcggctactacctgtgcctgaccgcggtggcgacgctgtgcgcgctggtggcactgcaccggcgcgcgctgcggttcagccaaagaagcgcttga

SEQ ID NO: 501823 - DNA, 1035 bp, Stenotrophomonas maltophilia
atggctgacgtagtggtccacgtcacctacatcaattcgggcgcagtggcgctcagcattcccgagagggggctacccagagtcctgcaggatggaaggctgtggaatgatgcgtttcttgtcgtttcgcaggatggagatgcagctgcatatcgcggaatcattgcccacctgagcgccgcagctcgagagaaaacgctgacgctggagcctggacagcggcttgttcgacaggtcaatctttccctgaactatgagcttcgtccgggtcagacatacaagatttccgctccgattcttagataccggattcttgacggtacggagactgcgggagcggccgcgatcgacaaggaggcttccacatctcccgtctcgttgctgatcgtggctccgctgcctcgtgcaggccagcgcgccgaaactgcgccgcaggaagcatcccgagtggcatcttgcccgccaacccgattaaaggaagtaacggcgggaattgccgctgcggcgggtatcgcccgcagttcgaagaactatctggagtcgctttatggatatgagtctggagaatcatccattatcgtgacgttcaaagagactgctcgctacaggtcgtggttcggtgagcatggcgatcctaacatcgcaaatccggtcaatgaccggatcagaaagacagtctcgggagtcgctacccggttcgcattgctcaagcaaccttcttgcgattgcccggaagagatggttggagacaccaatgcttggatctccactgcagttctctatgttgtgaattattgcccacgttttttcgatctcccgataggtcccaatgtggcctctgggtcaaaggcggcgaccatctaccatgaagtaactcatttttccgataccttcgcacttggaacgaccgatctggacgagcagtttccaagcccggaagacgcgcgctacgtcgctaggacggcgcgtgatctggcatctgagcattcatacggatacgagtacttcgctgacaatcatggcaatgagaactga

SEQ ID NO: 501824 - DNA, 816 bp, Stenotrophomonas maltophilia
atgaacatagagtatcgcttcacctttcgctggacagccaagcgcgcgctaaagctcgagcagatcggtgccactgttgatccgccatctgacttcagtggtgagtgcattattggtgtcgtccattcgacggaaggggctccagaatgggcgggcgtttcctcgctgattagggactggggcggctccttccttgtaacgacggatttttcggcgacagagattgccgctgctgattactgtgagctgcaggttacgcatgcaaatgggtatcctcagccggaagacgattttggctttagggcgcaaacctacgacacttcgaaatactgtgacgagtgcggagcctgggctgtccagaatgcgcctttccgtgtgcggaagtcattgaagtgggggcgtaacgcattcctcaaactgttctgggttgaagatgcgatcttcatgcataaggacgtttggcaagtgcatcttgctccacttggcattgagacgtggccggttgaggacaccaaggggaatgttgttgatgacatcgtgcagctacgtgctgacacgagcgtggcattgcagatggatgaagacttggaggttcgctgtccgaaatgtgggcgtgttcgctacacaggcccagagcgagggttcttgccagcgccagttggcaatccagaccttcccatcttccgcagcgagcagttctttggagcgggccaccagtcttccaacgccattctcatcaggcgggatgtggtcgcggtgattcagtcggccaagctgaggggagctaagctatggccttgtgccgcgccagaatag

SEQ ID NO: 501825 - DNA, 273 bp, Stenotrophomonas maltophilia
atgatgtttgctcagtccttcgtcaatgagcggatgtcggcgcacgttttctccgagtcctacatcgagctatggaagatcgagcgggatctcgacttgctggctttggataacggagcgctttcaacgtgcctgtccagcatcttctgtgctgccgacatgtattgcgacgaagatgtagatcgccatgcgtatgagcttgatgccgcccagctgcatgctgccgttgtggctctgatcgatgagtgtcagcagtccacgactgctcgctag

SEQ ID NO: 501826 - DNA, 156 bp, Stenotrophomonas maltophilia
atggcacagcagaaccagaacccgaaccagaagcagcagaaccagcaggatcagcagcagggtcgtggccgcgaccagcagcagcaacagcagcaggaacagcagcagcgcaaccagcgcaaccagcaacagggtgggcaggacgaggaagagtga

SEQ ID NO: 501827 - DNA, 2784 bp, Stenotrophomonas maltophilia
gtgcaggtgatcagcaagcaggacatccagaacatgggtgcgcgcacgctgctgcaggtgctcgacaacctgccggccgcacgccctgcgcagcaggatgcgcgctcgctgttcaccggttccgatggtgcctcgcaggccaacctgcgcgggcttggcgcacagggcacgctggtgctgctgaacggtcgccgcctgtcgtactacggtgcgccggccggcttccagacccagttcgtcaacatcgatgcgatcccggccgcggccatcgagcgcatggaagtgctgaccgacggcgcgtcggccgtgtacggtaccgacgcggtggccggcgtgatcaacgtgatcaccaagcgcaacttccagggtgccgagatcaacttcaccaacgacacttcgtcgcgcatcgattcctacggagagcgccaggccagcatcaccgcaggtttcggagacctggccgagaaccgcttcaacatctacggcgcggtgaacatgtaccgccgcgacgcgatcccgctcagcgacttctacgacaagcgccccgaccagtactacgtcaacaatccgaactacctcaacaacctgcgcctgggcgtgggcagcaagccgggcgagttcaacccgggcacctacttcgcgttcgatccggtcaccggccgccgcgtgcaggaagctgcgccgggctgcaggaacgtgctgaccagtgaagcggccggcccgcgttgcgtctgggaaacctggatgaacaacgagatcgatgccggcgccaagtccgagcgcaacaccgcctacctcaacggcaccttcctggtcggtgacaacaccgagatcttcgccgaggcgacctacaccgacatcgacctgcgcgccaacggcggcacgccgcgcacctacggcaccacgaccggcaacccgaccagctggttctcgcgcaacaccggcaacaacgtcaaccagttcctgtacccgttcctgggcccgaacaacgagtacaaccacgccagcccgcagttgaaggccatgatgggcggggtggtcggcctgaactacctgctgcaggatgccggcccgaactacttcggccagcgcaacacggacaagagctaccgcgtgctggcaggcgcacgtggcaatgtgggtgactggaactgggaaaccgcattcgccagcgcgggtacccactccaccacctaccagacgatcaacgtcaacaccaagggcttcgagaaggccttcggcccatacacgatcgatccgggcactggtcgggtgatcatctccgaccacccggcgtacaagttcggcgagatcagcgaagccaacgccgcgctgatccgtgaagcattcccgaccttcgacatccagtcgtggacccgcctgcataccctggacggcaagatcgaaggaccgctgttccagctgccagcgggcgagatgcgcgccgcgttcggcttcaatgccagccgtgagaccttctacactccgggcaacgccgatgcggccaacggcctgatcacccagcagggcggctcgtggttcgacggcaagcgcaacacctacgcgctgttcgccgagaccgtggcaccgatcaccgacaagctggaactggatgcggcggtgcgcgtggacaaatacccgaacttcagtgccaacatcgcgccgaagatcggcttcaagtaccaggcgttcgatcagctgatgctgcgcggcacctattccaccggcttccgtgcaccgagcctggccgagtccggcaacggcggcgtgttcgcccagctcggtggcttccgtgacgaattgcgctgcggcgagaccaatgccatcgccaacctgctgctgaagtcgcagcggccgggcgacgtcgatctcggcaagaccctgctgaacgtcgattgcagccgtaccgtcgcgcgcatgacccagccgaacaaggacctgaagccggagaaggcgaagatcgccaccctcggcttcgtctacgagccagcgagctggctgtcggtgtcggccgactactggttcatctaccgcaacaatgaaatcgttgcgccggattatcgccgcatggaagacatcatctcgatgtcgcgctcgccgatcaccgacagcgaccgcgccaacctggcccagctggcggcgatgtgcgccgacccggccagcggcgtgagctgcccagccaccctgccgggctactccgccggcaacgtagccagtgtggtcggccagtacaagaaccgcggcaagacgctgatcgacggcttcgacatcgacgcgcgcagccgcttctcgctgggcgactggggcaacctgaacatcggcctggccgccaccatcgccaaccgcaaccgcttctacatggatgaagccagcggctggtactacggcgatgttgtgggctattacaacaacccgcgcctgcgtgccacgctcaacgccgactggacctacaagcaggtcaccaccagcatgttcgtcaactatgtgggcggcaccaagtgggccaccgaccagatcgacgaagagagcaacaacaaggaaacctgcaccggcggctacctggccctgcagaagagcaagtgcgatggcgcaccgtcgtggtggaccgccaacatgagcgtcacctggcgcccggacgatgcgtggaacctgagcttcaccgtcaagaacctgttcaaccgtctgccgttctacgatccgaacagcttcctgggtgactccagtgactacgcaaccatcttcggccgtggttacagtgtgaccatcggctaccggttcaagtaa

SEQ ID NO: 501828 - DNA, 270 bp, Stenotrophomonas maltophilia
atggcgctgggcgcggcgaactacgtgacggtgcgcggggggcagatccacaacgctggcagcggcgaagtgatccgcctgcagttgaacggcgaccgcgcgcctttgccgggcactgcgcgcctgctcggttccagcagcgcgttcctgttcgtctggtggccgcagcagcggcgtaccgaggccattccgatcgcggcgttgcgcacgctgcaggcggctgccgtgccggtgccctcagccgcagtgacggcggggccgtcccgctga

SEQ ID NO: 501829 - DNA, 624 bp, Stenotrophomonas maltophilia
atgaagaatgtgaaccgagttctggcggccagcgcgctgatgcttgtactggcggcatgcagcagttcccagaccgccgacaagggcaatttcggcaaggctattcagaaatatcttgataccaaaaacggactctgcgctgctttgcccgcgcgggaactccccttcagactggccaacgatggcagcttgggagagcgcgcgcgcctgcaggccaacgccttggtcgaggccgggttgctgagccgccaagcatctgaaatgaaatcgatgtttggcacatcgaccgtaccggctggcgagtacgcgcttacttccaaaggaaagaagttcctcgtagaaggcggcgcagaaacaattgcaggtcaagcagcgttctgcaccggcaagttcagggtgacagaggtggacacctttaccgagcccagcgagatgatgggcgtgaaattgtctcaggtgaacttccgctacaaggtcgaagatgcggacagctgggccagatcgaaagaggtccaggccagctaccgtaacctagcggatcaagccaaggacgaaatcgatggcaaagcgacgctcgtgctgaccaacgacggctggatgcacgagcgcttgttcaagcgctga

SEQ ID NO: 501830 - DNA, 309 bp, Stenotrophomonas maltophilia
atggcgtcctgcttcggctatggccgcagcgacgcattgccacgcggccgctcatggttgcgggtaaccgtgctgaaggcggacccggcgctggcggagcatccggcagacatcgagctgcagccaccgctggatctgctgaagctgaccgacctggatcacctctggctgtggccgttcttcttctggaagatggcggcgctgttcctgctgattccaggggctgcgttggctgtctttactctggcgttgcggcgctggcagcgccgggcatcggtgccgccgacttcagcaagggatagggattga

SEQ ID NO: 501831 - DNA, 927 bp, Stenotrophomonas maltophilia
gtgaacgccccgggcagcgttgccggcaatgccgcgtgcaccgccgctggcgctccggccaactacgtgcagctgggccagggcaacctgccgtgctcgaccctgccgtgccagtcgggtgaccagttcgtctcgggtgccaacccgaacctgaagccggaaacctccaagagcaccactttcggcctggtgtggagcccgcgctgggtgcagggcctggacgtctcgctggattggtacaagtacgaaatcagcgacatgatcatcgctgacagcgtcgaccgcatcctgcgtgactgctacgtgctgggcaactccgagcgttgctcgagcgtgacccgtgcggctgacggccacgtcagtgcgatcacctacggcaccgccaacctcggcaagatggaaaccgaaggttacgacctgggcatcaagtaccgcctgccggaactggcgatcggtcagttcagcatcgactggaccaccagctacaccgccaagtacgacgagcagggccagaacagcgcgggtgacaacatcatgatcggccgcgtcggcgagccgggcctgttccgcgtgcgttcgaacctgggtgtcaactggcagtacggcgatttcggtgtgaactacaccgcacgctactactccggcatgaaggaaagctgcatctcgctggctgacggctggtgcgatgcgccgaaccacatggccaatggcgagaccgatccgctgcgtcacaccggctccaacaccttccacgacctgcaggtcagctggaaggcgccgtgggatgcgacgatcgccctgggtgcgaacaacgtgttcgaccacaagggtccgctgcagtactcggctccgaactcggcgttcgcctattacggcggcttcgatgtgggtcgtttcctgtacatgaagtacacccagcgcttctga

SEQ ID NO: 501832 - DNA, 192 bp, Stenotrophomonas maltophilia
atgagcgtctctgtgccgaccaacggtcggcaaccaccgcgcaccgtcggcatcccccgcgaccgcaaatcgctcttggggttgtcgcgcgcccagccgtcttacccggcgaacgtacccgccgtcgccacgtacgtcgccgtgtccgcccgtgttgcggatgacgccgcgttcgcggcaccgattacctga

SEQ ID NO: 501833 - DNA, 297 bp, Stenotrophomonas maltophilia
atgtacctggccgccgacgtggtggtgaaaaccgtgatgatcgcgctggcagtggcatcgccggccacctggaccgtactgctggccaggggctgggaggtggcgcggcaggcccggcagctgcgtgccgcacgcgcgctgttgctgcaggcacccagccgccccggcgagaacgctgacgccagcgtgcaggagggcatcgcacgggcgatgctggatgcaatccgtaccgaactgcacctgtcgcaggatctggtggggcgagcaaccgaaggcgccggtgcagccgcagggtga

SEQ ID NO: 501834 - DNA, 426 bp, Stenotrophomonas maltophilia
atgataccgaccgcaccgttcatgagtccggaagaactgctaaggcactctcaagccatatgcgacgggatgagcgaggacgaagatggactgcgccgggaggttttagcgcacgctggtagccgctggtccctgggcatcatccatgcgcttggcgtgtatggaacgctgcgtcatgccgaggtcgcacgacggatgaaggggatcacccagcgcatgcttacgcgcaccctccggcaattggagcgtgacgggttgatcagccgggaggatttccacgaagtaccgccacatgtggagtacagcatcacagcgctgggcaaggaccttcttgtactgatgattcccatgtggacatgggtagtggctcacgcggaggaattccgccaatgtcggcagaattttgattcttcagacgggaaatga

SEQ ID NO: 501835 - DNA, 816 bp, Stenotrophomonas maltophilia
atgctacgggcgacgtcgattgactcagcactgccggagaagcagcgggtggtcgatgaaatccgcgccttgggggtgaatatcgttgctggtgatctggtgactgaatcggtagaggcgttggcggctacctttgcgcagtttgacacagtgattggatgcaccggctatgccgcaggccgcgatacgccaatgaaggttgcgcgtgcggcggtgaagtcgggtattccccgctactttccttggcagttcggtgtcgatttcgatgccatcgggcgcggtggtccccaggacctgttcgatgcccagctggacgtgcgcgagtatctgcgttcgcagactgcgatggactgggtgatcatctctactggaatgttcaccagttacctcttcgagccggacttcggggtggtcgacctggttgggcataaagtgaacgcgttgggctcggcgagcaatgctgtcaccctgaccacgccggatgacatcggcgcaatgacagcgcgcatcgtgttccacgcacctgcgatccgcaacgagatcgtgtatctggcaggtgataccatccgctacggtgaccttccggatattctgcagaaggcgttcggggaacctttcgagctggtgatctggggcgtaccccagctcatgcaggaactggctaacgacccgggcaacatgataaagaagtatcgcgccgcctttgcccaagggaggggcgttgcgtgggatgtggagcgaaccttcaatacgaagatcggggccgagctacagggcgtgcaggcgtggctggattccaacgtgcagcgctcctga

SEQ ID NO: 501836 - DNA, 330 bp, Stenotrophomonas maltophilia
gtgttgaatgtcgtgatcgttgccgcgctggctgctggccccgctgcgtccgttccgtatgccgattgcctgctgggcaatatccagcccgggctgtccgatcatgctgtgcaactggtacagcaggcgtgtgccgcaaagcatccagacagttttcttgcctcgctggaactggaacgcacctacagcgcccagcggcaggcgcggttcgatgcggatcgtgcgacagcggtgcgggctgcgaatgccgccgccaatgctgcagccgttggcgcgcaggcagccaccgaacgcgaggcggcgcgggcgcgcggcgccaagacgaaatag

SEQ ID NO: 501837 - DNA, 429 bp, Stenotrophomonas maltophilia
atgctggacccactacgcccatacgccgaccttcttaaggccctggcggccttggcgctggccgccggcctgttcgtcacgggctgccagcacggcagcgaccgtcgagccgccaaggaccaggccaccatcgccaaggccgatcacgcgcgcgctgcagcagaggctgacgcggccgagaacctgcgcgcggccaacgcctgcgggctgctgctggaggacgtaaaccgccagacccaggcggccatcgatgagtcggtccgccagaagtccgcagcggatgaggctgcgcgccgggcggaagcggcggcaggcgagagcaaacgccgggccgacaaagctgagcaggcgctgcaggccgccaagagcaagccggcatgccggtcccaactggagatggccctgtgcgccgacataccgctgctttga

SEQ ID NO: 501838 - DNA, 255 bp, Stenotrophomonas maltophilia
atgctggtcgcggtgctgccgctatgtgggttcgggagctgcagccaggtcgagaagccggcgctgcccaaggtggtctacgtgacggtggagaagccggtcgcgccgccggacgctttgacccagcagtgtccgattacccgggcacaggaccggacggtcgagcaggtggtgtcggcctacaacgccaacatcctgagcctgcagcagtgcaacaagcagctgagcgagattcggcaattgggagcgaaatga

SEQ ID NO: 501839 - DNA, 363 bp, Stenotrophomonas maltophilia
atggccggcaaggttggtgcggggcgccgcatgctggcgctgggccggttgaagatcggcgaaatgaacaagaccgaggcggcgtatgccgagcggctgcgcgcgctgcagtctgctggtgaggtccagtggcaccggttcgaggggctgaagctgcgcctggccgacaacacgttctacacgccggactttgcggtgctggaggccgacggtgtcatggcctgccacgaagtgaaggggcactggcaggacgatgcacgggccaagatcaagatcgccgcggccatgtacccgttccgcttcatcgcggtgagggccaggcctaagcgggatggcggcggctgggcagtggaggagttctag

SEQ ID NO: 501840 - DNA, 222 bp, Stenotrophomonas maltophilia
atgaagatccacagtttcctgtttggttgtatcgctgccgctaccgggcttggcgcgacgatgggcgtagttcctcaggcgcaagcagcgtcatacagcacgagctgctatccgaccggaggcggctggtactcctgcacgcagaagttctgccatgagggtcaatgcgtggtcaccgatagctggagcgagttcaggaaggaagcaatcgtcttcgactga

SEQ ID NO: 501841 - DNA, 210 bp, Stenotrophomonas maltophilia
atggacggacgaattgatcgcctgcttgctctggccgaacagcagcacgccgccatcgtggagcagggacggcatatcgccgaactcgcgatgcacgtcggactgctggtgcaggccgtggcgcagctgctgggcgaggaggccggtacgcaggtgcatgacgaaggtgccgagtccgagcgagtcgacttggacgggaagccctactga

SEQ ID NO: 501842 - DNA, 378 bp, Stenotrophomonas maltophilia
atggcggcaggcccgaccccgcgccgcggcaggacccggcagacaggcggcagcgcctttgcacacctgtttggcaccgcgcgctggcaacgcacgcgcaaggcgcagttggaccgtgagccgctgtgcagcaggtgcaatgccagaggccacgtcacggtcgccatcgtgtgcaaccacaccaacggccaccctgctggagagacggaagagatgttctgggcaggacccttcgacagccagtgcgccgactgccacaacgtcgaccaggcgcgtctggagcgcggtgcggtgcaggtccgagggtgcgatgaggacgggtggccgatcggagcctggccggttccacgacaccaggatccacgccgcgcagggtag

SEQ ID NO: 501843 - DNA, 2208 bp, Stenotrophomonas maltophilia
atggcggtgacgaagacgaccagggcgaagaattcttcggtggcccaagctccggccgaccgcactaaggcgtatgcgctggatgtggtggctggccggatcgttgcaggcccccatgtccgaaacgcctgccgacgccacctgcaggatctgatcgaaggccccgaacggggcctttactttgaccacgaggctgccgagtacgcgttccgctacttcgagaacgtcctgatgctctccgagggtcagttcgagggccggaagttcgagctgcacccctcgcaggcgttcatcatcggctcgctcttcggctggaagggcgccgacgggcttcgcaggttccgtcgcgcgtacatcgagcagggaaaaggcaacggaaagagcccgcttgccggtgggctgggcctgctggggatgacggccgcaggcgaggctggcgcacagatttactcggcggcggcaaagaaggaccaggcgggcattctgttcgccgacgcggtgaagatggtcaagaagtcgccgctcctggccaagcgcatcgagttcgccggcggtgagggtcgggagttcagcatggcgcaccacgccagcgcgagcttcttccggccggtgtcgcgcgatacgggccgcaccggctccggtcctcgaccgttcttcgtgctggtcgatgaggtgcacgagcttcccgaccggcgaatcatcgaaatgctggagcgcggcttcaagttccgccgcgagcccctgctcttcatgatcaccaactccggcagcgaccggacctcggtgtgttgggaggagcacgagcatgccgtcaaggtcgccgccggtcataccgaggcggtgaacgatccgaccttcgtcggcgacgttatcgatgaccgcaccttcagctacgtgtgcagcttggacgacggggacgacccccttgaggatcccagctgctgggcgaaggccaatcccctgttgggggtaactatcaccgagcagtacctggcggacgtggtggcgcaagccaaagcgatccccgggtcactgaacggcattcttcgtctgcacttctgcgtgtggaccgatgcggagaccgcctggatgacgcgcccaacgctggaaccggcgctggccgacttcgacccgcgcatgcatgaggggcgcaaggtctacctgggcctcgacctgtcgcaggttcgcgatatcaccgcgatggctgcggtcgtggagaccggcactgtaccggtggaggtggaggtcgagggcgagaagctgatcatcgagaagccgacgttcgacgcctggatcgaggcttggacgcccggcgacacgttggatcaacggcaattgcaggacaagctgccctatcgcacgtgggtcaacggtggacacctgcacgcgccacaagggcaggccatcaacttccggcacgtggcccaggtcatggccgagtacgacagccgctatgacgtgcagctggtcgcgtacgaccgctacgcgttccgccgcttcgaagaggaagtcaacgacattggcctatctgtgaccttcgcggagcacccgcagggcggttgcaaaaagggcaagccactggaagcggcggtggaagccgccgagcagtcggggcagcccgtacctgaaggcatgtggatgcccggatcgctgcgcctgctggaagaggcgctgctggaggatcgacaaggctgccggcggcggattccagttcaacggcatggtggctggcggatatcgcctgaacatcaccaaccagggcgtctacatctactacccgaacggcaatccggccgtcgaacttggagtgctgctgtaatggccgatgtgggtctgcgggtgaggagcgagggcgggtatgtggagaccacggtcaccacacgcctgaccaagatcatcgggtcgtacaccttcccgctctacagcccggtcaactccaacaacaagtgggtggccccgcccgaggcgaatggagggctcatcgtcaacgacttttccggcggtgagcccttctactacttcacctgcgaagggcagcggtcggcctacggcatgctggtgccatcggtgaccatctccgggaacagcatcaactggagctgggatcctgacgtggtgaactaccacgtcaggatggagatgtttccgagccagccgaccacgaacaccgtcggcggtatcacccttcactacgggatctacagctga

SEQ ID NO: 501844 - DNA, 564 bp, Stenotrophomonas maltophilia
atggctgttggactacgcgtgcgaaaccaaggcaccggccaaatccagattggcgccggctatcggaacctgcaactggccaagtcgggcacgctcgataccggatcgttctccggcggcgcgaccggtggatcgccgccgttcgcctcttggccagatcgtgggttcctggccagcaccaacggcacgtccaacctgcacgtctgccgatatgtgaacgactcagtgtcggtgaataccggcttcagcttggtacagagcggcgtgacgtgctttgcatacgcatcgaggtcggctccaaacaagtcgctggagtactacacgttcagcgccgctgagcgcgcagcttccggtccggtggggctgcggatgcgtggtgaagatgggacggtcttctacgactccaggcggaacggcctgcgcgtaatgcaggtggtcgccttacctgcggtggctggaccgcctgtagagatcggccagttcttcccgggcaccaagatcggcatcgccatcccatgccgcggttctactactcgtccgtggcgcaggaccgttgcacgatga

SEQ ID NO: 501845 - DNA, 177 bp, Stenotrophomonas maltophilia
atgaacgccgactatttccacatgaccagcgacaacaggatcttcctctctaagcaggctgtctcccagcagactctgatcaccaacacgttcccagtcggtggtgtgactatgggccctcagaacgccacgatcttcatcgtggacctgaccgaggtgccgctagggttcggctga

SEQ ID NO: 501846 - DNA, 357 bp, Stenotrophomonas maltophilia
atgagcgtcaactgggacttcggtggctacttgcaagaggggtggcacattgagggaacgttgggattcatctccttgacgccctttgagaacagcctgccaattcgcgagtgtgtttcgcatacgccttgggattcgttcactagcaccgacgtgaactgtgaggggcagccgatgctgcctgacccgaaactcaggggctacatctcgcaggcacagttgccgggtactgttccgctgtaccgctgccggcacttctgggaggggaagcagcgtcattacgacaccctgcgcgcggattgtgacggcaatcctggcgccatctcggatggcattttgggctacgtcttcatgtaa

SEQ ID NO: 501847 - DNA, 237 bp, Stenotrophomonas maltophilia
atggcgggctactacgagtggtcggtgagcccgatcgacgagaagaaggatccctggttcatccacgccactagtccgcagctggccgcttgcctgtgggaggacgccagtcccctcctacccgacggcaacctgggcacctccaccgtcatcactgccgacagcagctgtgtgtcggccaatatccagaagcggacggcaacacttgagatgagtgggctggcgaagccagtttga

SEQ ID NO: 501848 - DNA, 228 bp, Stenotrophomonas maltophilia
atggccagagtcgataagggcactaccaagatcggcttcatcaacccgaatggtcagaagaacgtccgagccacaggtctacccggaacggatcatggccagagcatctatgtgctgcactgccagttctgcggggagagctacggggccaacggtagcgacatccacctccgcaagtgcccagtctgccaaggtggccgaccggggttggccttcagccctgcgtaa

SEQ ID NO: 501849 - DNA, 240 bp, Stenotrophomonas maltophilia
atgaaaattggttttgttggacccaatggagtcgatctaggcgaactgttccagccaatatctgcaggtgatcaaaaggtcgaggacgttggctttgtctgtgccggtcaggacatatcggcattcttcgctcgtcgcaccgggaaacatcccccgatcatgaccaactttaaggtcaaagatggccgtgatctcggcgagatcttcgaacctcgcgcgaccgatgtaaatgcgtcctag

SEQ ID NO: 501850 - DNA, 420 bp, Stenotrophomonas maltophilia
atggagattgacctcaatccagagcctaacacgttgattcttaggaactctggactgggccctgctctagtggactcgataaacgcagtatttgacggtaagacctacgatcttcttgtagaaaaccagcttgaggcgttcgttgcgcagatgataagaggactagttgccgctgaaaccgacgagactgaggaaggccccctcagtcatcagttcacagtcctgtccaatcgcaccgtcatttccgccggggagacaatgccaatcatcttcattcatacggaagaggaggaggactggaatgtcatacacggacggttcgcgaatacacaactgaagatcgagtatcactcaatctacaaggagcgcgacaccgccttccttgactactctgcggtaaagaccagccttcagccttga

SEQ ID NO: 501851 - DNA, 696 bp, Stenotrophomonas maltophilia
atggccagcatccaacgatcggggaacaagtggcgcgtgcaggtgtacgtggcaggcgttcgcgactccactaccaagcacacaaagcaggaagccgcgaagtgggctcttgagcgcgaggctgagctgcgtggcgggaaactgccagataagtcgctgcgcgaagctatgcgccgctacgtcaaggaagaggcgcccaagcgagctggcgaacggtgggagtcggtacgcatcgccgcttgggaacggtccctgcctctcttggataggcgaattgcgacagtcagcagttcggacatcatcgcttggcgagatggaagacttaagcaggtcaagcctgggacggttgctcgcgaaatgaacctgatgcggtccgtattcgagaccgcgcgccgggaatggaagtggatcaagcaaaaccccatgtcggacgttcgctggccgcagcagcctaaaggccgcgcgcgacgcgtatcttcaaccgaggaagccgatctgatcgcagcgttcgggctcgacaatggtctgtcggcggagacggccacccagcggacgggcttggccttcctgctcgcccttgagacagccatgcggtctggagagatcctgtcactgaccggccgaacgtgcatctatccgagcagtacgttcatctacccaaaaccaagaacggtgatgcgagagatgtgccgctaa

SEQ ID NO: 501852 - DNA, 348 bp, Stenotrophomonas maltophilia
gtgagtcgtgacccgtgggtggcgctggaaacccagcgtcaccgccggcactggagacaatggccgtggggcctgatcgcgctggggctgtccgtggtgttcaccgcgggcatgttctgcctggtactgatcggtgctgcgtcggtgcggccaccgggtgatggcagcagcgcgctcgatcttcgggcgtatttcattgcgcttgtggtcggagagctgctggccagtgcagggtgcgtcgcttcggctgtgctggcctggcgattgaaccgtggcaaggtgccggcagggctggcgatcatcctgctttctctgtggatcggcaccctgttctacggatggctttga

SEQ ID NO: 501853 - DNA, 393 bp, Stenotrophomonas maltophilia
atgctctcggacggctgtgcagcgtttgttgcggctcatgcctgtggtgaggcgaagcagaatgcggcactcgcgatgatcaaggctgcattgccagtcatcacatccatcgactgggagcgcgtgccatcgcgcctggaggtccccgcggtggggcgggagcggctggcgcaggagttgagcgccatcgcagatgctgttggcttgccaagcgaggcagcgttgacggttgtccaggtggatggggcggtaccttcgctgggcagccgcctgcaggactggctggttcatgccgacgagctggatttcgtcgatacgctgttcctgtcgatggaagacagggttctgatccattgggacttttacaagaaccttcacgccgtaaggttctga

SEQ ID NO: 501854 - DNA, 1044 bp, Stenotrophomonas maltophilia
atgcgaacctccctgcccgccgccctgctggccctggcctgcccagtgagcgccattgccgctgtccccgccaagagtctttacttccagcatcacgactggatgctggcctgcgacaacacccgtacctgccgcgccgccggctaccaggacgatgtcggcggcaacttgccggtgtcggtgctgctgactcgcaagggcggacccgaccagcaggtcagcgccgaactgatgctgggccagtacgacgaggtcaagctgccaacgcggctgtcgctgcagatcaacggcaaggatctgggcgcgctgacaatgaccgacggcccggcaacgctctccacggcgcagacggcggcactgctggcctcgctggcgcgcagcagccgcatcgtggcggtcggcaacgatggccagcgctggacgctgtccgatcatggcgcctcggcggtgcttctgaagatggacgaatttcagggccggctggagactcccggcgcgctgatgcgcaaggggtcgcgcgccgaagcctcagttcctcccgcacttccggtgcctacgctggttctggcgccattggtggcggcacgagccaccgatgccgcactggaacactcacccgcactgcgcgcggcgctggccgcggccaacccaagcggcgactgcgtcgcactgacacccgaaggcctcccgatggtggacggcccgcaggagctgcgcgtgacccgactggggaggacttccctgctggtgtctacgctctgctggcgtggcgcctacaacgaaggcatcggctattgggtggtgaacgatgcgccccccttcaaggccacgctggtgaccgcatcgggcggcgatgacgatggtcgggtaatcaattcggcacacaaggaccgcggtctgggcgattgttggtcaaccgcgagctggggctgggacgggcgccgcttcgtgcagaccgatgaagccaccagcggtctttgccggttggtcgcggccgggggtgcatggcacatgccgacgctggtgaccgaggtgacgccctga

SEQ ID NO: 501855 - DNA, 1053 bp, Stenotrophomonas maltophilia
atgagacacgctccgctcgccttcctgctcgccctgtcaggatcgatagccacagccgccccagaatcccacgaagggttgttctatcagcacctggactgggttgtcgcctgcgacaatacccgtacctgtcgagctgccggccactccggcagcagtgacagccctttgagtgtcctgctcacccgtaagggtgggccagatcaagtgatcgagggccgcctggcactgcaaccggacaagggccaggcccagcccaagggccttctgaacctgcgaattcaaaagcaggacctgggcgctttgacgccggacgccgtggccggcatgtactcaatgagtgccacccagacccgcgcactgctgtccgcattggttcgtgatggaggaatcaaggtaaccgataccaccggccagcgctggacgctctcggacaagggggcggcagctgtgctgctgaagattgacgagtaccagggtcgtttgggtactccgggtgcgatgctgcgcacaggcagctcacctgaagccggagtgttggtcgcgcaaccagcaacggtgatccgtcaggcatccacgctggactctacgcgcgatgacgcggcactcaccaggattgcggcctctgtggaactcagagctgcattgctcgccacccccaaaggaccacattgcgaaggattactcgaagccaatctggatccttcgatcagcaactcaccactgaaggtccgccgcctggacgcagtgcatctcttggtcagcgttccgtgctggcatgcggcccacaacgacggtgtcggctactgggtcattcgcgagcagcccccattccaaccgagctgggtaaccaatgacgcctaccactatgagaatggccagatcgttgcctacagaagggagcttggtccagtcgaatgcacattcgagtacacgtggacctggaatggcgcacgcttcattggaacctccgccgtgaggggtgtcatgtgcggtcctcacgcgctcgatggcgtctggaagctgccgactctcgtttcagaaatacgctga

SEQ ID NO: 501856 - DNA, 294 bp, Stenotrophomonas maltophilia
atgtcccgtatcacccgtcgtagctacaccgatgagttcaagcaccaagccgtggagttggccgagtcgctcgggccggccgcagcggcccgtcagctggagatgtcggtcaagacgctggcaaattggcttgacgcggtccgtgctggccggtcgttgacctctgaggctcgcaggccagccaccgacctggaaagcgagatcagccgccttcgggccgagaacgccaatctgaagatggagcgggaaatcctaaaaaaagcggcggcgttctttgccagagagtccaagtga

SEQ ID NO: 501857 - DNA, 1128 bp, Stenotrophomonas maltophilia
atgttcggtatgaacgcattggacatgctgcagaacctgcatgtgtcgtcgtcggtgggtgacttcgtcttctttcggctgatcctcgattaccttcacaaggaaatcgcggatttcggcgtcgaactgctgggaagaatgatgaagtgggtcggcgccattgcgctgacgctgatgacgctgtgggtattcatccagggtttccgcatcgtgacggggcgtagccgcgactcgatgatggtgctggtcaccaatatggccaaggcggcattgattgtctctgtggcaacgaccatggcgatgtttggccgtgatcttcatacgttcctgaataaagatgtgaagaatgaaatcacccaggttatcactggcaagaaggactcgccggaagatctgatcgacgagaacctcggctacatgcaattggcgctttcttccgtcgattcacttgatgtgatgggtgacgttaccctggacagtgccaagacccgtgcgatgtggttcatcggtatggggaccggcggcccggcggttacggcggggtcgatgctgctgttgtacgaagttgcgctggcgttgtttattggccttgggccgctgttcattctctgtctgctatttgatcagacgaagcagttgttccagaagtggttgatgtatggcataggcacgatgttctcgatggcagtgctcgcagcgatgacggccatcgcgatgaagttggtggccaaggtcgcgctgtcgttctggggttcggcgttggtgggtaccttgatgggtaacaacttcaccgagggtatgtccagcatggccttgcagcagggcggcatgggtctgattctgacgacgttgattcttacgtcgccgccgatggccgcaatgttcttccagggcacgctgggtagcttcatggcctattcgcagattggcggctcgcccgctgcacagccgggccctcaagggcagccgcccggctctactggcggctcctcgtataagcccaatgctcccagcaacaaccaggcgttcgaggcgccagcccagagctcgatgccacgatttagcggtgcaacggatgcacccgcgcaggccgggcagcgtggcaatgctcccgcagtaaatgtctga

SEQ ID NO: 501858 - DNA, 666 bp, Stenotrophomonas maltophilia
atgagtgccgccgacggtgtgaaaagcgcgaattccttgaattccatggagaagaacatggtcgccattcgtatcaaaaaatcatcgagtgccaccaaccgcgtcaggaacacgatgctggcgctatcactgaccggaatgatggctgttccagttcaggcctacacacttccagttgtcgagatcggtatgaatctcttcaatggcacgatgacggaggttcatacccttgcggcgcaggcggaggcattcgccgagtatggcgtccaggctcagcgatttatcgagacgacgcagaactgggcgcagaaattggcaaagttcaatcagatcattgcgagcccactcatgccgactggggtgaccctgaagccggttccggctgaatggaatgttgccgagcgctgcggtgctggatcgatcatgagcctgctgttcaatacggaaggtgcgctgtcagagaccgtcactaatgcgacggtttcggacatctacatgcaggcagattttgccacctgggagaagaaggtgggtgcatacgatcggcagatccaagcgcttactcgtatgcagcagatgctggctcaacgcgcgctgaagggaacgccgtctcccgtggggaccatcatcaaggcctctgcactcaaggctgcgctctcgaactga

SEQ ID NO: 501859 - DNA, 507 bp, Stenotrophomonas maltophilia
atggcaaccaagaaagctgcgaagaagaagcccgccgccaagaaagcggtgaagaaggtcgcgaagaaggccgctgccaagaaggcagtgaagaaggtcgcgaagaaggcgactgccaagaaggcagtgaagaaggctgcgaagaaggtcgccaagaagaccactgcgaagaaggcagtgaagaaggcggcgaagaaggtcgccaagaagtccactgccaagaaggccgtcaagaagaccgcgaagaaggcggccaagaaggccaccaagaagactgccaagaaggctgcggcccgcaagccggccaagaaggtcgcaaagaaggcgactgccaagaaggccgtcaagaagaccgccaagaaggcagtaaagaagaccgcgaagaaggccaccaagaaggctgccccgaagaaggcagcgaagaaggttgccaagcgcaagccggccgcccgcaagaagaaggccgctccggtcgctctgccggcaaccccggcgccgctgatctaa

SEQ ID NO: 501860 - DNA, 915 bp, Stenotrophomonas maltophilia
atgaacctgctggaaagcatgcgggtctacgtgctgatcgtggacaagggcagcctcagtgcggcagctgcggcgatggacatctccgcgacgatggccggcaagcatctgcgtgcattggaagcacggctgggcatgcagctgttgagccgaaccacccggcgccagcacacgacgccgttcggccaggactactacacgcgctgccgggagatcctgcgcctggtggacgaaaccgatgcgcaggcgcagcaccagcacctggcaccggcgggcacgctgcgaatcagtgcacccgtgatctttggtacgcatgcactggtaccggcactggccgagtacatggcgcgccatccggatgtccgggtcgaagcgacgctgactgatcgcgtggtcgaccttgccgaagagggcttcgaggcggcactgcggatcggcacgctggccgacagcagcgtgctggtggcgcgagccctggccccttatcgcctgatgatgtgcgcctcgccggcgtatctggccaggcatggcacgccacgcagcgtgcatgcacttgcctgccatcaatgcctgtcgttcgaaccgagtgcgcttgcacagtggctgcaggacgacgctggcgagctcgaccacgtgcccgacggccgactgcagatcaacaatggcgaagcgctgcgttcggcggcgctgcatggcctgggcatcgtcctgcagtcgacgctgctgctggccgccgatgtcgaggcggggcgtctggtgcagctgctcccagggcacggccaggccggtcggccgatgcacgtggtctatgcgcacgaccgttaccactccacccgcctgcgcagcttcctcgacttcctggtgggacgattcccgccggtagtcaccccaccaggcgatcgaagcggcccataa

SEQ ID NO: 501861 - DNA, 171 bp, Stenotrophomonas maltophilia
atgctcggctggaactccaaggcagccgggcatgggctcggccctacaggtctgattgccaacccgttcagccgaccgcgctggaaattccagagttgtgaccgcctgcgctatattgccggttccgccgcaaccgggctcggcccggccaacgcgtcgcggcagagctga

SEQ ID NO: 501862 - DNA, 1818 bp, Stenotrophomonas maltophilia
atggcgctggttttcagtgacgacatctgggaccgctggcggttgccggccttggcgctggccgccgccgcgataatcgtggtgccgtggttgaccctgcgcaaactgcagcaggacagcgaacaagcgatggcctgggtcaaccacacccaggccgtgggcctggcactgcagcagctgcaggccgatgtgcgcgatgttgaatcggccgcgttgaccctgtccaagggcgtggatgcccccggcctgcgcgagcgcatggcgcgggccgatgaaatacccgggcgcctggccgaactgggccggatgacccgcgacaatcccgaccagctgatccgcatcggtcggatcgaatcgatgctggaaggccgcatggcacttgcccgcgagctggccaggtccgaaccgaacagcgaccagcgcgagctggtgcaggacctgagtacgcgctatcccatccgcgggctggtggaagaactgcaggccagcgagcagaagctgctggcactgcgcggcgagcaggcggcgcgtcaacgcaagcagaccgaactggtgtcgtggagttcgctggtgatccagctggcgctgctcggcctggtgctgtggctgctgcagcggcagatcggccgtcgcctgcatgcggagcggcagtcgctgcgctcggctgcacgtgcggcgtcggtgctgcagaccgtacgcgaaccgatcgtgctgctcgaccgcgacctgcgcgtgcagctgcacaatccagcattcgctgagctgtacggcctgcaggacgagcgcgccgacggcctgttgctggaaaacgttggcgacaacgcatggcaggatccggtggtccgacagcgcctggccgacgtactgtcgcgcggtcgcgaactgtgggacttcgagcacgagcagcgcaccgccgacggcatggtgcgctacatgctgctcaacgcgcggcgcatgccgctgcccgacaccgatgacgaggtggtgctgctgaccatcagcgacgtcaccatgcagcgcgcagtgcagctgcgcgtcgaagacctgaaccgccagctggaaggcaaggttgcgcaggtatccgaggtcaaccgcgagctggaggccttcagctattcggtctcgcatgacctgcgcgcaccgctgcgccacgtggccggattctccgacaagctgtcgcgccacctcggcgatcaggccgatgacaagagcctccactatctggacgtgatttccagttcggcccggcgcatggcagcgttgatcgatgacctgctggtctactcgcgccttggccgcgcggcgatgcggcagcaggcggtggacatgcagtcgctggtggccgacacccgggccatgctcgattccaacctgcaggccgaggccgagaacagcggccatgcgcaccaggtggagtggagcatcgcgccgctgccgatcgtggtgggcgacgagaacatgatccgccaggtctggctcaacctgctcggcaacgcagtgaagtactcgggcaaccgcgagccggcgaagatccgcgttgactaccagcagcagcccgacggcggccatcagttcacggtcagcgacaatggtgcaggctttgacatggcctacgccggcaagctgttcggtgtgttccagcgcctgcacaaggccagtgactacccggggaccggcattggcctggccagcgtgcgccgcgtgctgacccgccatggtggccgtatctgggccgaggccgaaccggacgtcggcgccaccttccacttctacctgccccccgcgaccgacgcggacaaacaaggtccctctgcatga

SEQ ID NO: 501863 - DNA, 1512 bp, Stenotrophomonas maltophilia
atgcccctgaccggtcccgccctgggggcgctgcgcatcctgctggtggaagactcaccggaagatgccgagctgatgtccgaacagatgctcgacgcgggcctggacgcccgcttcgagcgtgtcgagagcgaggcggaactgcgccaggcgctggctgtgttccagccggacatcgtgctgtccgacctgagcatgccggggttctccggtgacgacgcgctgcgcatcgtgcgcgagacctcgccggaggtgcccttcatcttcgtctccggcacgatgggtgaggagaatgcggtggcggcgctgcagaaaggcgccaacgactacatcatcaagcaccagcctgcgcgcctgccgtcggcggtggcgcgtgcgatccgcgatgcacgtagtgcggtcgagcgtgcgcgggtggaaaccgaactgatgcgcgcgcagcggctggaaagcctgtcgctgctcgccgccgggctcagccacgacctgcgcaacatcctgcagccgttgctgatcatgccggacctgctgaaggcccgtaccgaggatccgcagctgcaccacctggccgacgtcatcgccgagtgtggccgccgcggccatgagatggccgagtcgatgctgtcgttcgtgcgtggttcgcgcaagccgagcgagcgcatcgagatcgacggcctgttcgatgcggtggcgctgctgttgcgcagcaacgtgcccgatgccgtgcgcctggaactgcaggtgcaggacgaaggcttggcggtcgacgccaactacaccgaactgcagcaggtaatgctgaacctggcgctcaacgcaatccaggcgatgccaaacggtggccgcctgagcctgaccgccagccatgccgggcagcgcgatggcgtggactggatgcgcatctgcgtggccgatgaaggcatcggcatggatgcggatacgctgtcgcacctgttcaatccgttcttcaccaccaaggccgatggcaccggcctgggcctgatttcctgcaagcgcatcgtcgaaggcgccggcggcagcatccatgtcagcagccaaccggggcagggcacctgcttcgagctgcgcttgccgatgcacgaagccagcgacggcagcgagccgatcgagcagctggtggccctgggcagtggccagtcgatcctggtggtcgacggcgaagccacgcgcctgtcgctgctcggcaacgcgctgtccagccaggggtatcagctgcagctggcctccgatggcccggcggcgctgcgctggatgcagcaggaggcgatgccggcgctggtgattgccgacgccggctcaaagctgctgccggccagccagctgctgggcgagatggccgcgctgggctatcgcggcccggcgctggtgctggaggacgcggcggtggcggtgcctgccgatgccttcccggccggcgtggaggtgcatgtgctgcgcaagccgctgcagatgcagcaggtgttccgcgcggtggccgaagcgctgggctga

SEQ ID NO: 501864 - DNA, 2664 bp, Stenotrophomonas maltophilia
atgaacacccgcaagaccctgctttcggccgccatcgtcagctgcatcgccttcagtgcgcacgcgcagcaggcggccccgaccgccaccgatctggacaccgtgaccgttaccggcatccgtggctcgatggaaaaatcgctggacaccaagcgcgaagccaatgcgcgcgtggaagtggtcaccgccgaagacgtgggcaagctgcccgcgcacaacgttgccgataccctgcagcgcctgccgggcgtcaacatcagctcgtccagcgccgacgagggcggcttcgatgaagccgaccgtgtcagcctgcgcggcaccagcccgagcctgacccagaccctgatcaacggccacaccgtcggctcggccgactggttcgtgctcagccagggcaacaacgtcggccgcagcgtcagctactcgctgctgccgtcggaactggtcagctcggtggaagtgaacaagtcctcgcaggccaagctgcaggacggcggcaccaccggcaccgtcaacatcatcacccgcaagccgctggagttctccaagccgttcaccgcggaaggctccatcggtgcggtgcgttcggacctggccaaatcgaccgatccgcagtactcggcattgttcaattacaagaacgacgaaggcaccttcggcgtgatggtgcagggcttcagccagaagcgcgaactgcgccgtgaagctcaggaaatcccgggtggcttcttcaagatcggcgcaaacgatccggtcgccagcaccaatccggacctgatcggcgtcaacgttccgggcctgctgggttcgaccctgttcgaacagacccgcgagcgcaagggcggcctggtctcgctgcaattcaagccgagtgacagcctcaccctgggcctgaacggtttcagctccgaactgaaggcgaacaactacaaccgcaacttcatgatgttcggcaacaacttcgccaagtcgcaggcgcccaatccgggctatgtggtcaaggacggcgtgctgaccaacgccacctatgcaggcgtgccgggcaccaactacgcggtgtacgacatgatctaccgcgagtcgaaggccaagtcgagctatgtcaccttcgatgccgactggcagatcagcgacagcctgaccgccacgttccaggccggcagcaccaagggcaccggtgagacgccgcgccagtacatcgccgaagtgaccctggccggcggcggtggcgccaactgggccacccacggcaatggctcgccgatcgactggaacgtaggcggcgacatctcgcccaacggcgtgaccagcttcggcacctggggcaaccaacaggtcaccgctgaagacaaggagaagtgggccacgctcgacttcaaccagtacttcaacgatggcggcgtgctgagctcgatcgacttcggcctgcgtttcgccgaccacaagcgcgaagcactgtcgccggaaggcgcaacgccgggtgacatctggagcgcgctgaagaacggcgcgacggccaactatcccagcggctttgccggtgacatcggcggcaccttcccgcgcaacctctggtacttcaccccgggcgcgctgaaggacgcggtgaccaacaactccacctggctggccggcaatgatggcccgaccggtcgccacaactacggcgccgagtggaaggtgaaggaaaagaacttcgccggctacgtgcaggccaacttccgcggcgactggtggagcggcaacgtcggcctgcgctacgtcaacatcaagcaggacatcgacacctacaacgccgtcagcaaggccgcagatgccgatgtcagcagcctgttcggcatgtgggagcgcctggccttccagaacaagcgcaaccgtgttctgcccagcgccaacatcaagttcgacctggacgactcgctggtgctgcgcgtcgccgcctcgcagacccagaccctgccggactactcggcactgggtgcctcctcgtacggttcggacctgaaccgcaccggcggcggtggcaatccgaacctcaagccgaccctgtcgaccaacctggacgccaacctggagtggtacttcatgccgcgcggcctgctgtcggtgggcgcgtaccacatgaagctgaaggactacatcgccttcgacgtggtctcgcgccagctgtacagcgaactgaccaaccagcttgagacctaccagatctccactccgatcaatgccgacggcaaggtcaccggcgtggaagtggcgtacgagcagccgatcggcgagtacttcggcatcaatgccaactacacctacgccaacggcaccacctcgcacacctggtcggatggttcgcacaacctgctgggtacctcgaagaacacctacaacgtgggtgcctacttcgagaacgagcgctttggcgcccgggtcagctacacccgccgctcctcgttcctgatcagcctgtcgggcaccaatccgtactaccaggatgacttcggcacgctgtcggcatcgctgagcttcaaggccaccgattggctgagcatcagcctggatggcctgaacctcaacaacccgacctacaagtactaccagaccgcggccatcccgacctcgttctacagcaacggtcgccagtactacctcaacttccgcttcaagtactga

SEQ ID NO: 501865 - DNA, 684 bp, Stenotrophomonas maltophilia
atgcgcgttctgattgctgaagacgacccggacatcgcctcgggcctgtgcgcctcgctgcgccggcaggggcacgtggtcgaccacgtcgacaacggtgcgcacgccgatgcagcactgggctcgacccagtacgcactgctggtgctggacctggggctgccgcaactggatggccgcgacgtgctgcaacgactgcgccagcgcggcgatggcctggcggtgctggtggtgaccgcgcgtgacggcctggccgagcgggtgcgcgtgctcgacctcggtgccgacgactacctggtcaagccgttcgcactggacgaattcgaagcccgcgtgcgtgcacagctgcggcgggtcaccagcaatggcaatccggacctgcgcatcggccgcttgcgcctggacctggccgggcaccgcgtatggatcgacgaccaatcacttgaactgaccgcacgcgagttcggcctgctgtcggcgctggcggtgcgtgcagagcgcatcgtgtcacgcgcgcagctggtggaagcgctgtgcgactggggccaggacctgaccgacaacggcctggacatcgccctgcaccgcctgcgccgcaagctacagccgggcggcatgggcatccgcaccgtgcgtgggctgggctacatgctggaagacgcacaggacgacagcgccccgtga

SEQ ID NO: 501866 - DNA, 402 bp, Stenotrophomonas maltophilia
atgagcatttcgctgtttctcgaggtcgaagccggtgccgatctggatgccgtgctgcgcgctctggactcgatccaggccgagtactccgacggtactgactgtactgacggtttgcgtggatatcttccagcgtccaacaccggcttcgggttcggcatcgtcgacccgccggaggcactcgcagcggaagggattgaatccgagtggcaggtgggcctgctgggctcgtttcatttccgcgcgagcgggtttgagagcgcctggggggaaatctgccgcttcatcaagctctacgccgcgacgtgcgggttccggtttgtgctctcgttccagttcgagagcgtctatgcggcaaggctcgggaaggatctggtcttcccggggcctgctgctccgtaa

SEQ ID NO: 501867 - DNA, 258 bp, Stenotrophomonas maltophilia
gtggcgtaccaggagcaaatgcgtgcgatcgcaatgacggcgtggccagcaggtgttcccattgagggcaatgcctgcattgtcgagctgcggctggcgcccccggggcgagtgctggaggccaatgttctggagccgtgcacgttgagcgaggcgcagcgcgagatgatgctgggcgagatcaggcgcacggacttcacgatcgagggaaagatgcagttcttcaacaggcataccctcatcggcttgcgcaggtaa

SEQ ID NO: 501868 - DNA, 300 bp, Stenotrophomonas maltophilia
atgtgccccgcgatgctcggcatcaaccttacggacaatccttcggcaatgcgacaggtacagcggattcgccaggattcctgcaagtacgcgaacaccacgaaagagagcgaggacaaccatggcagccccagcagcgcgaaggtggtcatcagtaacggcgaaaggatgaaccagattgtgccccacgcatgcatgcgccggaagaagaaccagagtgacgagaacaggaacgccggccagttccatcgccttggcgccctgccgcttgcttcgtacagcctccagtggtggagatag

SEQ ID NO: 501869 - DNA, 816 bp, Stenotrophomonas maltophilia
ttggcttgcaggccttctcccaaaaagcgcaacaacgcgataagccaggccatcaatgagtacatggagaagactgcggggttggcctactacttagctggtggacgaaactcgtggaactttgaggatgtcgaccaagcagcgaacgttggcggaaagctcactgttgatatcggaacctctttgttagggcctgaggcgttccttgcaaagggggctaagaccaccgcattggaggccgctgcctcggaggcgctcgaacgagctcgagtggcgcgctcggtaaaattggagccggatggctcgttgccgccgcatttgttgccagataacattgttggaggtggaagtattgctcacttgggagttgttaattgtccggacggcatatcattcaaggtcgatattgatgcgcatatttctcgtccagatggttattctcagaagaacggaatttctggggcgcacaattcagtggaattcaggtcggaggctgcggctcgtggagtgaaaatcgtaagcgaggtttccacggatgttccgggtgtttccgttatctcctatcaggtgccggcgttggatcctactgggaaagtaattgtgggctataaaaataaagtccagacgaagatcgtgtatgatccttctataatgtcagataggaaggttttgatgctcggccaggaagctgctgcgaagggttacaaggacgctgttgctgcggggaagaggatatatgagtccaatgcgggcggcgtctctttcgttgtgtacatcgatgatgccggtgtagttaaaaatttccaccctaagtga

SEQ ID NO: 501870 - DNA, 4464 bp, Stenotrophomonas maltophilia
gtgaatcatatctatcgtcgtatctggagtacggcccggaagtgctgggtcgtggcaagtgagctgagttcggcgcgggggaagtcaacaggtcagccaacgcgcatggcggcggccgctgtcattcttgcttcgttggtggtgccggcggcgtccgctgaagatggcactgaagagcacgacgagggcattccgattgcccgccaagccgtggagcgggagcgggtccatcctttcgtcgctgtgctaacggcagcgccggcaatgtcccctcccgtgccaatggcaacggtcaaggctatccacgcccagctcgcactggtctccgatacctcctaccgcgactcgaccatcagtgggaatgacatgctggtgctaggatcccggtcgtcgttgtcgtccgggaaccgatcggttggctatggcaatgcgatcagcagccgtggtgagaacaacactgctatcggccacaatgcggaaatcaccagcggctacagtacggcagtcggcgccttctcccggaccagcgggattggcgcgacagcgctcggccatgacgccagggccacttcgtccaacgccatagcgcttggcagcggtgcacaggcgagctcctccaactccgtggccataggtgccaactctgtagcgaacagcagctataccgtctcggtgggtagcacctccaaccaacggaagatcgtcaacgttgcgcgtggcagcaccgcctacggtagcaccgacgctgtaaccggtggtcagctgtatgagaccaaccaggatgtcagctcggttcgtagtacggccaatacagccaagtcgaatgcggacaatgctctggccaaggccaacattcgggaggggcttctcagccaggcgtccgtttcgggaaatgttcgcataggtgcaagcaacagcggcacgacgcttgatatccggaacagcgcgaatgtgaaccggaagatcgccggtattgcggctggcaccgtaaacgccgcaagtgccgacgccgtgaacggttcgcagctgtatgccacggatcagaccgcaaaggccgcgaaggcggctgccgacagtgcgttggcacagtcgacgacagcttcctatctgcttgccaatggcaatacacccaccgttgccatgcgtgcgcaggccactggtacgggcgctctggcgaccggcatctacactgaggccaacggcacggcggcgatggctgtggggcgcacggccaaggccaaggcggatggtgcgattgccctcggcgatcgtgccagtgtgggcaacggcacgtccaagaacagtattgccatcggcacgaccgctaccaccggagtacaggaagacctgatggcgatcggacgcaatgcgactgcgtccggtggggtcggagccatggcgctgggcgcgaacagtgcggctggtcaccttcgctcggtcgcgctgggttcgggatcggtgactaccgcacaagaccaggtgtcggtgggtagcacgtcaatcaaacgcaagatcatcaacgtggccgacgcgacactgaactccagtagtactgaggcggtgaccggccggcagctcaacgcaacaaacaccaacgtcagtacggcgcttagtgacgccagtttggccaaggccaatgcgaataccgcgctgaccgaagtgggtacgctcaaagggttgctcagccaggacggagctagcggtgatgtccgcatcggtgagaagaacagcggcaccgtactggatgtgcgcaatagcgcgaatgcgaaccggaagctgaccggcgtggccgatggcgtggtcagcgccagcagctacgaggccgtcaacggcaggcagctcagtgccaccaatgacaaggtggcgacagtggagggcgtggccaggtctgcgggtgcagacgctgccgtggcgaagacggatgcggctagggcactggccgagacagcaacgttgagcggtctggtggcgcaggtttctgcgtccggcgatgtacgcctgggcgggaagaatagtggtgcgacgttggatgtgcgtaatagtgccaatgccaatcggaagatcagtggtgtggcggatggattgctgagcgcaagcagtgctgaggctgtgtccgggaaacaactgtactcaacgaattcgcgcgtctcagatcttgaggatgtcgcgcagtttgtgagtatcggctcagctcccttcagtgaacgcgcacaagccggtgtggcaggtgtcgcggtcggaaattctgccaagacgggactggatggaggaaccgcggtaggcacgtttgcggaggcgatggggaagaactccaccgcaattggtcgagcggcagccgtttctgaagattccgagaatggattcgccatgggggcaggtgcacaggttggcggagacgctggcggtgcgtatgcaggtgtggcgattggtgctagcgcaagcgttgaaggtggtgctcacggttcgctggcacttggaaatggctcactagcggatgaagaaggagttgcgtcattcgggggtgtcggcatccagcggcgtcttgtgaatattgcccgaggcactgctgaccacaacgccaccactgtctcccagctcaaggactccctcgccacgcttggcggcggcgcaggtatgggtgccaatggcgacatcatcgccccgacctacgcggtgcagggcgcgacgcagaacaccgtcgaggacgcactgatggcactcgatggcgctgtgatcaccgcaggccgtcgcgcggacaaggtggaaggccagctgagttcgatcttccaggattcaccgtcggcccgtgccgatggcatgaaccagatcgcgctgaatggcgtgaatggcatggtgctgaccaacctggctgacggccgagtggcgccgggaagccgtgatgccgtaaccggcagtcagttgtacgccgccgagcagaagatctcgcagaatcgtaatgatctggagacgatgcgcaaggagcgggaggtgggcgagcaggcaatgcgtggattggatgcgagcggtccaatcgactttggcggtgcgcgattgactggtgtggccgaggcgacactgtcggctgatagctcggatgttgtgcgtggcagtcagctctatgagaccaatgaagagctgcagaggctggcttccgcgtcgcggtttgttgctgtcggtgacctagggcctggacaggtggcgaaggcgggaccagtcggggttgcgattggtgattccgctgaggcttctttgcaaagtgaaggggcagtcgccattgggagcttcgcgaaggccgccggaaagaactcggtggcactaggcagagcagcttacgttgatgctacggctgagcatggcttttctttcggcgtccattcttctgtccatgaagcaaacggtattgcaatcggcgttggcagcacggtgaagcagggggccggttcaagcgtagctattggtgttcactcggttgcagatgaagctcgcactgtcgcgttcggcaatggtgagatgaagcgccgcctcgtaaacatcgccaacggcaccgccaaccataacgccgccaccgtcggccagttgcgcggtgcactctccgccctcggcggcgaagtcgatgccaacggcaacattgtcggccccagcttcaacgttcaaggccagtcccaatccaccctcaacggcgcattggaagcgctcgacggcgccgtggtcagcaccacctcgcgcgtgaaccaggtcgaatcccagctccgctccgtgttccgggaaaccccttcggttcgcgcagacggtacccaccagctcaccctggccggtgccaacggcatggtcatctccaacgttgccaacggcctgatcgcggccggcagccgcgatgcggtcaacggcggccagctgcattcgatgcagcagcagctcaacggccgcatggatgggctggagcagcgcattgacgatcagccgcaggcccgcgccatggcggcagcatccacgccttcgccatccaccgaagagatcgcgccggcatcgggcaccagcggctcgccgcagatcgcctctaccggtgaaggtgataagccagccccgcaaccgaagtcgaagcaggacgacacgcccaagccgcaggtcgacaccgccgacctggagaagatgctggcccgtgccaacgagtacaccgagggtgcgatcagcaatttcgagcgccgcctggacaagatggacaagcgcttcaaccgcatggcggcgatgagcagcgcacagaccgcgatggcgatgaacaccgccggcctggccacctacaaccgcctgggtgcgggcgtgggttacagcgagggtgagtcggcgatggcggtgggctaccagcgcgtgctcaacgagaagggttcggccaccttcagtctcaatggcgcgttcaccaacagcggtgagcgcagcatgggcgtcggcgtcggcatcggctggtaa

SEQ ID NO: 501871 - DNA, 708 bp, Stenotrophomonas maltophilia
atgaagaagctgctgttctgtctgctgccgttgagcgcgctgctggcgccgccggtacatgccaacctctcgatccatccgatgcgcgccgccgtcgatggcaagcgcggtacgcagatccgcgtctactcccaatccacccagccgcagtacgtgcaggcacgcctgttgcgcatatcgaatcccgcccaggctggcgaggaagaggtggaaatggaggcggccgacgccgcgatcgccatcacccctggaaagttcgcactcagtggcggcggtaatcgcctgatccggatcatcccgctgcgcgccgttgagaaggaagcagcctatcgcatctatttcgaaggtgcccgcggacccgaggacaccgtgctcgagggtgaagaaggcgcacaggccaatgtgggtgtcagcctggtctggggagcgctggtgaacgtaatgcccgccaacggcgtagtcgaactacgcctcgtggagaacacgctgcgcaataccggaacccttcgcgtaggcattaccggtgccgcgacctgcacggcggagggtgcctgcagcccgcaggaactgtcccacagcctgtatccggatgccgatctgaagttgccattcaaggtcgcgccgggcggctctcttcaactccgctatcggctgagtcgtgacgggcaccgcgagcacacacagacgctggcgcagagcgctggctga

SEQ ID NO: 501872 - DNA, 1068 bp, Stenotrophomonas maltophilia
atggattcattgacccagatcgtgctcggtggcgccgtcgctgctgccatcgctccgcccggccatcgccgcgcggccctgctggccggtgccgcgctcggcaccctgccggacctcgacgccctgtggcttggcttcactgcggccgacccggtggcgaacatgatcgagcaccgcagcttcagccattcgttgctggtgctgccctgggtggctgcactgatctggtggttgttcaagcgcttcggcaacggccgggtcgcgcagtcaccgctgcgctggttctgggcgatccagctggcgctggtcacccatcccgtgctggatgcgttcaccgtctacggcacccagctgtggtggccgctgcggccacagccgaccatgggttccagtgtcttcatcattgatcctggctacacggtatggctgctgctgggttgcgtgctggcctggtttggccgcgcccgcccctgggctggcaaggtgctgggtgtggcgttgctggtcagcagtgcctacctgggctgggggctgatcgccaaggcgcaggtcgatcgggccgcgcagcagagcctggccgcgatgggcctgggcgatgcgccgcgcttctcggtgccgatgccgttcaacaccctgctgtggcgggtggtggcgatgacgcccagcggctacgtggtgggcgaccgctcgctggtggccgaccacgggccgatgcggttcgaaggccatgcgtccaacgtacaggccttgcgcgaagcgcaggccatcccggcggtgcagcagctgcaatggttcaaccgtggcttcatgcgtgcgcaggtcgtggacggaaggctggtgctgagcgacctgcgtatggggctggagccggactacaccttcaatttcgtcgtggccgggcaggccgacgggcagtggcgggcgatcgttcccgagcaggtgcgggtggactacagcagtcccgccgcgcgtgccgacgccggtcgccgcctggcggcgatgtggcagcggatctggcaggagccggcggcggcgccgggcgcggccgaccacaccgccgtgcattga

SEQ ID NO: 501873 - DNA, 1665 bp, Stenotrophomonas maltophilia
atgaaggtctacggacacttccaccctgggaagagtgcagtcgcgtttgcgcagaaccttgctgcaattgatgtggcggcatcgacgggggtcattgcgcccgaagagaaatcgcgctggcgcactcacatggaacagctgtctccatccgacctcgatcccacgggcgccgaattcactgatctgactgtggatcggcggacattctccagttcttacactgacacctcgcgacgcaggtcaggcgataagcacgttgtcctgatcgatctcacggatctggcaggcactccttcgcagacgctggtctggtatgcagagaggcgccatgagcagcgacgcctcaaatggaaagccttcgcctccattcccggggtcaccgctgtcccctaccctcactgggaaacccagctgatcaccgaaaatgacgccagccaggagtttgcagcccaggtgcgggcgctggtgtcgaccttcccggcgggccccgaagcttcattggatgtcctctcggatctgctcagttcaaacgacgagccaccggtgcagcacatcgccccgcgcgcgcccgtggatggcgcgacgatgatgctgcgatggcttccgatccagggaattcaaccaggcagcagctctggccagattcgttcgctggccaaggatcagttccatgtgacgtcaggcaccgacagttcatacggttacatcgtcgcgaagaaggatgagggcatcgacgcctggcagatggatgaaagccagcgggtcatccagacgaaggtcgaccagaagggacgcttatgggtgctgacaacaatcgaaccgcgcctgacgcgacagattctcacggtctgtcctgtacggatcaacggcaatgcgaatgggtcgatccgaagcgaccgttgcatgcagagcaccatggatcagcggtggcacctcgatcgcgacggcaactcctatctttactcggagtctcatatggcgacggaggagcgcttccccgagcggatcatggacacaggatcaggagacgccatcgagatgaaggcgctctggaaagacagaaccaacttgaggcggcgcgtctttggctgcatgcaatcctgctcctcaggtccggcaccggatctgggtgacggacttctctggttcacaagttgcgggctggtgggtgttgcacctgcatcaggcgatgtggtcaagagctttccaatgagttccggaggcagtggtcgcttggtgttggggagcgccgcgggcgactgggtcgccgaagaggctcgtgatccaacagaccagagggaagttcttcgcattcatcgtctttccaccggggaaaccgcatttcaggtggaacgaaaaaccggtactcaggcactggcacgcacggctcacggcaggctgctcgcgatgacggttacaggcgcttcgccgggccgttacgtcgatgtctggcgcatggattccggcaggcacgtctcacgtctcggcgttcctgagggaatcgcattgaaatcccttgcattcaatcgagccgggacggagctgtgggttcatgcgcatcgactcgccggcgaggacgccggcgtacttatctggccggtgccggaatcgctgcaggaccctgctgacggaaactggagccctgatgaggccgtattggaatag

SEQ ID NO: 501874 - DNA, 2070 bp, Stenotrophomonas maltophilia
atgctcctgcacccgctctgccgcccggccctgcttgccgtttccctgtcactggcctgtgccgcgcatgcccagtccgtacccgagcgcaccaatcggaaccgcagtgccaccgatctggatgcggtgaaggtcaccgccgaacgcacccacgccgataccggcgcccttggtgatcgcgtgctgcgtgataccccgtttgcgatcaccgccgtgggccgcgagcagatcgagcagcgccaagtggtctcgctgggcgaagcgttcctgctcgacccttcggtcaccacccaggtcagcgcctatgccagtggctggagttcgccgatccgcaaccgtggcatcgacctgaacttcgacagctatcgggtcaatggcctgcaggtctcctcgtggggtaccgagtggccgctggaagtgatggaacaggtcgatctgctgaaaggcccgggcggattcctttacggtttcggtgcccccggtggcatcgtcaactacatcaccaagaagccgaccgacacgcccaccttctccgcccagctgggctggcgcgagcagggcatcgtcagcggcgggatggacgtcggcggccgcttcggcaacgagcagatgttcggttatcgtttcaacgcctaccgggaaaagggcgaaaccttcaacggtggccacgtcgatcgaaaggtgggcgcactgtcgctggacgcgcgcctgaacgacgcactgatctggaccttcgacggcgtgttccagtcacgcgacctgcgcgaggaatcgccgcagtactacttccgcggactgacctcgttgccacgaccgatcgccgggaattccggcaacagtgtacccggcacctactacgacactcgttccagcctgttgtcgacccgcttggactggcagatcaacagcgactggaaaaccagcctgagttatggcgtcaccacctcgtggaatgacgtcaacaagatcttcgcctacatcgattcgcccaatggcgactatgacgtcaacgtctatgaactgggtggcaagagcgagtggaagctggcgcaggcgatgctgcagggcagcttccacaccggtccgctgcagcatcaggtggtggcaggcatcagtcaccagaccgggctgggctgggaccgtccctacgaatggagcctgatcggccgcgccaacctgtaccagcgccatgccatccgccatgacgccgtcggttcacgggtgatgacccgcggcgacgagaccgtgcagcaggccgtgttcgcaagcgataccgtcgatctcggcagcggctggtcggtgctggcgggctggcgctacaacgattacgagaccaagggccgctaccacacctatccggtcacaccgacctatgccgtgatgttcaagcccagcgaggcggtcaccctctacgccagctacatcgaatcgctggaagcgggcagccgcgtaggcaacaactacgtcaacgccggtgatgtgctcgacccgaccctcagcaagcagtacgagatcggcgcgaaggccgaggccgcgcgctggaatgcgaacgtggcggcgttccggctggagcgtggcgcaaatatcgatgaactcacaccggccggcaagcgcctggtgcaggacggcatcacgctgtacgaaggcatcgaagccagtgccgacctgcacctcagcgatgtcctcacggttggcggaggcgtcacctggcttgacccgacctacgacaggctgtccccggccagcgtcgcacaggaaggcaaccgtaccgccggtgcagcgcgctggagtggggtcgtgcacgccacctgccagctgccgtgggtggatgggctggagtcctacgccgcggtgcgctattacggcgatgtctggtacgacgccgacaacaccctgaagctgcccgactacacgctggtcaatgcaggcatcggctaccgcctgctcgcctccggtcatccggtgaccgtgcgcgccagtgtcgagaacctggccaaccggaagtactggtccaacgccggcacaggcctgccacgcacgttcgctgtgagcgtgcgattcgacatgtaa

SEQ ID NO: 501875 - DNA, 183 bp, Stenotrophomonas maltophilia
atgggtgagggcggtttgtttgcgaagcactgcttcgcaagcgcccgaacgcacagccgccagcggctgggccggaccccggagaggggtttacggcgtgtcctgcccacccacaccggcccgcccaacaagcagaaggccagagccgctctggccctggcctttggtgttgctctggcttga

SEQ ID NO: 501876 - DNA, 207 bp, Stenotrophomonas maltophilia
atgccgaacggtaccgtcaagtggttcaacgacgccaagggatttggcttcatctcgccggaggatggcagcgccgacgtgttcgcgcacttctccgccatcaactccaagggcttccgcagcctgcaggaaggccagcgtgtcacctatgacgtgacccagggcccgaagggcgcccaggcttcgaacatcacgccggccgagtga

SEQ ID NO: 501877 - DNA, 642 bp, Stenotrophomonas maltophilia
atgtccagtgaaccgatccgcgacccggccagcgatcatctgctgaccccgcagaattccgccttcatcatcatcgactaccagccggtgcaggtgaactccatcgcctcgatggaccgccagttgctggtcaacaacattgtcggcaccgccaaggccgcagtggcttacggtctgccgatcgtgcattcgacggtcaacgtcaagaccggcctgaacaagccgccgattccacagctgcgcaaggtgctgggcgactaccccacctacgaccgcaccaccatcaattcctgggaggacgtcgagttccgcaaggcggtggaagccaccggccgccgcaagctgatcatgaccgcgctgtggaccgaggcgtgcctgactttcccggccctggatgcgttgaaggaaggctttgaggtgtatgtggtggtcgacgccgtcggcggcacctcgctggccgcgcacgatgccgcactgcgccgcatcgaacaggccggtggccagctggtcagcgtgccgcagctgttctgcgaactgcagcgcgactgggcccgctcggcaacggtgccggccttcatgaatctcttcattgaaaccggtggtaccgcgggcatccagttctcgtacgatcgtaccgagtga

SEQ ID NO: 501878 - DNA, 957 bp, Stenotrophomonas maltophilia
atgaccacgtccgaaccctcgccgcgtcaggccaggcaggcgttgcgctgggtgatacggtgcagtgcaggcccgctgccggaacgccagcaacgcagtctgcggcgctggctgcaggctgacccccgccacgcactggcgtggcgccagcaacaagccttctggctgcggctggacgctgccgggcccgaagtgctggccgcgctgcccgaactgaccgccgatcgccaggggctgcgtccgatcgcaccgcgccgccggctgccgtggctgctggccagcgcagcggtgatggtgctgatggtcgcggccgcgccccacgcattgctgctcgcgcgtagcgacctgcgtagcagcactgcgccgcgcgtggtgcagctggacgacggcagcacggcggtactcgatgccggcaccgcgctggcactcgcgttcgatggccagcagcggcgcgtgcgcctgctgcgcgggcaggcctggttccaggtggcgcatgagctgcgaccgttccaggtcgaggccggcggtggccggatccgcgatatcggtacggcgttcagcgtgtcgatgcagggcgtcaccattactaccgaagtcagcgagggcgtggtcgatgtgcgcccgggcgatggcagcgtgcagcgcctgcgcgccgggcaggcacgggcgttccgtgaccggcgctggctgcagccgctgcagcaggccgcgccggaggcgatggcgccgtggcgtcgcggtgaggtggtgatcgacggtctgcctgccgcgcaggccatcgccgatctcggccgctaccggcgtgccccggtctgggtggtgggcgggcagggcgcacgcgtgcgggtcagcggcctgttccatctgcagcagccggaagcggccatcgatgccgtggccgcgcaggcgggactgcgcgtgcagcgcttgcccggtggtgcattgctggtgtggtga

SEQ ID NO: 501879 - DNA, 1704 bp, Stenotrophomonas maltophilia
atgcagcagtcgagccagcaggcatcacagctccccgacgacgcggatccgcttgacgcagcattaccagcaatggctggagaccgcccgattacgcccttggagcttgccacgcgactttccgcagactgcccctttcaggtcgtccgatacgcggacatcaagggtgaggtaccgcaggactcaacatacgcaccaaagcactacgtctggggtgatcccgatgagttggttctcttggttgatggcgacctcaagctcgacacgctggacctggacgacccgctggccccgtggcaggaagaagatcttggtgcgtacatccgtttcatcttggttcgcggcaatgtagagatagcacgccatgttcacagccttgaaaccgacggcgcatgcggattgcttatctctgacgacctgacgacaaccaatgccatcgtcggcggacaggaaatccgcgtcggcggcaacctactggtccgcgagctgttctggggcgactacaaccacggggaactgcacgtggtcgggaacacccaggcagcgcttctcattcagaccgactactccatgcaattcgatggctcggttcactgcattcgcaggatggacgacgaagccatcattgacgacggaattgagcagatcatcgaacccgattgtctgttacgcgaatccgagggtccggacagcttctggtcattggacgcgggagccatgctgcaaaggctcactgccgggaagagcgtcatccgtgcggagggcctgtcagcgcgagacccgatgctatgcacaatgaacctgtttggcgatgccactgtcagtccagaaagcctgctacgcatttgtggagaagacatgcttcccacggatacccggacctatgaattccgccgcagcggcatctcacttctagcaagtgcgggcaccgccgacgccgacgccgacgcccgcgtatacaccgtgcagatggaagatccttcgaagaacatcgctgcacgcctcgtaatgcggcgcaccgatgcaaccgccagcaccacggcctcttacataggaggttctggatctggctggagcctactgaagtacatctgcagcgatgctggacaggatcagcgcgaatggcacgaggttgagtcacatgacatccagctacccttcatcgcactcatcctcggcgggtggcgatttcttgaggaaggcgcatcgaaccgcaaaaggacgacggagacaatttcagcggccgagatacgcggtctgctggcgcttccgatctgtcagccatacgacgactatgccgatggtgaccgttgcggattgtgggtgggtcactgtcatgcggcgtttcgccaagagaaacgcgggtccggcggcgaggagcccatgctccgactttcacgggaacttcaacagaccgacggtagcagcgtcatcgaaagctactactactacattgagacctgcatggatggacgggagcgcgttcacattcgttacaaggcagacctgcgaactgaagactcgccggttcagatagatcctgtcggaggggaggcgctggccgacgcactacaactgttcaagcgaggcgcaagggaaatgcgcggcacaaattcgggcctactaaaaggaagaacaccctacttcgcaaaagaccatgcgttcgcggtgaacttctggaagcagcagggatacctgccctag

SEQ ID NO: 501880 - DNA, 444 bp, Stenotrophomonas maltophilia
atgccaaacttctttcagaaaccgacggcagtccaggtcttctggctatccgcgtccgttgtatggctgctgctggccttcgcactcatccatgccggcttcaagcctgactactggcaactgcatcacatcgagcccgggacactgccttatcccacagattcagtcttcaccttcgcgctgatcattctggtggagattgttgtcctgggcctgatcgtgcagccatggcggtttcaccgcctgtggctgcggatgtttgtctgtgcctttccctggctgggctggacagtactttggggcgcgtccgccatgcaccaatcacccgtgcgcgatgtgcatttgaactgggtgctcgccgttgccgcccttcttcttgtggcactactggtcgtggtcgcggcctccgcctgcccgcgcctacgccgctggctcaacgactga

SEQ ID NO: 501881 - DNA, 294 bp, Stenotrophomonas maltophilia; identical to SEQ ID NO: 501776

SEQ ID NO: 501882 - DNA, 444 bp, Stenotrophomonas maltophilia
atgagcgccagcaatcgcaagaccgccagcttcggagttccgtgggagtcggcttacgggtacgtccaagcggtgcgcgtcaacaacacgattttcgtgtccggacagctgtcccatacgccggaggggcagttggtcgcacccgcagagctgggggcgaatggcaagcccgccaactacgacaccatggaagcccagatgaggcgcacctacgagaacgcgcaggtgctgctggcagagttgggtgggtcgctggctgacgtggtcgaggaaacgctgttcgtcatcgacgttccggccgcgttcgcagccagcggcaaggtccggccggccgtgtacggccagccggtgccgcaggttgccagcaacctgattggggtctcggcgctggcgttcccggagcagctcattgagattgccttccgggccgaagtgcagagctga

SEQ ID NO: 501883 - DNA, 351 bp, Stenotrophomonas maltophilia
atgtggcaggtgaaggaagtgcgcgcggccaacgtccgacaggcgaagcgtcacgccgaacgctggtgcgcagcacggctgtatcccgagctgcctctgcgtgaggccgttgcccggctgaccgacagcacgccgatccagttgcccccgccactgcctggtctgccgccgccccgcgagcagcagcaacaggctcgacgcctggccgaggccgggactgcggagctggcgcgaatcaaggaagcgctggaaccccgccgaccgccgaaggagaccaagccaagggcgagagatccgatgaaggcttgggtgagggcaggtagagagcagctgtcccgacctccaatctga

SEQ ID NO: 501884 - DNA, 450 bp, Stenotrophomonas maltophilia
atgcccatcagggcagttgtatacgtgagcggtgccggcgaggaaatcgcaggcgatagactgagcccgtccaacagaaagttggatcagattgtggacgacgcggcccggttcaaccgtaatgctggcgttacgggggtgctcctcttcgatggcgaacgctttctccagtatctggaggggccggaagacggattgtcggtggcgtactcccgcgtgctgggcgcgagcagccacaacggaatcgtggaactgcagcggggcagagtggggcaacgccgcctgccgttctggccgatgaagtggctcccggtagaactgggagggctgaagcgcttggcacgcgccgactggacccggttcaatcagcgtggcgatgcagacgccgccaacgctacagccatggacctcttggccgcgttggtcgaaccgtacgctattgccgcgtag

SEQ ID NO: 501885 - DNA, 396 bp, Stenotrophomonas maltophilia
atgtgcggccgattcgtccagctccccggtgtcgacttcggccagccggggctggctgaccttgccacaggcctggccgagatccagcccagctacaacctggcgccggcgcagcgcgcgtcggtgatcctggaccgcggccaaggccggcaggtcacccggctggcgtgcggcctgctgccattccggggcaaggccaagggcctgcagggctcgagcatcaatgcccggatcgagacggtagccaccaagccggcgttacggttggccttcaagaagcgccgctgcgtgatcccaatggtcggtaactacgagtggtcggtgaacccgatcgacgagaagaaggatccctggttcatccacgccaccgggccgcggctggccgccggcctgtga

SEQ ID NO: 501886 - DNA, 174 bp, Stenotrophomonas maltophilia
atgcccgtctggctgcaggccggccagatcgatgagtggatggccgccagccacgacgacgccatggccatgctgcaggccagcgagccgcccgcgatggaggcgtaccgggtgagccgggccgtcaacacgccgaggaacaaccgagaggatctgttggaggcagtcgcgtag

SEQ ID NO: 501887 - DNA, 555 bp, Stenotrophomonas maltophilia
gtgaagaagatgatcgctgttgtggcagtcttggctggctcgttggcgttgaacgctcctgcgcaggaagttgattacgtgggagcctctccgaaggttcttgccgaggcgaatgctcaagcggctgatttgcctgctggcgtccagctggttgagctggaacgctggaaattcaaggaagacacattctcgggccgtccgttgaatactcctggcgggatgatctatccgggcaagaagcagggcacgttgggctttatctcctacttcccgttcgagggaagtgtgacgatgtactcctgcgtgaacaacaattggttggacaccttctcgtcgctggacgcaaattgtgaagggcacatgcacagccgcgaaatgcctatcaccggatacatcgcctccactcagctgccgggcactgttccgctgtatcggtgcatgcgcggcgggctgaagcctaacaactgggcggaccatttcgacacgctcgatgcgaactgtgaaggcgtgaagtacccggttaacgaagggatcatgggctacatctggctctga

SEQ ID NO: 501888 - DNA, 438 bp, Stenotrophomonas maltophilia
atgaacccgacgctggctgtgccgcccggcgttacgttgagcgaggtcgtccgcatctacagaccgaaccttggctcacacaagagcgtcaactgggactacggtggctacttgcaagaagggtggcacattgaggggacgttgggattcatctcctttactccctttgagaacagcgcgccaatccgcgaatgtgtgtcgcatacgccttgggacaactttagtagcatcgacgtgaactgtgaggggcaaccgatgctgccggccccgaaactcaggggctacatctctcaagtccagctggcaggtactgttccactgtaccgctgccggcacttctgggaagggaagcagcgtcattacgacactctgcgcgcggattgtgacggcaatcctgccgccatctcggatggcattttgggatacgtgttcatgtga

SEQ ID NO: 501889 - DNA, 651 bp, Stenotrophomonas maltophilia
atggatgaccggatcgacgaggaactgttcgccgaatggcttgaattctgcgctggccgcagcgagcgcgaggactggtatttctccggcctgctgcagggcgtgaccgacccggatacgctggcggcggtattcgcaggcttcccgcatgccgatgcgctgcagtcgcgcgcgctggacgtgcttggcgcagggcgctgggacgggcacctgtacctgcagccggccatcgctggcgacgtgcaggcagtggcggccgccgcgcgcacctggctggacgaactggcgagggtggcaggtatggcgggtgagtccgcgctgcaggccacactgcgcgacgtgcgggtgatggcagcgcccgcagagcagctgcaggccgcatggcgcgaatcgggtcccagcgcctatctgcacgacgtcgtctgcgatgtggtgcgcgaggcccgcacgctggatacccctcagatggccgcactggacgaggcgctgtaccacatcgcttcggacctctacctgggctggtacatcgcccagccgttgtccccggctgccgtcgatttcgcgccttatctggcgttctggcgcctgggcggacgcggcgcactggtcgagggcgcgttcctggtggaagcggcgggtctggattcatag

SEQ ID NO: 501890 - DNA, 288 bp, Stenotrophomonas maltophilia; identical to SEQ ID NO: 501681

SEQ ID NO: 501891 - DNA, 963 bp, Stenotrophomonas maltophilia
atgtcagatcatttggccgtcggcatcgatgccgattcaaagaccctggtggtggcctgccacggcaccaagggcagcgcccgcatcaccaattcagcctcagtcatcactaagtggctgtccactctgccggtcgggtctcgcattggagtggaagcaaccaatcgctaccacgagcttgtggttcaagctgcccagaaggccggccacgtcgtctttgtgctcaatccgcgcgatatcaaacattacgccaagggcgtggcctgccgcggcaaaaccgactcaggtgacgcgcaggtcattgcgcgttacatcgccaaggaggccgacaatctgcatgagcatgtcgcccgatcgcctgcgcaggagcagctgcatgtgctgctccagcaacgtgacagcctggtccggagcaaggcgaagttgaatctctcgctaggcgcgggggcgtcggagtcggccatctttgggcgcatcttcgatggtctgaaagaggccattgccatgctcgaccaacagattcagcaactgtgccgcagtggcgaacagcgcgacctgtatcggcggatcatgaccattccgggagttgggccgacagtagcggccttcgtcacccatcacatcacacgatggcccttgaccagctcggacgcctggatcgcctgtaccggcctggatccgcgtcccaacgaatccggcgcccgcatcggcaggcggcgcctgtccaagcgtggcaacgccagcttgcgccagatcctttacatggcggccatgggactgacgcgctccaaaaatggcaaaccgctctacaacgccatccgcgaacgcggccacagcagtactgccagcttcaacattctcgccagaaagctggccaggatcgcttggggcgtcttcaagagcggccgggactttgacccggccatgctgaaagtgggtcaaacctgcttccagcaggcttga

SEQ ID NO: 501892 - DNA, 603 bp, Stenotrophomonas maltophilia
atggccgaggagcgaatccagggcaagaccaaaggccgattccgaccccaatcctctggcggctcatctcagctcgctcccaacctgctggatcggcaatttgcccccggaaccggaccgacggcgtgggtcggggatatcacgtatgtccccacccgccagggatggctgcatctggccgtggtcatcagcgtccagacccggcaggtgctgggctacagcgtttccaagcgtctgactgaagagctggtggtgaaagcatttgccaatgcttgggctctgcatccacaacgacccggcctgatcttccattcagatcgtggtgggcagtactggggaaacgagtttcgccagctgctgcagtcccatggcgtggtccaaagcatgagccggcctggcaattgctgggacaacgcggtggccgagagcttctttgcgacgttcaagacagaagaggctgccgagccttacgccagtagggaacaagccagccagtccatcgctgcttacatccacggcttctacaatccagcccggctacactcggcgctgggctaccactcgcctaacaactatgcccggcagctccgggctgccgcctga

SEQ ID NO: 501893 - DNA, 267 bp, Stenotrophomonas maltophilia
atggccgagagcatgtccaagaacagccaggtgggtgggcgcgtgcaagtggccttcggcaacgcgtggaacgccgatggctacgccagtgcaggcaaggccgagggcagctaccagggcgtgggccagcagagtggcttgtttgccggcaacggtggctatcacgtggatgctggacacgtgaatctgaggcggcgcgatttccagcaccaacgcggccaacagcgaactgtccgcacagacgctgaccttcagcgacttgcataa

SEQ ID NO: 501894 - DNA, 963 bp, Stenotrophomonas maltophilia
gtggagggacgcattcgcggaatgatagtcacaaagcgggagatggttacattccctgagctctactacgaagctgctcggtcctatgcggtatctaagggctgcacggtctcagatcatgagtcggcatccgcttcaattatgctcaacgggaaggcctactttgccgtttttctgcgagagcgggacgggggcaccacgataactcttcaggaccatgcagaagtatcgcgtgcgcttcacgaggacgtggatgccgttattgctcgcggccgagaacagccggatcctgacttcgcgtcgatgaacaccagcaccctggctaggcagaagagtaattcagcattccaggtgcttttggaaagggctgctgatggggaggccgaagctcagaacgaagtcggtttctgctacggcaaaggagtgcgtgttgccctcgattacaagtcagcccacgaatggtatgggaagtctgcagagcaaggcttcgccaacgcgcagttcaatctcggagttctccactatcaaggcctgggctgtaagcgagatattgggcaggcacaaaaatggtttgaactagccgctgctcaaggccattctaacgctaagcaaaacttggcaaagatcgagcttgaaatacctctcattctggagctctacgctcttaatcagcagcttgggaagcagaaagctcccggcttggttgactattcgctagctcacctctacctcaaagaactaaagaaaatcgcggtggatgaggaggtgcgaaaaggtctcgtgatcgccgccaccagtggtcaaatatctcttggcagggcagctgaaattcaagagggattgatatggacttggaacttgtcgtcggcaacgccgctgacataccagcagattgtatccgcgatctcgggtaatgactggtccatctttgatgatatgccgcaaagcggctcgggatcctaa

SEQ ID NO: 501895 - DNA, 177 bp, Stenotrophomonas maltophilia
atgggggcttcctttagctcgcatgaggctgtatggaagctgcctgcctttgaggtcaatttttcaggagtggtgaataggcttgattttggctatatatctgtatttacgccgcgagcgttgcaatttaccaaggacgagcttgagcgcaagaagaaggccgctccgtccttctga

SEQ ID NO: 501896 - DNA, 507 bp, Stenotrophomonas maltophilia
atggaaaacagcgttcaggtcatcgcatcctctatcgaaggccttatcaacaccctctatcatgttgacaccgacattgatcagggctttgtaaccattcttgaagatgctatcgaaatgatttccacgagcgatcttgaagtagacgatagggcgcttggcgtgctgaaaagctctctgaagaacagcaaattgcccaaattgaaggtcgcatttcgtcgtctaatcgctaacggagtcctgactaaagagatgttggattcctgggacgaagtgcggaacaaagcggcgcacggcgggcttctagagccgaccagtgatgcaacgcagacccaccttgatgggttcttccagtgctacgaggcattcaagcggatcatttttgacgtaatcaaatatgatggaacccatagggattactctttgaagaattggccggttatcgagcgtcccgttcaagctgtgagtgaaagcgaggctgagcaagctgtggtgacgccgttgtaa

SEQ ID NO: 501897 - DNA, 384 bp, Stenotrophomonas maltophilia
atgtgcgagcttgtgagcgcacctaagtatcagcaatttacttcacagcgccagaaggacgcgttcctagctggcatcctcgacaaaggaatgatgggtttcgttgttccaccatctgcgacctggaaaattgaccttgatgcaggtcaggtcgaggatcttgagaacgggccacgctgggcagtgaaggacctcaaggtaacggaggggttcattgaaggaaaaacacagttcggaagtgaattcctactgagccgcgttacgggccagctgtcgtatatcaaatactctggaatagatagctttgccctggaagggatcaccgttcccacctacggcgtttgggtgtatcaatgtagcgccactgacgaaagagttgtatag

SEQ ID NO: 501898 - DNA, 681 bp, Stenotrophomonas maltophilia
atgaaacatatttttaagggagttctgcttgctgcctgcctgacagctttgcccctggctagcgcaggtcagggcctgagcaattccagaattgcggatgggtcatctaatgactttgcggtcacgtatggagcctatgccaatcaagcagatgctgacgccgtaatggcgtatgtgaaaagatcaaaaatcccgagttttagcgagccagcggtaattaatggtcggccagcttggcgtgtgcgtttagggcctttttcaacgtggcagcaagcagaggatgcgaaagcaaaggggttaacgctgcgtagtgatgttaaagcccagatcatcagattggattccgaagttgctccagtggctcaatctgtggcgataaggaccacacccgtcgagctcttccaggcatattctgataatgaagtgagggctgacaagcaatacaagcacaaaagaatgcttgtgacgggtcagatacgttcaattcgttcaggtgtgggggatcaacctcttatcatctttgttggcggtggccgtttcgaagacgtttacgcgcgcgatattcctgctgcgcaagcggttcgattgaatagagatcaggaggttacactgcagtgcgaaggtttcggcacgatagcgtcaacgcctcaattaaaaaactgtgttatctttagtttttag

SEQ ID NO: 501899 - DNA, 228 bp, Stenotrophomonas maltophilia
atgaacaacaagccccagctttttgtaatctatctgactctggcggttgctgcggcactaatgtatttcgttggatcaattaaagttgatcggatgctggaaaggcaagatgagaaatatgactcaatggggcgtcatctagacaacattgctgatcatctagacaacattgctgatcatctagacaaagctgctgctcagcttgctgatacaagtgagagcgaatga

SEQ ID NO: 501900 - DNA, 639 bp, Stenotrophomonas maltophilia
atgcgtaaaattgtattggccgccgcacttgctacgtcttttgctgctggcgctatagaagtatcgcctgtggttgccgttttcagccccagtcaaaagacgggtgttttagcgctcacaaataccgactcaacgccgaagacctatcaagtctccgcagaagcctgggccgtggaaaacggcgaacagacacgagttgcaaccagtgatctgatcttcagacccagccttgtgacaatccagccgggcaagcgccaggtcatccgctatctgaaaacgaacagcactggcgacgagcaggcgtatcgcgttcgtgtgcaagaaattatagatccagaggtggcgaagcttccgggcctgcaccagaccgtaaagattgattcgccttggttctggcgggccaaggacgcgcaaccgaagctagcggcaagctggcaaggaggccgcctagtggttgtaaacacgggcactgccacagcccagcttacaaacctgacagcgggtgccgagatcaagaatgggcttgttggctatgtgttgcccacacagacgtttaggctgaatttgaaggcgaaaacaccgcccgcttcagtcaatgtagttgtaaatggcgtagcccaagaactggcggttagatga

SEQ ID NO: 501901 - DNA, 2256 bp, Stenotrophomonas maltophilia
atgaagtatcgagccaaggccctcgccctggctcttgcttgcctcaacatcgacgccaacgcaaatgagccacaagacacgactgtcctagcatcagtgatcctctcagggagagaggttctacctgcgcgactgatcaaagcaaagaactcatccatctacttgtctgttgaagactggagagcacttccgaacctgacgcttcccttggaggggaaaacaggcctcatttcttcagatgatcttggtctctcagtggccttcgatgatgcagagcaggctttcaagatcacggctccagcatccttgatgacgcgtcagaacctctcaggagttcgcgcagcgagagtgacagaagtggatccgcagccaaagggcgtgctgcttaactacgacattgctacgcgcacgaatgactctggatcctacgctgtgagcggtgctcatgatgctcgcgttggcgtggggcccggcacgttgatcacgacggggcagttgaacacaaccaaccacttgactgactacagacgcggcatcagcacatggaacgttgataatttgaagcgaggtgttgccatccaggcaggcgatgtgttcactcctcgctctgcaatgacaggcactgtcaatcttgccggtgtccgtatcgcatcagatcgtatgcttcgccgcgatcaggaatttacgccagttccgctgataggcggtgtggcggacacacgcagtgctgcagaaatattcgtcaacaacgacaagatgggatcccgcaatgttgccgcaggcccgtgggatcttggccgtgtgccagtgtcgccaggatcgaatgatgttcgtgttgtcatccgcgacgaattcggaagagaagaggttgttagccagcgcttctacatgacgaactcaaacttgcccaagggtcagagagaatgggacgttgctgccgggcttgtgcgtgttgatggtgatacatacaggacgcctgctgttgctgcgaagttggagcaaggcgtaagcaattattggacagcaggcgcaactatgcagactgacggcacaaacacgaacgttggcctttcacatcgaatcattctgggcactgcgggtgctgttgctgttgaagcggcacatagcacctctgcaagaggagagggatctgctctctccgcctcatacgaatacagatcccggaattggtcagcgcaagtaggccacacgcgctacagcgacaactactggcagctatcacaagccaacaagcccgctggttcaacgctgtctacaacgacaactggaagcctttcgctgaatccacttggcaagccatggtcactctctctcgctgccgctcgcatcgactactcaacaggtgccagtcgtcaacgagtcgaccttgcagggcgctacaggagcaacatgagcgaatttgggtttggcgtgggaagggactttgaaacaaaagaagatgcggtctacgtgtcgttccgccacaacttcggcaacgcctcagcatcaatttcagctcgccagtcaactgatctgactgttcgggccaacgctcaaggtcaggcagatatcgcaaatcagcgggtgcggtggtcagcgtcactagaggagagggacagcggcacacgtagccaggttgaggcatcaacatcgacaagacgcctggatgttcgaggttcgatcactgatgacgaacgaggcacagagatccgcactcgcacacgaggatcgttatggatcggggagggcggcgtcacagctcagcgctactcaacaggctcattcgcagtcgttgaggtcccagggcagcagggcgtgccagtagcgggctccggaggtttcaatgttaaaacaaacagccggggtatcgctgtcctgccaaatgtcaggcctcttgctcagtccagggtatcaattgacacaacggctattccgtttgaagtggggatagaaaccaatgccatgccttacacagcgcgtagaaatggtggagcaaaggtcaactttgatgtagccagcatgagcatggtcgaaatacagctttcggcgaatggggagcctgttccgtcttcttctgttgccatcacaagcaatgaaagggtgatcgtcggtcatgagggtatcgcagtgcttatgactcctatgtctggtcaaaaaatttcagttgaatttccggatggaggaatttgcaaagctcagctgccagctcttctgcctgaattccaaaatagaattgaagttatttgcttgaagtga

SEQ ID NO: 501902 - DNA, 486 bp, Stenotrophomonas maltophilia
atgtcaatgaaaaaattagcagaaagatgggtagccaatgagtggattaagccaattaaaacagcgccagccaagttggagcggcctaaaactaaggaggagattgaagctgcggctcttgctgagcacgatagcttaaagtcaaaggggcagattacgttctatccatacgatagaggccagtgctacaacaagggtagcagggcaattatggcttttgtgaatttgcctgggtcttgtgctcactatatttattcagatgacgtgggtaagtgggagtttgttcaattcccacacatgagcacagaaaaacgctgcgcagagcggtcgggttacaggaatgttgaagggttccgttcctatcttttctctttcttcaatagctacttaattaaaagcggcttctttgtaatacgggacgagatggggcagttgccagggcatttggacgaaagcctgatcaatcgaatgatcgggaggaggtag

SEQ ID NO: 501903 - DNA, 354 bp, Stenotrophomonas maltophilia
gtgcttgagaatatcttaattgcgtcatatcacgtgctggcaggcatcagcatggcgtggcttctcttgaagctttatcccaatgtgctggatgccggaaatagatatgtcctgggaggaatattgctagccgtagctgtgatctacttcgcaagccgtgatgtgttcaacgtgctctccgcattcgcagtctttgctttcgcactctgcgttgccaagaacgcagtgatgagtgtaggggccatgccaggacgcccgccgctagctttcgcctgcggtcttgcaacagtgttcgtcgcgagctcagcagtgttcaatctcatcagcgaggtccagcatgtcgcgtctatctga

SEQ ID NO: 501904 - DNA, 192 bp, Stenotrophomonas maltophilia
atgtcgcgtctatctgacccgcaacgtgcgctttcaagccaaataccgcctatccgcgtcgagggctggttcctagcggaacttaagaaagtggctgaactaaaaggcatcgcgctatcacattacgtgaggcaggtgctgcgtgagagtgttcttgcagatcagctacaagaagagaagcaaaagcaataa

SEQ ID NO: 501905 - DNA, 279 bp, Stenotrophomonas maltophilia
atgccagacttcgaccatgttgatgccactgacttcgctgatgttgaacgcgttacgaactctgcactagttgatcgtgagcttgaaaagcttggaggcggcggttttgaaggcgtcggctttttagatgcagttcgtcgccacctcggctttagcaacaagattgagaagatggatacagcgaaaagcatcagggtttacaatgaaatcgttgatgcgctgaattcaatctcaaagcctcgcacgaaagaagcattgatgaaaaagcttggcatgtga

SEQ ID NO: 501906 - DNA, 642 bp, Stenotrophomonas maltophilia
atggaaaacctaaaagataacgtattaaatttgaccgaaaggatgggcgatccggcgcgtgatgtttttgaatacgtgtggagtaataaggatgcaattatgggacgattggtcgagacgggtggcttggatgctgtgaatgttgatggcgactggcatgtaagttacgccgacaccgtagaggctgggctgatttcagcaatcgtagatcagcataaaaatattgaagactacgaggatatggaagagtcattcaaggatgttgagataggagtcaatgtaattgagtttgattcaggtaagcttggatatgacgttgtaattgggcatggggctgattacaccgaggcaacgcttggcgacttaagagaattgaagagctggtatgatgaagagttcatagtcattcgcgattttgatgatgagtttattgacaaagggcagctgcggttgcgggaagaggaagagaaaagttttagagatgagtttccaggcatctcggcgagagttcaacccgacgagtatgatgaaatcatggctagggagcgtaagctaatttgccaagttccaaaaagctctgatgaagagagctgcgctttgaaagagagtcagcaaaagcgcagttcgcttaggatagattga

SEQ ID NO: 501907 - DNA, 231 bp, Stenotrophomonas maltophilia
atgcgtgtaaattcaatttcagattcatttgatcactcagggcttcttgcggcattcccaaaactagagagggattcttacaagtcgtttgatccttctctctgtctcgcgacaaaagcgaagcgtagagcccgcttagagcgccaggagaagcggcaagaaaagcacgatgagatgcaggcgcgtgctgaggctagggcgcgcaagcagcaggagcgctggggcttttaa

SEQ ID NO: 501908 - DNA, 669 bp, Stenotrophomonas maltophilia
atgagatgcaggcgcgtgctgaggctagggcgcgcaagcagcaggagcgctggggcttttaacattcgttcttttacaacctctcaatacaacacaattaaggagaacatcatgactacaaatacactttcacagacaactgaaaagcttatttccgcaattcaagcagaagatgtggacgcattcagaaccctggtgcagaacatcacggcagcgggcctcgctgctggggcatacccaggactctggctaaacggccagctacctggatctggaatcagtgccttacatgtagcggcaaggctttattcaataaatcatcgtgattctgtgcgatcagaaaaatttaatgcaatggtcgaaattcttttgacaaacggagctagtcctgtgcttgcaatgggcaagacgtatcgaaaaggaacgctgggtcccaataggatcatcgtcacgaagaatccgggtaaaacggtcgctgacgtttgtgataaaaagttcccgcccgctcttgtcaaatggttcgcagcgctaaagtgcgacgttagaattagtcgtgattatcaagcttatgcgcctcaggcaggctcgtatctcgacaagtgtttatttgcttcgcgtgcaggattgcgtcaaaaaaaatataagcgtcgcgctaatgatgtaaattga

SEQ ID NO: 501909 - DNA, 798 bp, Stenotrophomonas maltophilia
atgaacgatattcagcgtgaaagagagctgcgcaggttagaagcgagtctgggagtggatagaggtgttgaaggtagttcgacaactgagccagctcctgtcgtcccagagcgtgtgtgtgtgatggagcaagcacagccggtagtgaagaaggttgctgaagcaagccagcgaataatcaaacggacaacagaggctgctgacgacgccctgaaaagattgccaatcaaaaaaactctaagccgtaagacgcttatctatatatgtgcgggagctgttctgttgacgggctctggaattatcgccttcaatctcatgcgcgatacgggatcagctgcacctgctccaactatcgctattgctccaccgcagggcctatacattccgcctgttcctaatcaagtgccagggcgagtgcaggaagaggaaaggaagcctgataaaaattcagaggaagtaattcctcaggaacttcctttgatagaagaagctacgccccttgaaccactgcaacctcctgttagttcagtggatgaggatgaagggagcgctcaaaacactgttcctgctctagtaattgccccagcacctgctgctgcgcctcaagttagagtagtgagaaataataatgaagctaaggtggatcgtcagcctgctgtagttgctgcgcctcgtgctattcaacggcatcaaccgcctcctgcatctgataaagaaattaaggctgaggttgaaagggtggaggctggaaagccatggcaaagcaggattgatcagttaaaagagttggatctttga

SEQ ID NO: 501910 - DNA, 2901 bp, Stenotrophomonas maltophilia
atggcgattgctattgcgaaattagatgctaagggtcgtgataaaaggggggcggcggtaattgattacctgctagctgtagaggaaatgtcgcagggaatgaggcaggctgcacagcgatatcacaatgataattcagggcaggtggcggtatcgtattactttgatggtggcgctgatgccgttcaaagctggtcaggaaaaatggcggctgagcttggcttggtcggtaagcctgtggacaaagaagcgatgcttaagctggctcaaggttatcacccttatacagacgaaccactttgccggaatgctggtgcaaagcctagagaagttccgaagatagatcggttaacaggaaagccagttttagataagaatggcaacccaatcatcttcatggagggcgggcatcgtgttgggtttgacttggtaataaccccgcctaagagcgtatccattgcgtttgcgttaggggacgatgatgagcgaattaggattttgcaggcgcacaagcgtgccaatgatgtggctatgaaatatctggaatcaaaggtcgaaacgcgccggggtgcgcaagggaaggatgttatcgagacgcagggtttggtcataatgcaggcagtgcacaccggcagcagggaacttgaaatgaatttacacacccataacctttgttttggggtggcgaagggcgaggacgggaagtggggaacttatgattcgcaggcgttttatgaccaccaaacatcagcagacaatatctataagactgagttggcttgtagtttaagggagctgggttatggaattgagcagattagggctgtcaattcaatgggggaggagactggcgtcgtatccttcgaaatttcgggaataagcagggagttgattgaattgcagtcaacccgtcgcaaacagattctggaatatgaaatggagcatggtgtcaatcgtcaggctgcctgtttagcaacaagaaagcacaaagatgagccgtgctttgatgagcttcaaaaaatgtggggcgatacgctggctttgttgaacgaaaagagcccagggcttgttcctactatcgctgatttaaagattaaagcagatatcaatatgcgtgatgatgatgatcagaaggttctaaataagcttcacgcgacagaggctgtatttaagcagggtgatttggtttcaatgatagccagtgaaaacatgggcaagatgaggctcggtgaggttctaattgaagtagaaaactttaaggtccgcgcaggagtggctgttattgctcctcagaagcttgcaaaggaagataggggagataagctatccaggaaatatactgaggtgggatatgctgcgcagtggatggtggaaatggagcgaaacatcatcaatggcgtaaaggagcgttccagtgaagattatcaaaaagtttcagagtcgttgacagatgataaaatattggctttcgaggcaagggaggggtttaaattatctgcagaacaaaaaaaagctgttcaacatgtaacagtcaatactggcggcgtagcaataatctcgggcgcggctggaacaggcaagacgactgtaacaaagttattttcagatattttcaaggctgacggtcgaaatgtaatgggggcgtgcgttgccgataaggcagtcgcagttcttgaagcagagggtggattcccatgcaggtccgtagcaaagacaatttcaatgcttgagagaggcaagctcacattaagctctaaggatgttcttgtcttagatgaggctggcatgcttgacaccaggcagactcatacattgctggaatacgcacgtaaggcaggatctaaagttatcctgcagggcgatttaatgcagcttcaaagcattggggctggatcaggcatggccttggctagatctgctatttcagatgcgcaattgactgaaatacgtaggcaggcaaagccagaacatagggaaatggctgcgatgttttacgagtatgacgcgagcggcaggatggttgatctaagaaaaggcgatagaaatcgcgctgctacgcttgcgattggccaaaagctccttcttaacctgcataagttaaatgcaattgacaattatgcatttcatgagcagaagattgacggccttgttggtcgatacatgtcgtctaaatgcccaatagaccaacgattggtgctcgcaagcacccatgccgacgttctggagttgaatggcgctataagacgggcaatgcagtctaagggtttggttgatcgagagagtgtagctgtggaggttatagactcgaagggtgagcgccgccagcttgaaatgtcaagaggcgacagggttgtatttacaaagagtgatgcgcgtgggcttgatgttgtcaacggtgatgttggaactatagttcagactgcgaaatcaaaaggggagggggaggggtatgagctactaattagaattggctcaaaggatccaatgaaggacggtagattggtgaatgttagaacgagtgactataaacacctggcacataactacgccaccactattcataaggctcagggtgaaggtaaggaagaaatattgcaccttgctcatagcggcatgttagataaccatagttccttggtctcttttacgcgagttactaaggggaaatatacgatgtttacggacactgaaacgttggaaaggctgcacgagcgactcggtcttgaaagacttaaggagaatgccacttctcgtggagtagtcagcgagaaatataatcagagtatcaaggctattgaaggacttcggaattcaattgatggaattatttcgtatggttctcgcaacaagcatcaaacaaagcaaagagagacgatcagtatatttgggctcggaccatga

SEQ ID NO: 501911 - DNA, 600 bp, Stenotrophomonas maltophilia
gtgtatctcggcaagggcccttcggggcccttgttcgtggaagacgcttgccaaatcattatgaatcagattaaatccgattcacccgtaaagagcgaagaagtgatgagtataaatttcgacaaggaaactgtaactgtattgctaagtattgcagcaatccttatcgccttatcccaaatgaagattgcgagcgcaaaggccaggctggatctatacaacaagagattcgcaatatatacaactgcactggaatacttccagacgctatgggagaaatcggacacgccacttaaggtgtgcgaagcgaacatgatcaaagccttccgtgaatcaaagtttttattcaagaaatcggatggcatttacgaaacgcttgagaagatcaaagacgcaggagcaatggcaacgggcatcaagaacagaattgaaaaaatggaaaatgaagtgttgatagatgggcatgacttaactaaaagtcgggaaaactgggcagccgcccttcagcgctttgaagagaacttaaagatacttgaacaacagcttgaaaaatacttgcgattcaagaccgccagcggctggtcatttctaccctggtga

SEQ ID NO: 501912 - DNA, 2157 bp, Stenotrophomonas maltophilia
atgaaatttaacaaactaaaatttgcggttgctttggcaatcctggtatcaagccaatccacaagcgcgtcaataatagttgtaggcgaagacgcaagaggagcatgcgagggctcaattgctatcggagacaaggctgaaagcaaatgcattgacgcaggagcaacaggcatattcccaggaattgctattggaagatcgtccattgcagccggggatggaatttcaattggaaatgaatccacctccttagatacgggggttaatattggcaacagaaataacaatggaagaagcacaaccattggcaatgacattaaaacaacgggcacgaattcagaagttgctattggctttcaagcacaaacaggcgacacccaaagcgtttccattaacggcaaaacatcacttggacgcagcgtagcaattaacggagattcaaccggatatggtggaaccgtcttgaatggattcaattcaggaaacttcggaatttcaatagcgggttatacagtcggaacagcgcctgtagcggtgggatatggggcacaagtaggagacgcgacaccctttgggacaacgggagcaaattatggcggagcttttggctcatatgcccgtgtaaggggcggcgacacaatgagcaccgctcttggagcttttgcggacactgaaggaagaatcaacgttatttcagtgggaaatagccagccacgccccgccaataatggcacacccagcgcaccaattacttacagacaaataattaacgttgccgctggaactcaagaccacgatgcggtaaacctaaagcaattaaacgatgctttggctggcatccctacaacccctggaacaggcaatccctatttcgctgctaaaggggatccatctaaaaatgatccagcgttagctacaggcgagcaatcagttgctggcggcccatcagcacgtgccgcaggcaatcagtcttcagcttatggttcaaatgccaatgccagcggtgagggatctactgccgctggtaatcaggctaacgcatatgcagatcaatcaactgcagttggagctttcgcatccgctacagcaaaatgcacggccatcggttatggcgctcaatgttcagaagatggaactgtatcttttggccgcctgggtgacgataaacgcctaaaaaatgtggcgggcggcattgaagacaatgatgctgctaataccgggcaagtgagagcagtggatttgcgcgtccgccaaacccagactgcggtgtccaggcaggctgtgtggttcggaggtggggcttcatatgatccagcaactggcacatggacaaacccaacctttgcgatgccaagcggccctagcttcaataatgtcaatgacgcacttgtctacttagacaaccgcattggcgcatcctcccctggaactggacctcaaggccctgcgggtgcagacggcgcagatggcaggagcgcttatgaagtcgcggtaggcaatggctacaacggcactgaaaaggaatggcttgcctcgctcaaaggggccgatggcaaagatggcgttggcggtggtagcggcagcaaaactgtcgcaggcaagaacatcgaagtcagcgagaaccaggacggcactcagacagttgctgtggctgacaacgtagtcctcagtgaaaacggcagcgtcaatatcggcgcaacgaccgtgaatgccaaaggcgtctccattgaaggtggcccatcaatgacaagggatggcatcgatgcgggcaaccagcgcgtcacaggcgtggcagctgggcacatagagaaaggttcaacggacgcggtgaacggtggccagatctatgacatgcagaccgctcttaatgatcgctgggacgaaaccaacaggcgcattgatcgccaggaccgtcgcattgatgcaatgggagctcaagtagcggccatgtcaatgatggcggcggcgaacgtcccggctgcggtaggcgaagtccaggcttcggcaggcattggtttcagcggtagtgaagcagcactcgctgtcggctggagatcacgcatcacagagcgcaccagcgtttcgggtggtttctcgtatagcgcaagaggtaaagcaatgggcggcgtcggagtgtcaatcaacctgggacgctaa

SEQ ID NO: 501913 - DNA, 210 bp, Stenotrophomonas maltophilia
atggattgcaacattgtacctgttgcgcctgaacgggcgcgctcggccgaaatccggcccaccgaaactaccgatctgcccatcgtcttgatggctcgcgcgtgccacacctggctcagtgcgaacgacgatctcaacacctaccgactctgcggggctctcttctgcatcgcccttatcgttgtgctgtgggggtgtgcccatggctaa

SEQ ID NO: 501914 - DNA, 687 bp, Stenotrophomonas maltophilia
atgaggccttcaaccgcaatcacggcgtctcatagagccaatgtggatgaggatcccatcgaagctctcgtccgtggcggggttccgattcggacattgctcggacactacctctgcagcatcgactggcttgctgcccgactcgatcagaagttccggctctgctactacggtgaggatggtgaagtagtgactgaggcggtatctgcggtctcgttgctcacgaggggcaaggaactgggctggcacccactggaagatgagccgaccgaactgggttggccggagctcttcgaggagaccacgcaccatgagcgcggcggcgtccattggtactcgtccgcagtctcggacacggacggaatgcttcctttgggtctgccgaagtcagtcattgaggccgaccgcagggcctcggaagctagggcgaagaaagcgcaggcgcgcctaaagcgggagcagcaggcggaggccaggaaagctgctgctgaagccaaggccgttgctcagcgcaacatcgaacgcgtcaccaagtcccagcagcgagaggcagctgaagcaggaaagccaatctccgttgctacggcgaggcgaagggcgcgggcttggattcgccagtgggagaaggacgtcgccactgtcatgaagcgtttcacggatagccaggagggcaaccatggccagtaa

SEQ ID NO: 501915 - DNA, 525 bp, Stenotrophomonas maltophilia
atggccagtaacacaagcaggttcaggcgaccggtccgattcaatcgaacccgcgcgaacccaatccagcgcttgccgttctaccgccagagccattccaaggcaggagactactggcggatgccggaagtccagggttacctcatgggccgtgaggttggaagggtctgcgcgatagcctttgtacaggctctggaggaagcttcaagccggattggcatggcggcaagtgtgcagctggccgacaccgtggcatcagcaattgaggctcacggtggatctttgaccgacggtcaacgtgggatcattgaggggttctttggtcgcggatccaagctgatggacgtcattcggtcgggtatcgtgtcgctagagaagtcgccaaagttcgaaatgcagcagatcgaagctgcgctcagggacttgtccagcatgactgtggaggaatatgccatccgcaggcttggctcgatcaatggtgcgattcctgattcaaaatcgcggccaccgttctccctagaatga

SEQ ID NO: 501916 - DNA, 756 bp, Stenotrophomonas maltophilia
atgaaaaagcaaacgcaaggcgcacagcgctgggtgttgggcttacgcgcagcggagtggtacagcttcgagctcatggtggacaggtacttgccaccgccagcgcccatcggagccggcacttgggatcacctccccccgttcaactgggctgggtctctccgtgtcctgaatcggctattcgcattgggaagggaggatgctgtggcgagtgctttgtccacaaacttccctcagggtctcgctttagaggacctgtgcagaatctttgaggcggcagacttggcgattcgtcgttttgatctagtcgccatcacgcagtccgagaggaggcgcaaggcaaagatcattgcagacgcagctaggttgattgctgcggagctgagccatcctgcgactcagaatgatttttggcgagcacgccgaaggctgaagctgattgacggtcgagggcgggggatgctcggcgcgttgcccgacgcgttcgaaagcttcgctcagattgcagaagagacagccgagctgcctaaggatgttggcaaccccaatgcttccagcgcgcacaagctcttcttcctaagagaggtgaccgaacatttgtaccgcaggcatgggaggccaatgaggtcgctcgttcttgttctagcgggtctgtacttcgacgtgtcagacatgacgaccaatgacttggctaagtatgcgcaggtgaagaaagagagagggaaaaggcaggtttcatcccctctctatctttga

SEQ ID NO: 501917 - DNA, 255 bp, Stenotrophomonas maltophilia
atgactggattcaacttctccgacctgagcgccgatcaacgccgtctgctggactttggaggctggaccgccgatcaccctcacgccgaggccaagccggcccgcaaggacgctgtaggcctgattgagcgcgggctcctgctggccgtcagcgtccgcaggcgcgacaaatacggttcctactccctgaccgagtaccgggtgcctgataccgctcgccgggcatgggcactgcacaaggaggtcaccccatga

SEQ ID NO: 501918 - DNA, 477 bp, Stenotrophomonas maltophilia
atgcacagtacaggccaagatcgcgtgcagcggtctgcagagggcgctgccggctacgccacggcgcagcccaagaagaacatcgacaggcggcgacagaagctccaagggcgctctaaggggccgcccttcttcatgatcgaacacagaatctccgactcgccagagttcggcaggctgtccggtaatgcggtgaagctgcttctggagctagctcggcaatacagacccggaaagaacggagatctgagcatcccttggtcgatgctgtccacgcgtggatggaagagcaaggcgacggtccacagctccaagctggagctcctggccgccggctggatcatcgagacgcgaaagggcggcaagaacatgtgcagcctgtacgccctgacgtactacgcgattgatgaatcagagaagcacctagaaccgtcgactgtcactccgccgaacctgtggaggggacgcaatggctag

SEQ ID NO: 501919 - DNA, 330 bp, Stenotrophomonas maltophilia
atggctagtcgctatgtgggccaatgtggtcgctatgcaggccaatgccccgatgagttggcccgcatacagacctacgaggtcgcaatgcaggccagtcaggcggttatctacagtgccctgaggtcgctatgtgtacacccttctagatatataccaagcggagcgcgcttctactgctccaaggcactgtctttagggcttagagcctgggcggccgtttcgctggcaattcggtgcatcgaactgaccggttcgcgtgacggaccggttcgccagacggatggccacctcaacggggagggtgcctatggcagcccgagaccatga

SEQ ID NO: 501920 - DNA, 744 bp, Stenotrophomonas maltophilia
atggcagcccgagaccatgagcgctacgtggagctggtgctgctgtcggacgactctgtcgacttggtattgagggccatcgctggcgcatttggtttcggggtgcccgcacggccggcagtccggcacacgtctaggcggaggtccagcgaggagtcctgtccggatgaaggcgcgtacctgcccatccatcgggtgcactcgattgagcaggctgcgtcaaagtacctaccggcgcaggcggcggctcgtaaacaagcgctagagacgttcagcccgaaggatcgccaagcggtgctggactttgaccagatggcggtgatgcgctccccggccgcggctgatcgcactcgccagctaaggcgctggaaagcacaaggctcgctgacagctgcgcctgccaagggaccgagcaggctggtgctgcacgcactggcggacgcgcagctggacggtcctctaggtgcctggctgatgctgtatgcgattggagaccaaagggtgtggccagtggtctgtcagcacatgaccgcctgcgggcaccccgattgggcttcactcgaagcagctaggagactgctagccggacgccaccagcagtcctatcgggaggcggctaaggaccaagcctgccaagaggcgcggtttcgtcgcgaggtgcagtcggccgagaggcgcctgcttgaatggctggctcgcgccagccggagagttgccgccgcaatgggctctgcctgcgagtag

SEQ ID NO: 501921 - DNA, 552 bp, Stenotrophomonas maltophilia
atgccaccaatcattgtcgacaatgcgatctccgatgcgccgggcgtgcgcgctgaggggctgcgtgctcagtacgtggactggcccgggcatgacggcgaggtctacaagcgagtgtcgctgacgccggttcctgggctacaggaagccattgaggctcagcttggacccgtggacatgctgggcatgggctaccgccttaacttcgatggtgagctgcccaacgctgcgatccactccgatatgggctgggggacgcacgccgccgtgctgtacctgagcgaaggcgagggcggcactgcgttctggcagcacaaggccactggcgccacgcgcatcgatccgggcgacgtggctctgttcgcggccatcgagggtgattgggacgctgctgatcgctgggagcagaccggcctggcggaaatgaagctgggccggatggtgatctacgagtcggccatgttccacagccgctggccgttcgctgcgttcgggactgactacgaatccggccgcctagtggccgttgcatttttcacgccgaggggctga

SEQ ID NO: 501922 - DNA, 450 bp, Stenotrophomonas maltophilia
atgaccacgatccgcaaagcaactctggccgatgtgccggagatcgtccgcatgtccgcagctttctacccgaccacgcactacgcgcagtggtgcgagatggacgaagcaagcgtcgcgggcctcgccagtggcctgatcgagaacgacgtgttcttcgtggccgagcaggagggcgcgctggtcggcatggtcggcgtgatgctggtcccgttcctgttcaaccgcgaccaccggtttgccacagagattgtctggtgggtcgctccggaggttcgcggcacgtcggtggccgcccgcctgttggacgtgatcgaggcgccctgccgcgaacgtggagcggctcgcgtccagatggtccacatgcccaacagcccgccgcaagccgcagctctgtacgagcgcatgggctatgcgcgctccgaaatttcctacacgaaggatctctga

SEQ ID NO: 501923 - DNA, 750 bp, Stenotrophomonas maltophilia
atggccgctatcaccgcagcagcagtggtcggcgccggcatggcctattcggccaaccgccaaggcgccgcacagaagaaggcgggccgcgcccaagcaagcgcagcccagcagacgctggacacccagcagggcatttacgaccagtcgcgccaggaggccatgccgtacctagaggcgggtaacaacgccctgaccggcctgaacgccctggcggctggcgactactcggcctttgagaattcgccggactatctgtatgcccagcagtcggggctggcaggtctggaccgcagcgcggcggcgcgcggcgggctgtattcgggcggcgctgacgctgatcgcatcgccctgtcctcggggctggccacgcagaatctgggcaactaccggaactcgctgatgggcctggccagcatgggtcagaaccagagccagtaccttggccagctcggccagaactacggcaaccagttcgccaatgccatgggcatcaagggcaacgcactggcccagatcgcgtctgcagggccgatgacgcaggcgggctatggcaatgctttggcagcggcagccagtacttacgccggcgcggcaggtggcggcggtaacgcactgtccggctggcagccttcgtcggcttggggtcagtcagtcaccgcgtcgccaggatccaatcagggttttggcaacaacatgcagaatttcctggccttgggtaatggccgcaaatccagcttcggcggctga

SEQ ID NO: 501924 - DNA, 1542 bp, Stenotrophomonas maltophilia
atggcagactaccaacagaatttcctggcatctctccagggcggcttgaacttcgggcagcagataaagaagcaacgcgacaccagccaactgaaccagcttgcttccctctcctacagtgccccgatggagcagcggaactcgcttttggggcagatggcggcaatcgatccagaggctgcccaacagcagcagaaggcgttcgtaagtgacgatgatcgccgtaccaccacgatggtaaacatggcaaagctgcttacgaccatgccgccagaggcccgagagagcctgtacaacaaccggatgctccccgagttgcagaagatgggggtatctggcgcccctcggtggtcccctgaaaccgaggcggtcatcatgaaaagcgccaatgacctctacatggctggcaccggcggccaaatgccgacggatgttcggtccttccagatgatgacggcaggtctttcgccggaggatcgtgagaaggcccgccggatcaaccttgggctcgatggccgcgcatccacctcgggctatagccaggtgaagttcactggagccgatggccgcgagcgcgttggtgtcctcaacgggcgcacagggcagatcgatctgcccgatggcaccagcttcaacccgcagactggaacaatctcgcagacagcccagcagccccagcagcaggctccggccgccggtctttacagcacgccgaatggacaggtgcgcatcggtgaaggcatcacccccgaccaatggcagcttatccaagctgatatggccaacaacggcgcttcggacaactaccagatgcccgtgcgggacgtgacccctgcgcagcgtgcggcccctggcggggccttcgttggtcgtgcgccagaggagcaggcggctctcacggaggcagcaaaggccggagtcgaaaacgcgaacttccccaacaggctttcccaagagcgtcagttgcaggacgtcaagactcagggggcgatcacccaagcggccggcacagcggcagcggaggctcaggcgaaggatgcctcgcagcgccccaagcgcatccagcaatacaggcaggctctttcctcggccgggaatgtcgagacgtctttggacaaggctcttggccttctgagcccgtactcgactggcttcgtaggcgcgcgttctcgtggagttgaagggagcccgtcctacaacctggctgcggagctggaaacgatcaaggccaacctcggcttcgacaggctgcagcaaatgcgcgattcgtcgcccaccggcggcgcgcttggcgctattgccgtgcaggaactggtggcattgcagtccacgattgccaatctcgatccaaatcagtccgaagaccagatccgaacgaaccttgatcgggtaaaaacgcactacaagaactggcgttctgcggttcagcagtcccttgctgatgaggagcgcgcccaatcagagcggccagccgcatcgccagcggcgagagctccggcagctgcctcatccgcctccagttacagcaacctttggaactga

SEQ ID NO: 501925 - DNA, 2556 bp, Stenotrophomonas maltophilia
atggccaagaaatgggttgaggtagcggcttcgcctgcctatcaggcgctagcaccggagcagcaggaagaggctcggaaccagtactggaacgaggtggtcgcgccaaacgttccgcaggcagagcatgcctatgttcggcaggccttcgattccgacaccagtcgcacggtgaactggccagggcaggcgccgcttgaagccgagatcgtgggaggcacacgccagagcgcgacgcagcaggctgcgccggcccagcagcagccgcagaccgccccggatggctgggagtatggccctctgcgcgacaccatgttcggcgcacgatccgtcctgcagggagctggcagccttctgggggcaatcggtggcgatgccttcaacaactacatcgtcaacccggtggcccgcgctgtgggcgcgcaggaggcccgcccgtaccgtgaggaggctggcgctctcgccgactccctgggccttcctaaggcgcagacagcaggcgaccgtgtgctgggcgacgttggcgaggcgctgaccggaaccgggctgacgctgggcgctggtgctggcctgaatgcgctagcgaacatgggtaggggtgccgcaatccgcaccccgggctatgtggctccggtagagaacaggctggcgaacttcctgacggcgcagcccggcttgcagaccgtctctgccgccacgggctccggcgcatcgtccatcacccgagagtctggcggatcgcaaggcaaccagctgctggctggtcttgcgggtggcctggggccgggtctcgtcacggcgggtggcgcagcgggcttacgcggggtggtgcgcggcggatctggcgagaacatgaagaaccgtttggccgacttcaacgcactgggagcgcaaccgtccgtaggtcaggcatcgggcaaccctatggtgcaggggttggagaatcttctggctcagggtcccaccagttcgggggtcatggctcgggctgcggagcgtcaatcgggcgagatatccagcggcttggggaagatggccaacgagttctcgcgtggcgctagcggcgagcgtgcaggccgggcaatcaagcgtgggatctacgacgagggaggtttcagcagccagtttaaggcgacgcaagatcagctctacgacaaggttgacgagttgattccccccacccaaggcgtggcaatgggcaacacccgcgccgccctggactccctcagtaatccgatcaagtcgcctggggcaccgaatactgcccgactgttccagaacgggcgcattaccggaattgggaatgctgttgaggcggacttggcgattcccaccccccagcagttgtcgctggatgaggcggttgccaaggtcaatcagctctatgcatcgcgtgattccgcaagccaggacgcaggacggttcgcagcctttgctaacgaccaggccaacgccgcgcagcggtacttccccgtggctggacagccccgattccccggccggtatacgccggcccaggcaaacgttgctccgggccagcaggccgctgctgaggctactgggatcgcacgtgaccgtgtttcgcaggctgcagagatagaggcgaccattggcgacctgactgccgctgcagagcgggcaggcggtcggctgccctatgaggccgtcaagaagcttcgctccctagtaggtgaagagctgcaggacgcagggcttatgtccaacttcccgaggtccaagttcaaggccctatacgcagcgttatctcaggatctcggcattgccgctcaggaagccggccctgaagctgttgccgcctatagccgagccaacacctacacgcgcgcaggaatgcggcggatggaggacattgaaggcgtaattgaccgtgccggcggcgctgaaaaggtgttttcgtcgcttatggccaccggcaaggagggcggctccacgctgcggtccgttcttcagtcactgcccgttgagagtcagcgggcggttaccgccgccgccatcaggcgtctcggcagagcaagcccaggtgcgcaggatgcgaccggggaggtgttcagcgctcggaccttcctgaccaactggaacaacgtcagcacggaggcccgccgcgcgctgttcgatcgctatggaaaagggttcagcgagcaagtggatcgcatcgcaaaggtagccgacatgatcgacaagggcgccggagtctttaagaacccgcctggcaccgccaaaagtctggctggcctgacgtatggcgcgtcgctggtgggaagcatgttcacaggcgggactgcactgctcctcggagcaggcgtcagcgcaaatgcagctgcccgatggctcaccaatccgcgagcagtgaagttcttggccaacgccaccacgcttcccaagtctcagatccctgcgttcatcaactatgtcgcgcaagaagggcagaagacgggtgaccaggatttgcaggatctagccaaagtacttggcaacgcggaacaggaagtagccaactcctccgacaatcccaacgacacagacaaccggcgttag

SEQ ID NO: 501926 - DNA, 195 bp, Stenotrophomonas maltophilia
atgagcaaggaaaagttcgacctgtccaacgtcggcggccagccgaaggattgggctcaaaaggatcgtgaggcggaagtagagttctcaggctgggagagcctcaaagtcgtcctaacgccggttgtctgtgtcgttgggattgtcggaggagttggctacttcctgttccgcgttgccaagtactttggctag

SEQ ID NO: 501927 - DNA, 426 bp, Stenotrophomonas maltophilia
atgaacaacgccagtgacggactctctcccgagatggctctgcttttggttcgcggcgtacaaggtcaggagggagtcaccctgagcggcgcccaaggcgctctggatagactcgtagcgaacgggacgattaggggaagctacgtcgaccaggtcaaggcggctctagggaaggcagacgctcctaaagtcgagaggatgcttattggcgatgatgagaagcaaaagaaggagaacttgaagtattggtacggcagctacgcagtcttgatctattcagacatgggagccggcaagctccgcgacgattttttgctcggcgcgagcagagccgcggatgctgtcaacgcggcgcgccacgacgctaacgcccggctaggtggcgatacgccccctgagggctcaggttcaaaattcgagccttga

SEQ ID NO: 501928 - DNA, 966 bp, Stenotrophomonas maltophilia
atggctgcaattaagggattttttgctgtaggtcgcgacagctttctgaaggcatgctctctcggtatcaacgagggagctgcgtttcttgttctggctcgagggacgggcggagacaatgtcaccaccaagtggagcgctgaggcggcttcgaaaaggctgggtgtacgttggactacggcgcgagacgccgtggcttcgctcgtcaaacaaggagtggttctgtccgagcccggcaagaagccgaagtacaagatccagcgccaaggcgacgatatctggcttccaaacgcggtcgttgatggcgtcgaatccgagatcccgccagtgaccaagattcggcagacccaagaccccatggtccttcggcttttcgttgagctatatgcccagcagaacctgcgagaggatggtggcatttcccgcaaggtgaccgagatggccttcaagcgggaaaagattggtcagcgtggcgcccacgtggtttggttgtgcgaggtcgagaacacgtatcttcactgggggaacgctgccaccgatcctcaccggttgaagggtgtagacgcccctggccagaagttcttccagcgattcgggatcctggagagcctcgggctcgttgagtgggttccgtaccttttcgaaggtccaaagggtgagccgatccatccacttgcttggaatggaattgacatcgagagacggctctatggggcatgcaaggctgccgccaacgatctgctgacctccgctcagaaggagtggctcgaatcaagtggcagacgaggctggctggttcctgcccccgctcacatgcttgaagtgacgatgtttgggatagcacggctccgctaccgaccccatacgcgtctgacctcagcatggtgggcggactaccaagacacctgcgcccggtttgctgagggctacgagtcaatttctgaggccaaagcggcagcggcttag

SEQ ID NO: 501929 - DNA, 1977 bp, Stenotrophomonas maltophilia
atgaccctgctgccccatccgcttgccctggcgctgagcgccgccctgctgtccgccgttgccccggccaatgcacatgaaccgcccgccgcgcacgacgaccaccacgatgacgccgtggagctggatgcggtggtggtgcagtcaacccggtcagggcgccgcgtttccgacgaaccgatccgggtagacgtcgtgtcgcaggaagagatcgaagagaagctgctgatgtcgccgggcaacgtctccatgcttgtggccgagacggcgggcgtacgggtgcagaacacctcgccgggcatgggcgcatccaacatccgcatccaggggctgcgcggccggtatacccagctgctggccgatggcctgccgctgtacggcggccagtcatcgtccatcggcctgctgcagattcccccgaccgaccttggcagtgtcgagatcatcaagggcagcgcgtcggcgttgtacggtccggcagcgttgggcggtgtggtgaacctgatatcgcgccggcccaaggaaaccgccgaggccgaaatgctgctcaatgccaccagccgtggcgggcaggacgtgaccggctacgcagcagggcccctggccgagcactggggcctctcggtggtgggtggctaccatcgccaggaccgccaggacctggacggagacggctgggctgacattcccggctacgagcgtgccacggtccggccgcggttgttctgggaatcggaaaacggagcgcgtgcactgctgacggctggcgcaatgcgcgagagtcggcttggcggaacactgcccggtcaaacggcgcccgacgggcagcccttcgctctcgcgcagcgcacggagcgcgttgatgccggcgcggtggtcgatgttccaatgcgcgagagcgaccgcctgcagctgcgcgcgtcggccatgtccaccgatcacgaccacgggtatggccctgagcaggacaacgacacccatcagaccggctttgcggaggtcagctatgcgtccggcataggcgccaccagctggctggcgggcattgccgcgcagcaggaccggttccgttccgcccgataccggcagtttgattaccgctacaccgtgcccgccctgttcgtgcaggccgagcaggcgctgcgcgatgaccttacgctttccggcagtgcgcgctgggatgaccacagcgtctatggcgggcacttcagcccccgcgtgtcactgttgttccgccctgacgagtggaccctgcgcgcttcgatcggcagaggcttctatgcgcctacgcccttcgtcgaacagatcgaggccgctggcctgtcacgcctggagccgctcaccggccttcgcgcggaaatcgctactaccgggtccatcgatgcaggctatgtgcatggcccttgggagatgaacctcagcgtgttcgcatccgatatcgaccatgcggtacgccttgtggaatctgcgaacgcgccgggtgaacgtgtgcaactggtcaatgtggcgggcgtcacccgcacccgggggagtgagctgctgctgcgctatcgctggcaggacttcacggtgaccggcagttatgtctacaccgatgcgcgcgaacccggtgaggagggcgccggccgccgtctggtatcactcacaccccgccacagcgccggcctggttgccatgtgggaacagcatggccgtggccgcataggcctcgaggcctactacaccggcatccaggcgcttgatgacaatccctggcgtcgacgcagccgaccgtatctggaagtcggtgcactgggagagatcgtgctgggaagagtcagcctgttcctcaacctggaaaacatcctcaacgtccgccagagcggctacaacccgatgctgcggcctcgccgcgccgacgacgggcagtggaccgtggatgcatgggcgccgctggaagggtttgtggtgaacggtggcgtgaggctgaagttctag

SEQ ID NO: 501930 - DNA, 411 bp, Stenotrophomonas maltophilia
atgcccagccacctcaccatcggccagctggcccgccagaccggcaccaaggccgaaaccatccgctattacgaaaagatcggcctgctgcagccgccgctgcgctcggagggcaactaccgctactacggcgcgcaggaccagaggcgcctgtcgttcgtgcgccgcgcccgcgagcttggcttctccatcgaacagatccgcgagttgattgcctttggtgaacagcgggagcacgagtgcagttcggtggacgatgtggtgaaagcgcacatcgcagacatcacgcgccggatccaggacctgcaggcgttgcagggcgagctggagcggatgatcggcaattgcccgggcggccgcgtggccgactgcagggtgctggaagcccttcagccgcagcctgccgcttga

SEQ ID NO: 501931 - DNA, 627 bp, Stenotrophomonas maltophilia
atggaccactgctgcggccacaagcgccaggaactggaagcgctggcccttcacagtgcgcagcggcgcgtgctggtggcggtactcatcatcaacctggcgatgttcttcatcgagttcggcgcgggcatcgtggcgcgctccagtgccctgcaggccgatgccgtggacatgctgggcgacgccatcgtctacggcctgagcctgtgggcagtgaaccggggggcgcgctgggaggccggcgcggccctcgccaaggggctgctgatcctggccttctttgtcttcatcgtggtggaggtggtcagcaagctgatccacggcgtgccgccttccagcggcttgatgttggggtttggaaccatcgcgctggtggccaacctggtgtgcctggcactgctgtggcggttccgcgcgctcaacatcaacatgaaaagcaccttcgagtgctcccgcaatgatgtcgccgccaacatcggtgtgctggtggctgccggtggcgtagcgctgaccggaagcggctggccagacatcgcagcaggcgcggtgattgcgctgctgttcctgaagtccgcgcttggcgtgatcggcgaggcgtggcccgcgtggcgtgcagcggtgaagtag

SEQ ID NO: 501932 - DNA, 288 bp, Stenotrophomonas maltophilia
atggacaccccgagcgataccggcacccatgccggcgttgaagcagaacttaccgctcacctgggatacatcaaggcgcttgagtacggcctccgcgcggcaatcgcggcacacccagcggcaggagcaatgtcacttctgtgggcacagatgctgcccgaaatctcggatcatcatgcctcgactggccacgttgccttcaatgcggcactgcaacgtggcctcaggacgattggggcgcaaatcgacgaggccgccagggtcgcgcccttcgatcctgtggcctag

SEQ ID NO: 501933 - DNA, 615 bp, Stenotrophomonas maltophilia
ttgagtatcctcaacgttctactgcgccctgaccagctccttgtcgcggtcgacacgttggccgaggacgcgctgaccggagcgccgtctgcgggggccaaactactactgatcccccagcacaacctggtgctggcgactcgagggagcgcgcagttcttcctccggatttatgagctggcgttacaggccagcttccgcgcggacttcactatggagcagctggggagggagctggggctggtaatcgaccaactttggccagcttacgagagggccgcgttggaagcagggatggctcgggcggtcataggaactgagctcgtcctgggcgggtggtcgccccaggcgggccgcatggtggccaccgcatatgccaaaagcgtcagcggggagcccgcgcgtgtgcaacctttggttggcggcctagcttcgccaggagatcccttgcagggtaggaaggacagctttgatccggaagatgtactggaggcggggcgccttcaggctaagtggttgaacagcgcgaggaggcggcaggttgcaggaggccggctcttggtcgccgtactccgccaagggcaaacgtccatccaagacctcggcgaagtttga

SEQ ID NO: 501934 - DNA, 462 bp, Stenotrophomonas maltophilia
atgcctattcgcgcggtggcatacgtcagtgaggcatccgatatcgatccccgcaaggtcgaccagatagtcgcggacgcagctgccttcaacctgcaggctggcgtgaccggggtgcttctgttcgacggcgccaggttcttgcagtacatcgaaggaccggaggatgggcttggcgtagccctacagcgcgtgtatggggcaacatcccacgagaacgtgatcgaactcaaccggggcagggtggggcgtcgccagttccccttctggtcgatgcactggatccgtgtagaccagatggcgttaggaaaggtggcgatctcggactggacgggctttgcccggggctggcgagaacctgcatggaaggatctcggccatagatcaactctcgatcattgtctccccgcatgtgatggcctgacggcgtcgcaggccgtgcgacacgcaagcgtaagctga

SEQ ID NO: 501935 - DNA, 507 bp, Stenotrophomonas maltophilia
atgcttccttctattggctaccaaggcttccgcgccgcacccatcccctcgggctgggtccagatgggtggccgctggggcctttggtggaacgggcgcgaggtggccagcgttaccccaactcgcgagggtggttaccgcctccatctgaacgccctgaagatgtggcagaccaagaacgccccagtcgccagcatcctccagggcaaacgcttcgccgagcggtggtgcgcggctaggctgctgccggagctgccgctgcgagaggcggtcgtccgcctgaccgacaacacgccgattgagcccaaggagccactcccgggcttgccgcctacccgcgagcaacagcagcaggccgaacgcctagacgcggcagcggcggcagcatcggcccgagtgatggccgcactggagccgatccggccgccggcggagatcaagcccagggcaaaggggccatggaaggggagaatccgacccagcaatgccgatttctcaagggtctga

SEQ ID NO: 501936 - DNA, 648 bp, Stenotrophomonas maltophilia
gtgggcgctgtgaaaggatttctgatgctctgtctggggctagcattggcgtggacaagcggggctgatgcgcgcggcgttcgggtcagcggttacgtcaagaaggacgggacctacgtcgccccgcactacagaagcgctccgaatcggtcgacgctggacaactactcaacccgggggaactacaacccctatacgggccaagctggcaagaaggatccgtacgcgctgcctccgccgaggggaggatccggatacgtgcccagtgcccaggcgtcgacctatgtccaaccggtctatagaagcccttcggctccgacggaaccgactacatatcgcttggcagactcaagcggcggctggcccaagttcaacgcgccggccaccgcaagcccggagagtgtggacgatggggaacgctacggtagcggccgctctaactatctgtcgtcggcgaccggaagtctctgcaacgagttcttgctagctgctgatgaaatggccagggcggcagagactttggccaagtgcgcttcgcggatggatcctaggcagacatgcgcagtcgaggctgatgacgctatacagtcgtccattcgataccaagtcagcgcaagcaaggcacagagttactgtcgcgggccgtag

SEQ ID NO: 501937 - DNA, 366 bp, Stenotrophomonas maltophilia
atggacgagttgccagccgaactgccgcttgagcaggagatcgccctgctgaggcagcagctgaccaccctgcggatcgacctttcaggcaaagactggctgaccgtggacgaggctgcgcactactgcggagtgtcagtcagtcagttcaatgcaaaggccggagagtacgacctctcgcctagacatttcatggggaagaagctctacgagaagagcgagctgtacagggcaatccacgactcgggcagctggaggccgcggagcgcgaccacttccactccttcggttgggaccacctcgccccaggtcgcggaggcattggcccgactgcggcgtcatgagcagcgcaaggggaagcgctag

SEQ ID NO: 501938 - DNA, 207 bp, Stenotrophomonas maltophilia
atgaatggggaagtgctttcgcgcgctgaggtcgaagagatcactcggaccccgatcagggtacggcagttggccttttttacacagaatcggatcccttattacgtcaacgagtacaaccaggtgatcgtgctgcgtaaggcagtaggggcgccagaaaggctcgacgcgcccaggccagtgtggcgatccaacaaggaggtttga

SEQ ID NO: 501939 - DNA, 225 bp, Stenotrophomonas maltophilia
atgtctgaaaagctctgcctgaccaaggatgagatcaaagcgctgacgcgcacgcgtttgaaggcacgacagctccagttccttcgccagaacggcatccggcactacatcgatgggtacgggtggccggtggtgctgcgggccgcagtgggcattgtcgagccgacgccggccgtcaaagccgttccgtggcggtccaacaagctcgggccacttcctggctga

SEQ ID NO: 501940 - DNA, 228 bp, Stenotrophomonas maltophilia
atgccgctcgctagcaacaagccgcttcgtgtgattacccgtgaagaggcacagaagcgcctcgggctcggccgctccaccttctacgcgttctgcaacgagaactcgccttcgttcaagccgtccttcccgaagcgtgttcgtcagggcggccttgtgggcttcattgagcacgaggtggatgactacgtgcgcagcctcatccaggcgcgggaggtgggcggctaa

SEQ ID NO: 501941 - DNA, 1014 bp, Stenotrophomonas maltophilia
atgggtatcgcagcaaacagcgcttcaatcacgcggcgaacgtacatctggggcgaagacggccggcccgtcatcaccggcgagcagaccgcgatctatgccgtgaagaagatcgtagacatgatgggaaggctgatgcgcagcaaaggtgacctgttcaaggtgggtgccacgggtctcgtcctgcaggatgatctggctaaggagttccggacttgcctgaaggctgacttggccaagatctcgcgtcacttccccgtccatcgccacagcccgctcttcacgatcttcaagcgcttcagtgctcccgtacgcttcaagtgcagcgggaagctcttcccggaggatgttgcgcccctcaatgctgccgtggcgaaaatgcgcgcgttctctaagggcgccgcattggggcctgcgttggcgaacatgcgtcgcgctgagcgcaagaaccgccgcagcacccgcaagctgctgcagcagttgcgccagggctactccaagttgctgatcattcgattggacttgggctacttctcgaagaccctgacgaatctcggcttctgcgctcaggatctgcctatcagtgaggtgcagcgccaccgtgacgcttttgtcgcgtacctccgtaccgggccgtactcgcaggatctcgctggctacatctggcgccttgagtacggtttggagaagggcagccacttccacatggccatcttcttcaatggccaggaactggccaaggacatcacgattgccgacgcactggggcactactggaagagcactgtcaccggcggcagcggcatgtacttcagctgcaacaagaacaaggaggcgtacgaacgctgtggcatagggatggtcccgcgcaatgacgatatggcctgggccaacgtcgaggacgcgatgttctacctcaccaagcaggactactacctccgcttccgccccgccaagggcatccggacgttcggttccggcggcccgtacggcggtgtccaatccgttgagtag

SEQ ID NO: 501942 - DNA, 579 bp, Stenotrophomonas maltophilia
gtggcgagaaagaaggagatgaacgattttgagtacctggaaagccgtggttggggatttgagatgccgatcgacaagtcacacttcactgccctagggaagctggaaggaaccttcacgggcattgggggcgcaggtgattcagatcgggttgagctgtccccgaagaatgtggacttcgtggaagatcacttgaggcaggccaaagctcatcacgcagaaggtagcctggaggacgcgtggttccatctgctccaagcgagcaatgcactggcgtatcaccgaggcgtgcgcgagggccgatttcaggcaggcaaggtcgaccggccggctcaagccgggaagagagggggccgtgccaaggcggccaacgtctccaagaccctagacggcatagcaacagagttgcttgcactacatgcagtggaaccgatgcggagaattgctgatttcgatatcgcagcgctgaagatcggtgagaagcacggcatggcccacgatcagaccgattggcttgcgaggctgaaaaagcgacccgcaatgctagcgctggtggctgaactgcgtttagcacgataa

SEQ ID NO: 501943 - DNA, 513 bp, Stenotrophomonas maltophilia
atgtcgttgcagatccgccgcgccacccttgccgatgtcgacgccctgtcggccatcgcgatcgccacctacaccgaaacctggggcgactcgtaccccgcgcaggagctgcatgatttcctgcaggcgcactacagcagcgaaccgcagcgcactgaactgtccgacccacgcagtgccatttggctgctgatggacggcgacgccgtggtcggctacctggccgccggtgccaacaccctgccgcacgccgatgcacgcgagggcgacatcgaactgaagcggttctacatcctggccgcacaccagaacggcggccatggtgcacgcctgatggacgcgttcatggcctgggtggaccagccgcagcgccgcaccctgtgggtgggcgtatgggaagaaaacttcggcgcgcagcgcttctacgcgcgctatggctgcagcaaggtcggcgagtacgacttcatcgtcggtgatacccacgaccgcgagttcatcctgcggcggccatga

SEQ ID NO: 501944 - DNA, 846 bp, Stenotrophomonas maltophilia
atgcgacaggatggggatttggcaagccttgaatcgatctacagggcaatccattcgctagaattgagactgaggccgtggatactggcctcgcttggcctcagacggccaggcttagcgatggatacagggggaaacatggatttggttgttccgcgcgatcgggagctgcccgatttgctttcacgtgcttcatccggcgatctcaatgtgctcgccgacctcatcaccgacttcggcaagggccgagtcgccttggatggctcggtcaagtctcagattctggcctgtaaggagcgaggtcgcctccaagacatctcggaacttcttgccggagaaatctcggcattcggtggcaacacccttgtgaatgccgtgcgcaaaggcggggtgtcctatcaagaactggcatcggacgtggccaagcagttggatggaaagccctccagcgggcttgctccatgggatcttgaagagatcgcgttgatccaagcggtgaagaaggccttcaaggacgttgccgtcgatgtctccaagaaaagcggtgcgcagttggctgacctcatgcggccaaccatcaacggaatgatcaaagaggcaggatcggcctggggcgccctcgccaatggcggagcctctgggatcgcagggttcttgggcgctcgcgttgcccccctagttttggtccctttggcggccactgcggttggggcgaccgcgcttcaagcggcgacgccagccttccgtatcacggtgccagccgtcctccaaattgctgtcatacgtcgccgccagttcgattctgacctggcttcataccgcgaggctctactagcatgcaagtga

SEQ ID NO: 501945 - DNA, 216 bp, Stenotrophomonas maltophilia
atgactgcttccaatgccttcgtggataacagcatggaccgccaagacgccctggcggcctccccccgtttcaccgtgcaacgaaccccggatggcgtccgtgtgcagctccaggagggcgacggagaccccggcaccggtttgaccatcgaccgggccttggcgttgctggagaacctattggagcagggacgcgccgtcaccattcgcgattga

SEQ ID NO: 501946 - DNA, 1761 bp, Stenotrophomonas maltophilia
atgaaacgctccctcatccactgcgctttgctggcaggccttgttgctggcacggcgcaagcccaggttcaagtgggcaacggtgccgttgccaccaaacccgagaccactgcggtaggcgaccgcgcccaatcgttgaccgttggggccacgaccatcggggcggacgccctcgccgacggcgggataatggtggatgaaaatggcgttccgggtgagtgcctgggggccactgcggtgggcaatcgcgccaccgctcgcggatgccatacaaccgctctggggttctcgagcgaagcgcagggctcaaatgcgctcgccattggctctcgcgcacaggcatttgcggtttacgccgtcgccgtcggaccccaagcccaagccaccggcgattccgcggtggccattggcgggcacagcctggccagcgggatcaccggtgtggccatcggctctagtgcccgcgcgctcggggatggcgggaccgctgtaggctcaaccgcaagagccgatggaaacggcgcggcggctttcggggccggggcgaatgctcaaggcgatcgcaacctcgcgttgggcgccgcatcccagaccgagggcgaaggtgcatccgccgtggggcccggtgccaacgcaaccgccgactttgccggcgcctacggttacagcgctggcgttgccggcgaggccggcaccgccgtgggtccatgggcacaggcgtttgcgccctactctgccgccttcggcgcgtctgccacggccaacgccacagaaagtgtggcattggggccccgtgccgtggccaacgcatggggatgcgtggccgtgggcgccaacaccacgtgcgatgaagaagacactgcagcctttggcaaccgccgcttgacccaagttgccttgggcaaagcggacgacgacgccgtggccgtcagccaactgcggaccgccgtggaaaccttgggcgctggcgcctccatggtgaacggcttgatcgtggcgccgaactaccagctgagcagcggtaacaactacaccaccgtggccggtgccatctacgatctcgatgggcgcgttcaccagctggaacaaaaccctggcggcggtggtggcacccccggtccacagggccccaccggtccgcaaggcccagcaggcaaggacggtaaggacggaggaagcagcaccacggtggccggggccaacatcgaggtcacggacaacggggacggcacccaaaccgttgccttgaaagacaccattgagctttccgagcagggctcggtccaagtggccaaggccatccacaacagcgacggcttcactgtccaaggcggcccatcggtcacccgatccgggatcaacgccggcaaccagcgggtaactggggtggctgcaggggcgatcgctcctgggtccacggacgcgatcaacggtggccaattgtgggactaccagcggcagcaagacgaccgctggaacctgacggaccgccgtttccgccagctcgacaaacgggtgagcggtgtgtgcgccatggcccaagcaaacgcccaaatggccacctcaacgtcggcgatccacggtgagaaccgcaaccgcttggccgtaggtgtcggtggctgcagcggccaagccgccatttccattggctacacccgggacgtgaccaccccacgcggatccccatcggctttctcgatcggggtttcccgcagcggacaggacacggccgtgggcgcagcctgggccatcggttggtaa

SEQ ID NO: 501947 - DNA, 465 bp, Stenotrophomonas maltophilia
atgtaccggctgaccaaagaccccgatattctgctctgcgtcgaaaccggtgcgtttattccgcgcggccattacctgtggccgaccgaatggctggagttgaacacgccgctgccgctattgccgccctacgagccgcattcaaccgagcactaccgcgccatccgcgcggctgcatgggactggatggcggcagaggtgcatgagcgcggatacgacagcatcgagacctgcgtcggctactacaacagcggcgtggatcggtaccgcttggaggcgcgcgccatggtggcctggcgcgatgccgtcaatcaggcgctggaggccctggtcaaggttccgccggccggtgtcgagacgtgggagcaggttctggtgctgctgccgcaaccctcccacttcaactggccttcaagagtcgaactcccgctcggtgtaggcgacggccccgcagtgcaactttga

SEQ ID NO: 501948 - DNA, 1095 bp, Stenotrophomonas maltophilia
atggcgctccggaccccattgatcctcaaccagtcgtcggctcgtattgaagagttggcggtggccgattcgatccccggcgccctgatcgacggactgtttggtcgaaatatcgtcatcaatggcgactttcgattctggcagcgcggccagtcattcgatgctatcgcttacgccacctacacggcggatcggttcctcccggttatggtaaatgacacggtcactgtgaaccgcgcagagcacccgccgggcgacgtgccaaacgtgttcaactcgcgctatttcatgcgttgcggtatcggacaggtggctggcaacaatagccttgcaacgcttcagtaccgcatcgaaaacggccaccggcttctctctggaaagaaaatcaccgtcagtatgctggtgcgcgcgtcgtcggcgaccaagattggaatagagattgaaatcacttatggaaccggtggctctccatctccgtctatttacgggaatagccagcttgtcgcaggcatcaccggcggctggcagctgattacccgaactttcactattgccagctccgaaggtaaaaatttcgggacttcgactgatggctatctatcgttgatcctctggatggacgctggaagtgattgggactcccgcagtgccggagtgggtcgtcaaacgggcgagtttcagttctccaacatccagatcgagtctggaaatggtgcgacaccgtttgagcaacgacctgatgcgctggaacttttgctgtgccagcagtattacgagaagagctacaacctttctgtagttcctgggacggcaaccaacgaaggacgccgatctgtttcgctgggagcagctccttctagtttcacctttatcgggcaggctttcgctgttcgtaagcgcggtattccatccataacggtttatcctgcgccgggcccagggcctagcggcgccgggaacgttgcacaagacgatggctcgctccgccctgttacggtgcaaaatatcggttcgagcggattcgagatgacgtggagtaatagcccaggacgctacggaggctggttccactgggtggcagacgcggagatttga

SEQ ID NO: 501949 - DNA, 573 bp, Stenotrophomonas maltophilia
atggttgagaccgtgctcggaatgacggatctgcagatcaagctggttactgcagctggccagctcgcactggcggggatggtcgcctacgtcgcctggcaacaatggcggacagcccgcaacaaactgaaggcggacctttttgatcgacgcctagccttgatgaaggccctgcagaccctaggcgaaaaggcctatctcgaaaatctcacagacgcggaactgaccgcgctgccgactttggccaaggagtttgggtatttatttggcaagtctgtcagcgagaaagccggactcctgagcgatgcactccgcgcacgtcacgagatcaaggtcgccatcgtcgagaagagggaattgctcaggactcagtgggacgctaccgcgtttatgtctacgctgccgaaaagtcgcgtcagcaatgaagttcagcttctggagcaaaggattgctgctacagaagaagagatcagggatcgcgaagtgcagctgatgggtgtgactggcgccctgtctcgctatctagccgatttgcaggtggccgcctcggacgccctcaccttgaagcactag

SEQ ID NO: 501950 - DNA, 318 bp, Stenotrophomonas maltophilia
atgaccgtctatgtcgacgagctgcaggaatacggctgggtgctgcgtggccggaagacggcgagctgccacatgttcaccgacacgctcgacctcgaggagctacaccgcgtcgccgccgtgatcggcatgcagcgccgctggtttcaggacaagccagcggcaccgcactacgacctgacgccggcgcgccggtcagctgcgatcgctgctggcgctgtgccggtcgatcgtcggaaggcggtcgagacctggcgggcgaggcgtgcgctcgtcgctgcagcggatcccaagaagaccctggaacagacgccatga

SEQ ID NO: 501951 - DNA, 339 bp, Stenotrophomonas maltophilia
atgagcggctggagatccagtggccgcgtaggcggtaccggcgtcgacctcagtgcggtggccaccaccgacctgctgcgggagatcgaacggcgctgctcggcgggcggcccccccaaggtcgaccgccctgcgaaggaccggccattcgcgaccaaggcgctctgggccgaggacaaggtcaaccaggcacgtgcccggcttgccgagctccgcgcgctgccggtaccgacctgcgaggccgagcgcggcgcccgcgccgcccaggactcgcaactggtcgccgacgtcgtcaagtacgacggcatggccaaggaattcaagaggaagggccaatga

SEQ ID NO: 501952 - DNA, 1047 bp, Stenotrophomonas maltophilia
atgagcaacaaaatcacggagctctgctggaagctgcagatgccgccgcccgcaaaggcgttgctgatggcgctggcgtggcacgcggacgacttcggcatggcctatccgggattcaccacgttgatccagaagacctgcctgagcaagaccgcgctgctcagcgcgatcgcgtggctggaagacaaccaggtgctgaccatccgccgcggcggcagtgatgccggcggcaccaagtacagcaaccggtacagcctcaaccttggccgcctggacccagaggtgttcgcgtcgaagccacggcgcgcatctaaaccgggtcgccagacggaccggtctgaaagcggcgaaggtgctgaccggtcctccgcgcacaccggtacggatgccgaaccggtacgcgacacggacgggttggaagagactgagggctccgaccggtacgtgggaagtaccggtgcgcaagaacgaccggtacgtctcgcgaactcgaccggtacgtctggcggacctgaccggtccgtctcgcgtactcaaccggtccgcgagacggaccctaaaggtcatgaaaggtcagtaaaggtcattgaaccgtcaaacgcgcaggcgcgcgacgacgatgcggtggtgccgcagctcagcgacgacgaggtcaagcgcgagctgatgggcatcccccgattgccgccgggtctggacccgcaagtcctggccaggttcgtgcggcaccgccgcgtgctgggaaagccgatgacgatcagcagctggctggagctgcagccgcgcttccgacagctcgccgccgaaggccacaacctcaacctctccctgagccagacgatgcgtgcaggcctggcactacccgtaacaccgaagcccgaggggaccgatcatgaacagcatcgagaatctgttggcaaccgcacccgacgaattgcggaagagcgcgcacgtcgtgacgccgcagctgtcgccgcacgagcagttgaggaatcgcgcgcccttgagcacgaaggccctggacaggctctgggctgtgatgggtga

SEQ ID NO: 501953 - DNA, 324 bp, Stenotrophomonas maltophilia
atgaacacgttcttggaacaggaactgcgcgacctgattgcgggatgtcagatccagatcaagacgcttcgcaatgacctggaagtcgccagcggtaccgccattgcgaccaacgtcgctctgcacgggctcatagctaccctccccgacctggatctggccgcaagagccctcgtatccgtgcggcaaaatttcgcagcgaccgcagcaccagcatcttcagcggaggctgccgccgcgttcgaccagacgtttgtcgcgctccagcagacgatcgagaaccggaagaacgttctggcgcgcaaggctcaatctccccagtga

SEQ ID NO: 501954 - DNA, 342 bp, Stenotrophomonas maltophilia
atgaccccatccgaactggacgcgcgattcgccctatacgacgaacgaatcgccgcattggaggctgagaagcaggcgaatagctggttcacgctggccgtcattggcagtcatcccgacacagaaatgctgcttgagatggttcgcgccgccatccaaacactgcgcggcaaaaccgggcccgaagccccagccggcgtggcagctgcgaccgtgcttcggctgttggagatcgaacgtcagatcctgaaggcgcagcagagccggcaggagctggcggaggctggggaagcggagcggctgttggagctgcagcgcgcggaatcggagcaggaacgctag

SEQ ID NO: 501955 - DNA, 420 bp, Stenotrophomonas maltophilia
atggccttcaccgaacgccgctgccgcatctgcggctgcaccgagctgcaggcctgccgcggcggctgctcctggatcgacaaggatctctgcagcagctgcggcgaggctgccagccataccgcgcccgtcatcatgggacagcgcctgctgatcgccggcagcagcatcaagctcagccgcaccgagaccgtggtgatgcaggttctggtcgcggccacggatcgcctggtggaagtcgacgcactgcatgccgcgatgtacccaggcagcaagccgccgtcgcgggaatccaacgtcctgcaggtgctggtatcgcgcgtgcgccgcaagctcgctgccgctggccataagcacgccatcgagaccatccgcctgcgcggctaccgcttcgtgatgccccaaggcggtgccgcatga

SEQ ID NO: 501956 - DNA, 273 bp, Stenotrophomonas maltophilia
atgagcgccccctgcaagatcgctgcgatccgccacgcggtgagcgcgctccatggtgccgcagacgatggtgcagacactcgtcgatacgccgatgcccttcaggagaccggctccgccattgatgagctgatcgcggccgacgaggaatacaaccgtgcacgtgaggcgtggttggggtcgccggggaaccatgacgaattccaggctacgcgggacgcgtggaagcgccgcctcgaagccctcgcccgcgtcaaaggcggtgccgcatga

SEQ ID NO: 501957 - DNA, 249 bp, Stenotrophomonas maltophilia
atgaactcggtgaccatgaccgtcgacgcggagatcgacctcgacgacctgatcgggaacctgagtcctatcagcagggaatacctcgccggcctcctgaaggttgaaggggaggccgcgcgcgcaccagatggccgcaccttcgagcagatcatcgaagccgccttcaacgaggtgcgcaccatgtccccggtgccgccggcgctggccgacctgttctgggtggtgcacgggagggccatgtcatga

SEQ ID NO: 501958 - DNA, 246 bp, Stenotrophomonas maltophilia
atgcacccgcatcgtctcagcactggccgctcttccctcgccgccctaatgactgccctactggcccagccgacgcgcgccacgcgcaccgtccctgtccgtcgcatgccggcccgccatcgcaccacctgggcaccggctggcggtggccaggccgaacgtgctcgccgcctgcgccagatcgaggccggcacgctgaccgccgccgacggcctggtcgcgacctacaggggcgagctgccgtga

SEQ ID NO: 501959 - DNA, 183 bp, Stenotrophomonas maltophilia
atggctgaggtcgcaatcgacatcactggcgaggaaggccagctgaccatcgagaacacggtcgctttcgacctgcagctgagcggctgcgggttgtgcatcgacatgacccacgaccaaggccaggcgatctacctcgctttggcaaccttcttcggcccgggagatacggcgaatggctga

SEQ ID NO: 501960 - DNA, 297 bp, Stenotrophomonas maltophilia
atggctgagtccatgatccttgtcgcccatggggcaaaggccgctcaaaacttcgaccctgacccgccgcgttgcatgacctgcgtctacttccgccgcgagccccacacccttcaccggcttgtctcccggccgaatcgtcggggcaacatggtcacgcgcaaagtgccgctgcggaaggatcccatcctgaatcccatcgtggatcgctgcagctttgggaacttcctgaccaagccgcatgccatctgcgacgagtggcacagccgggctggcgaggtaattgaccatggctaa

SEQ ID NO: 501961 - DNA, 747 bp, Stenotrophomonas maltophilia
gtgggcctgaccgacgccgggcggctctatctggaacaggtgcgcaccgccttcggcctgctggacgacgccgagcgcgacgtactggcccaggacggtgcgctggccggccgcgtgcgcctgagcgtgcccaccacctatggccactaccggctgccgcccgtgctggcgcggtttgcgcagcagtacccgcaggtgcaggtggaactgaacatcaccaaccgcaacgtggacctggtggccgaaggcttcgacctggccattcgcctgggccagctgccggacagcggtctggtggggcgaaagctggaagacgccccgctgctgctggtggccgcgccggagtacctgcagcgctgtggtacgccgcagacgctggacgatctgcagcagcacctgtgcctgccgtttgtgatgccgcgtacgggacggctggcgccgtgggtgttccgcgatggtgggcgggatgtggactgggtgccgcgctcgtccatcgagacttccgacgatgtgctgggcatggtgtcgctggccgaacagggcattggtatctgccagagctatgagttcatcgtgcgcgagcggttgcagcgtgggcagctggtggaggtgctgccgcagttacgtgggcggtcgaggccgttctcggtgatctatgcgccgcatcggcggcagtcggcggcggcgcgggcgatgattgagttgttggtggggaatgcggcggtggctggggaaggtgttggttga

SEQ ID NO: 501962 - DNA, 525 bp, Stenotrophomonas maltophilia
atggaggctggcgcgtaccgtatgtgggtagcgggactgttggtgagcctggtcggaatagccgggtgctcagaacaggtgcccgaggtgacagttccggccgggatggtccacggcgagcgggcaagcccctccgccgtcatccaaaagccgcatgtcgcgcagggctgcaatcttgagaccgtcaatgggcagcccgtcgcctcgttaccggtccaggcgtcaaacggtcagattgcattgagtggttgggtcgcgggccagatcgatgatcgtggcgagctggtcggcgagacttcgctggtgttttctgcgggtcccggaaccacggaaattaacgtcgccggagcagatgttcatcaccgtgaggatgttgcgcgttctctcggagagcctgcgttgtccgcggcaggattcgaagctctcctagatggatcaaagctgtcgccgggcacatacgccctcacgctgaagcgaggctcttacgtatgtgcccaaccattcagtctgcagaggggcaattga

SEQ ID NO: 501963 - DNA, 606 bp, Stenotrophomonas maltophilia
atgaacaatcagatgcaagaccgcatccacgggccggacgtcctccgcggattggcggcgctcggcgtggtcatgtttcatgtcctctatctttcgggcatcccgatcaatgagacggctgcggccattaccggaaggatggacttcttcgtccgcgtgttcttcgtgctgagcgcgtttgctatcggtcatgcctactattcacgcatgagcagtaccgaagcgatcaaggtcttctaccagaaaagattcttccgaatcgctccgctgttttacttcatgatcctcacaggcgtggcttttcggctggccatggatcaaccgatgccacctctgctcgacttcatgctgtcaggaagcttcctgtttacgcttgtaccaggcaagcagagcggcctcgtcggcggcggttggtccatcggtatcgaatggcttttctacttcatgttcccgctgctgctttcgaccatcaggacagtcaagtcggcagcactcgcgtgggtagtgctatgcccgattgcagtactttcaaagcgctacctgcaggacagctttgatggccaactgaacgagttcgcatcactcaacgtactggtccacagctaa

SEQ ID NO: 501964 - DNA, 618 bp, Stenotrophomonas maltophilia
atgaacttatcggatctggccaccttctacttggccgctggggccagtggcaagctaattgcgtccttggagcttccggaaggctatgagctagagatgcgaatgagcaacgacttcccgctagtggcgaccacggttcgacaagccaaggacgtaacggagcttcatcagcgcggtgagtacgaaaggctaaatgcctaccaagcgatggttgccttgtgctctctattcgaggtgttcatagcaaagctcggagatagtctcggagctcgtgcaggaaacagcattcgaatcgtatctgggcgaagaaagggcattccgatcgaaattaggaaccaaacgctgtgcttggtgagggccattcacgaaaagcatgggatcgattcacaactgaacggcgacacggctatctgttggatctacaacttcttcctgcttcgcaacatcgtggttcacgaggggggaaggcttagcgccaacaagcgcgaaaggctggtcgcgaaatgggcccagcaccctctggatcagcggcttgtcgtcaacgggaatcacatcgacgatatggtccactaccttcgtagccacgtgagctcgttcttataccaatgtcgacgttga

SEQ ID NO: 501965 - DNA, 399 bp, Stenotrophomonas maltophilia; identical to SEQ ID NO: 499545

SEQ ID NO: 501966 - DNA, 2103 bp, Stenotrophomonas maltophilia
gtgaccgaaaccgtcgccgctccgcgcacgctcgatgacaccttgaaggacgcgatccgcaaggcgtacacgacgctgcaggccaacacccccggcttctccacccgtcgctcgcagagccagatgatcggcgtggtgtcgcgcgcgctgtcgaaaagcggtggcgtcggcgtggtcgaggcgccgaccggcgtcggcaagagcctgggctacctcaccgcaggcgtgccgatcgcgctggccaccaagaagaagctggtgatcagcaccggcaccgtggcgctgcagtcgcagctggtcgagcgcgatatcccgaatttcctgaaggccaccggcctggaagcgaccgtggcgctggccaagggacgcacccgctacctgtgcacgcgcaatgccgccgaggcgcagggcgagggctcgcagggcggcatgttcgaggatgacgcgccactgttcgaccggccgctggcgccgatcgagatggacatcgccaaacgcctgaccgacgccttcaccagcggcagctgggatggcgatatcgacaatgcgccggagaccatcagtcccggcctgcgcagccgcatcaccacgccggcctcgggttgtgccgggcgacgctgcgcctattcggcgcagtgcgcggtgctgcgctcgcgcaatacggtgcgcgacgcacagatcgtggtcaccaaccacgcgctgctgctgtcggcgctgtcgatcggtgacagcgacaacggccagccgttgatcgcgccaccctcggacatgctgctggtgctggacgaaggccatcacatcggcaacgtggcgatcgaccagggcgcggccagcctcgcgctggacgagatggccaagcgcaccggccgcctgcagatcctgatcgccggtgcctaccgcgcggtcgacaaggaccggctcggcaacctgctgcccaacgaagcgatcgaagtcgccagcaacgtggccaagcagctgcgcgcgttccgtgatcacatcgagcgggtgtggatgccggcgccggcggacgaagagccgatgtggcgcgcggccaatggacgcctgcccgaggcttggcgcgagccgatcgaggcactggccgacgatacccgcagcctctacaactgggcgcatgcggccaccacgcaggtggccaagggcaagccggacgatgccgcgcgcgagcgcctgcagcgcaacctgggcatggcgctggagatgatcgagcagcagtacaacctgtggcaggcgtggcgccgcgaagacaaggacggcgcgccgccgatggcgcgctgggtgactgccacccgcgatggcgacctggtgctgcacggttcgccggtgtcggccgcgcacgtgctgcgcaagctgctgtgggatgaagtggactcggtggtgatgacctcggcgacgctgaccggcggtggcgacttccaggcgctggcgatcgacaacggcattcctgaagaggccgagatggtctcgctgtcgtcgccgttcgacctgcccaaccaggccgaactgatcgtgccgaagttcccggtcacgccggacgaccgcgaaggccacccgcgcgaagtggcgcgctacctggacaccgaactggactgggccaagggctcgatggtgctgttcacctcgcgctggaagatggagaaggtggccgggctgatgccggctgcgcgccgcaagcaggtgctggtgcagggcgagatgtccaagacccggctgatcgaggaacacctgcggcgtgtcgaggcaggcgagggctcggtgctgttcggcctgaactcgttcggcgagggcctcgacctgcccggcgaggcctgcaccacggtggtgatcacccaggtgccgttcgccgtgccgaccgacccgcagaccgccaccctcagcgagtggttcgagggacgcgggctcaacgcgttcaacctgatcgccattccgcatgcgctgcgcacgctgacccagttcgccggccgcctgatccgcacctccaccgacaccggccgcgtggtcattcttgattcgcggctgctgacccgccgctacggcaagcgcatcatcgacgcgctgccgccgttcaagcgcgtgatcggctga

SEQ ID NO: 501967 - DNA, 354 bp, Stenotrophomonas maltophilia
atggacagcacaaccctgatggtgaccgtgctgagcatggtcggcgtgcgcctgccggtgctgatcgcgctgtgcgtcggcctggtctgggtggtcggtgcgccgcgcgatgccacccgcaccggcgcgctggtcggcctgctgctgttgctgctgtccagcctgggtggcctggcggcgggcatgctgccgatgtggctggtcagcagtggcaacttcagcgccatctcgggcatgagcgccatcttcggcgtggtgcacttcgcgctggcgatggtcgaggccatcggcgtggtgctgctggtgtgggcgctggtgcgcctgctgcgtagccgtcccgccccggtcgcctga

SEQ ID NO: 501968 - DNA, 846 bp, Stenotrophomonas maltophilia; identical to SEQ ID NO: 495954

SEQ ID NO: 501969 - DNA, 963 bp, Stenotrophomonas maltophilia
atgcacctggacgccctcgcctccgcccgtcgccacgaacaccgcttcgacgacggcaacccgctggccgaacgcaatacccgccgcgccctgtggctcaccgtcagcatgatggtcgtggagatcgtcggcggctggtggttcaactccatggccgtgctcgccgacggctggcacatgagttcgcatgcgctggcgctgggcctctcggtgtttgcgtaccgctgcgcacgccgctacgcgcacgacccgcgcttcgccttcggcacctggaagatcgagatcctggccggctataccagcgccatcgccctgctcggcgtggccgcgctgatggccgtgcagtcgctggagcggctgtgggtaccagcaccgatccactacaacgaagccatcgccatcgcggcggtcgggctgggcgtgaacctgctgtgtgcctggtggctgcacgacagcccgggccacgcgcatcatcaccatggccatgaccacgggcatggccacgaacaccacgaccacgggcatgcgcacggtcacgacctcaacctgcgctcggcctacgtgcacgtgctggccgacgccgccacctcggtgctggccatcgtcgccctgctcggcggcaagctgctcggcctgacctggctggacccggtgatgggcctggtcggcgccgtgctggtcacggtgtgggcggtcggcctgctgcgcgacagtggccgcatcctgctcgacgcgcagatggacgcgccggtggtggccgaagtgcgcgaagtgatcgaacagggcccgtggccggcacgcctggccgacctgcacgtctggcaggtgggtcgcggcaagtacgcggtcagcgccagcgtggtcaccagtgacgccacgctggatgccgataccgtgcgcaacgcgctggccatccacgaagaactggtgcatgtaacggtggagatccaccgcagcgagtga

SEQ ID NO: 501970 - DNA, 513 bp, Stenotrophomonas maltophilia
gtggccgcagcccgcgcgcaggtcggcgtcaccacccgttacgatcctgcttaccaggtactggcctatcctggcggcgacgtgccactggatcggggcgtgtgcacggacgtggtggtgcgcgccctgcgcgatctgggcctggacctgcaggcacgcgtgcatgaggacatgcgcggcagtttcagtgcctatccggcgatctggggcctgtcacggccggaccgcaacatcgatcatcgtcgtgtaccgaacctgatgcgctggttcgagcgccagggctggcagcaaccggtcacggccctcgccgccgactacgcggccggcgacatcgttgcctggaagctcaatggcaacggcctgctgcacgtgggtatcgtttctgaccggcgcctggccaacggcacaccgctggtgctgcacaacatcgcgcgcggcacgcgcgaagagaacctgctgttccagcacgcgatcatcgggcattaccggatgccgttgcgacagtcccggtag

SEQ ID NO: 501971 - DNA, 432 bp, Stenotrophomonas maltophilia
atgaaatctgcgacattggtgcccatgctgggcctgctgctatctgcatatgccagtgcaggggcggcagcggtaaaagacgatcctcatgatgaagtgctgtgtgccatcgctaagagtcccggcgaatacgatcgggacgaggtcgtgttgtcagctcgatatgtaacggataaccgccacgaagaggttctgcgcaactcccactgcagcgatggcgcacgaatcctcgatatcggcaagcatggggccgccagttcggtcgcacgtttttacgccgaacagaagcgcatatgcctggagcgtaacagtcctggcctgtgcaatatctctgccagcgtgcgggtgtccgggcggattcggctgacgcaggatcgtgccgtgttcgatctcgaggacgtgaggcacttcgcgtttgacgatgagcggtag

SEQ ID NO: 501972 - DNA, 168 bp, Stenotrophomonas maltophilia
atgggacgcaatgggtggcggctcgctacagtgttgctgtgcttcgctgcaacgtcggcttcggcgcaggaattcgtggaagccgagtccgaatacgccaatcgcgctggcaaggcccagcagcttgggaagcttgatgcaggtgccttcggcgagaaggacaaatga

SEQ ID NO: 501973 - DNA, 360 bp, Stenotrophomonas maltophilia
atgtttcgccggcaattgttctatgttcaagtgcatcaggatcacttcatcgctcgcttggttggtggtgacagaaccattcgtcgccagtgccacgcccttggcaatcgtgcggggccggtcagggacttctccaccatccgacctaagctgggggaactcttctcggaactcgcgtccgggttctcgctcctcaagccgtgggcgctcctgcactttgatccggtcgagtatccgatcacgaaggaagagctcgcggggttccagacggttgccatgcgtagtggggtgagcttctgctttctctccacgtgggagcagcggcatgaagacaaggacttgttggagatgttcaagtag

SEQ ID NO: 501974 - DNA, 282 bp, Stenotrophomonas maltophilia
atgaagatggatttggataccttggaaaaggtctcatcaatattgttcgatgcgctccgctccaggggcttgcaagagattgaagtggaggacgttttctatcgcgtggtgccatggtcggaacgccactccgtgggcgatgagcgggtggagcttgaagttggaagtcttttcgatgactactctgatagtcaaagagtcgcattggggcagcaggaaccactggcctatcatctttccgccctggcctgccttctctacgagataggggggggaggttga

SEQ ID NO: 501975 - DNA, 828 bp, Stenotrophomonas maltophilia
atgaaggtcatcaggcgcatcggtagaacctcttttcggaagcttccatcaccaggctccatctgcggcgtcgaccatacgcaccacatcatcaagccttgggtcctggcacatcatctccagtggtgtccgatcaagctcattttcggcgtgtgggtctgcaccgcaccagaggagacaggccgcagccgcgacgctgccatgtacaactgcgcttgccagcggtgtcagatcaagatcgccacgcacatcgatggtggtcacgaagggcatcaatgcactgaggagggccacatcgttgtaataggccaccacatgcaggggcgtgtcctcataggccccttaagtctccggacaagtcagcaccgtatcgccgaagtcagtgtcgacaccgagccgggaaagcagttcgctgagtacaggatcgatgattttcatcgggctgcagatacagaacaccggaaatggtgcgccattcacagcttccaagcctccaaaggtgaggtctgccacaccaaacatcatgctcaggtagtcgacgcactcgcagggacacagaccaagtggctctaccaaagacgacgggacgccacctgcgtatccgtatgtgctgccccgggaagcgcagcgccagctcgaacaccacactgcccccgtccggatccgcactcggaatctggctgccgaacgcctcgctcttgttgttccactcccagatcgcgatatcgcgcaccgggtcgatcaccacgcactgctgcgtcgtacagcgcgatctccgctgcgccaccgatcgggggacgcagcaggcgctcgccgcggcgattgtag

SEQ ID NO: 501976 - DNA, 876 bp, Stenotrophomonas maltophilia
gtgcgcaaccaggccgtgcgcaccggcgcccacgagtgggtgatcggcttcggcgagcggaagatgatcgatggcatcgacatcgcgccacgcaacgacaagaactggaagcatggccaggtacgcgactacgaggtgtacctgggcgacagcaatggcgagtggggcgagccgatcgcccgcggccgcctgcagttgaaggagggcgtgcagcgcatcgacttcccggcgcatgccggccgcctgctgcgcttccgcgtactgagcgtgcagaacccggaaggcgacggcgccagcagcaccgacccgatggtcaccgccgcccagggcagcgcgcgcgcgttcgatgcactgcagccgcgcgacgtcggcccgatcgcgctgtccactttccacatcctcgaacaccaggaaccagaacgaccggcccggcagcgctatctctccgagctgccggtgccggccgcgctggccagccagctgcgcgccgaccagtcgttccgtggcgacgccggcatgcgcatgaacggcctgcagttccgccggggcctgggtgttggcgccaacagccggatcgacctgcgcctgcagggcggctggcacctgctgcgcgccgatctcggtatcgatgacgcctgccgcaacgccggtggcctgcagttccaggtctggggcgacaaccgcctgctgtacgacagcggcctggtgaaggcgcccggcgtggtcaagccggagctggacatccgtggcctttccaccctgagcctgcgcacgctgggtgcgcagggcagccaacccgcccaggtctgcgccaactgggccaacgccgtactgatcggccaggagggcgactccgccagcttcgtcgccccatga

SEQ ID NO: 501977 - DNA, 312 bp, Stenotrophomonas maltophilia
gtgctcagcaacggcgtgatcacgccggcagcctcggccaccgacaaccgcgtgtacctgaaggacggcaaccgcttccagctcgatacccgcgtgccggacccgggcacgccgtcgcccggcggtgacttcgaccacgtgtacccggcgggcatcggcagctatgtgccaggccagaccgtggtgaagggcagcgacggcaagctgtatgcctgccgcccgttcccggagggcgcgtggtgcaacgtcaatgccgaggcgtaccggccgggcgtgggcgcggcttggcgcgatgcctggatcgcttactga

SEQ ID NO: 501978 - DNA, 324 bp, Stenotrophomonas maltophilia
atggacacctggacactgatcgataccgacggcttgaagattggtgtagtccagcgcttccgatatgaatcctggcgcgtgagtggcaggttcatgcctgatctcggctattcaaggtaccagcggctcttcgccgatcttgaatatgcagccaatgagcagttgttcacccatgtcgacgatctcgagagaagcatcgctgcattgcgcattcgagccgttgcacctggcgggaaggacgatccccagctggtctcgaatctgcaggtcatgcgtgactggtgtcagttccagatcagtccaacgacccgcccagccgattag

SEQ ID NO: 501979 - DNA, 435 bp, Stenotrophomonas maltophilia
atgaagaagatcgtggtgagtctgattgcgtgcgtcgttcttgccggctgtgcaacccgccagatcagctccgaacaggcgcaaccggtgcctgccgaccgggttttcgccttcaatgggatcggtaacagtgcttccggacaggtaatcgttacgcgcgacgtcggcgcggttggtggggcgtgcccgcttgcactgtatatcgacggcacccttgcggcccatctgcagcggggagagtctgtctcgctgtctgttcccgccggcaatcgcattgtcagcgcaagtttcgcaggcaaaggtctctgttcgtgggggggggaatcggcgcataggcgcgagatttcccaaatggtcacggcgggtggcagaaccaagatccgtctcgcgttggcccatgatggcgtgattcagatcggtccgaccgcgttctag

SEQ ID NO: 501980 - DNA, 342 bp, Stenotrophomonas maltophilia
atgcacctgatcaaccgactgctgcactggaccaccctgcccgccgggcgccgcgtgatggccgtgctgggtgccgcgctggtgatcgtgctcgcctgcaatccggatctgctgccgttgctgccggtggtggacgcgctggggctggacgtgctggtgctggtgctgttgctgggtgcgcagctggtggcggcactgccaggggtgcgtgagcgggcctcgcgtgggaccaaggcgcttgcacgcctgctgattggcgcattggcgggagctgcaggtggttatctccggcagctcgcgtggtggctggcacggggtccggtgatcgctggacgcaaatga

SEQ ID NO: 501981 - DNA, 636 bp, Stenotrophomonas maltophilia
atggacaagatcgacttcaggaagcgcgaccgggcgctctatcaaccgcccgccggcaggttcgtaccggtcgatgtaccccccctgccctacgtgatggtcgatggtcgcggcgacccgaacaccgctcccgcctacgcacaggccgtgcagtggctgtattcggtgagctatgcactgaagttcgcgctgaaggccgaaaggcgcgactacgtggtgccaccgctggaggcgctgtggagcgccgaggacccggccagcttcgtcgcgcggcgcaaggatgagtgggcctggaccgtgatgatccgcacgcctgaggacatccggcctgcgcagtggcaagcggcgatcagcaaggcgcgcgcgaagctgggagatgccccgccaagcctccgccatgaacgccttgccgaaggccccagcctgcagaccttgcacgtgggcgcctacgacgacgaaggggccgtcctggcgcacctgcatgacgaagtaatgcccgcactgggttacacctttgccggcccccatcacgagatctacctgagcgacccgcgcaggaccgaggcggcacgattgaaaaccgtgctgcggcagccggtgcggccgatcgggcctgatgaggattccggcacatga

SEQ ID NO: 501982 - DNA, 831 bp, Stenotrophomonas maltophilia
ttgaacaaccggaatgccagggaatcggcttcgccgctcgcgctcgcgcgcagcgtggcccgcaatcgtgacctgctcaagggcttggtcgcgcgtgaagtggtggggcgctaccgcggatcggtgatgggcctgctgtggtccttcttcaacccgatcctgatgctggccgtctacaccttcgtcttcagctacgtattcaaggcccgctggagtggcggcgacggttccaagaccgagttcgcgctggtcctgttcgccggcctcatggtctttaacatgttcgccgaatgctgcaaccgggccccgctgctggtgactggcaacgcaggctacgtgaagaaggtggtgttcccgctggaaatcctgccgatcgtgtctcttggttcgagcctgttccacctgctggtgagcctggtggtgtggttggtcttctacgccgtgttcgtcggcatgccgccggccacagcgctgttcctgccgctggcggtgctgcctctggtgctgatgacgctgggcttctcgtgggtgctggcctcgctgggcgtgtacctgcgcgacgtggctcaggtgatcggcgtggtcaccctggttctgatgtacctgtcgcctatcttctatccagtctcgatcatgcccgagcagtaccgccccttcatgaacatcagtccgctcacctccaccgtcgagcaggtgcgcaacgtgctgatgtggggcaagggcctggattggggcacgtggtcgatctccatggccgtgggcgttatgctggcctggctgggctttgcgtggttccagaagacgcgcagggggttcgccgatgtcctctga

SEQ ID NO: 501983 - DNA, 1428 bp, Stenotrophomonas maltophilia
atgtcctctgaaccggccatcaccgtctcgggcatctccaagtgcttcgagatgtacaactcgccgcgcgaccgcctgcgccagttcttcgcgcccaagggacgcaagtactacaaggaattctgggcgctcgacgatgtctcgttcagcgtggcgccgggcgagacgatcggcatcctgggccgcaacggcggcggcaagagcacgctgctgcagatcatcgccggcaccctgtcgcccacccgcggcgaggtgaaggtcaacggcctgctggccgcgctgctggaactgggttcgggcttcaacccggatttcaccggccgcgagaacgtctacctcaatggcgcggtgctgggcttcacccgcgagcagatggaagagcgcttcgctgcgatcgaagccttcgccgatatcggcgaacacatcgaccagccggtgcgtacctactccagcggcatgtacgtgcggctggccttcgccgtgcaggcctgcgtggaaccgcaggtgctgatcgtcgacgaagcgctgtcggtcggtgacgagaagttccagcgcaagtgctacgactacatcgaaggcctgcgcgccaagggctgcgcgatcctgatcgtcacccacgccacctccacggtggagaagttctgccagcgcgccgtgctgctgcacaaggggcgcctgcacggcatcggtgaggccaatgcgatcatcgaccagtaccacgcgctgttgtactcggatgagaaggcatacctgcgctatgtcaattccgaggccgctgaggctgccgcaactgcagcgcagagcgtggccctgcctcagatcatcgagccggtcattgacgttccggtaacgcaggaggtgctcggcgaggtggccgatccgctggttgtcgatgagctggcagatgccgaagccatagggatggagcccatcgcggagattgcccctcgcgacgctacggccgtggtgctggccactgaaggcgagggcaggctgcgcgcctacattgagaactgggctgcgcttgatgcagccggagagcgctgcgaagttttcatgaccggcgagcgggtcacgttggtggcccgcgtcagagcctttgacgaaatcgaagaaatgcagttcggcctgctcctgcgcactgttgaaggtgtttccgcatttggcagcagcaccatgtaccaccaggccaacttgattggagtacacgcaggtgagacatgtgaagtccgattcaatattgatctggcgctgtgcgaggggacatattttgtcaccttggcgttggcagaggcgatcagccacgccgatatggcctatctggaccgcaagaccgacgtgatcatcctgaaggtgcgggcgccgcgcgcgaagggaactggcattgccgcacttccggtggatgtgagctttacccggcttggctga

SEQ ID NO: 501984 - DNA, 4314 bp, Stenotrophomonas maltophilia
atggaaaagtcattgctgcttgtcaccgaggctttcgagcttggcggtgtcgaaacctacatccgctgtgagattgagcagttggtgcgacaagggtggcgggtccatttcgcatgtggacggcgcttctcatctgcaatgctgccgagcggtcttgcatcggcaacgaccgggctgccacttgggcctgaggcgtccatcagcgacttcttggatgccgtcgaccaactggtcgatctggtccggcgtgagggggtgtcggtgatccacgctcacccgttcacgtcgctggtgccggcgatggcggcatcgtcggtcctgggcattccgtgcgtggcgacactccacggtcccagttcagtgtcaggcagctacggagctgcgtatgacttcatgatggcgtcgctggtgcttccctccgccagccacgtatcggctgtttcgggcgaggtcgccgccttggcggagccctatgttgtgtcggggcggctgtccgttcttcccaatgccgtgcctgccgtcatagcaagcaccagccaggagcgcggtgaccgttggctggccgtatcacgactggatccggccaaggcagagggcgtcattcacttcgcgcggtcggccgcggaaattggattgccgggtgttgatatctgtggcgatggcgtggccatcaccagggtgaaggaggcacttgccgacctgatcgagagcggattcgtcaggctgcttggcccgtcggcagatgcttcctccctgatgcaggcttacgccggtgtcgctggcatgggtcgagtggcgctggaaggcgttgcagcagggctgccggtagtgctggttggctacgatggagtgaaagggctgctcggcccggagttgtacgcggacgccgtgcactccaatctctccggtcgcgggcttggaaccgtgagttccgccgaactgggtgcccagctccagcgtcgtgatgcccaggatactgcggcattctcgcgccagctgctcgtcgaccatgatgccgttgcgctatgggagcggtttgccaggagcctgccggaactgctccccgcacgctcggtgatcttggaagcctacgtggtgcagctgcgtgccatgtaccccgactcggatgcgtccgcttactggtcgcgtgaagtgatggacgcgatgtctcgcgtcgtcgcgtccccattggtcacgggtactcccatcgtcccggcgttcaccatcttttcccaggcatttacgcgttccattgtcgagcagcagggcatcgcgacgcgccacagcgtcgagcagatttctgcgcccgctattgagattgcgcggagcgacgcgcttcttaccgagatgcaggactggatggcgcggctggatgcccggctcgggagtcttgccgaggccggcggcgctgccgactcctcgctccgcctggccctgggacgggagatgcagcgtgcgctcgatctgctcagacccgacgttgcagggcttgcggatgaactgcatgagatggagaaccgggtatcggccggctaccggcagacgctcgaactggaggtccagcgtgcattggatgtccttcggcccgatatgcgggaaatgaacaaccagctgcacgacgttgccgctagaatggcggccgatcatcggcacgagtccactcgcatccgtgaagcgatgcatgtcggtgcgggccgcctgatggatggcctgcgcgagcatattgttgcagaaatcgaggcgattcatcgtcatcaaggccaggtttcgaacgatctgcgggcagagctgcgcgccgaattcgaaacgctgcggcaagccgcacggcacgaatcacagatacacaccgaacttgttgggcgggagatgtcagcgatacgcgacaccatccgtcagcagactattgcgagtacaggcgaattccgtcgcgagtctcgcttggctttcaatgaagcaatcaggggaattgaagtaaacatgaaacaagcgatcaagggaatggaaacctccatccggcaggatctcgccaacgtcgctgggggcatggatctgcatgcggcgatgaatcgggatattgccgagctgcatcagcgtgtgctggatctggagcaggaactcgtcgaggtgtacggcagctcctcctgggtgctcacgcgccccatccgtgtcctcaagcgtctgatcctcgagccacgggcgacatggcacctgatccgtcaggccatcgtcagcgactccaccggtgacggcactgctggcgtgcccgcgcggcgctccggacgcctgagccgggcgtggaacttcatccgccgttcggcacgcaccggccgtattgatcctgccgacaaggcgcgcctgatcggcatgatccggtccaactacaacaccgtgttgaccaccctgaagatcgaggtgccacgccctgcgcttgccgagccggtgctggaggacgtgttcgtgtgggcggtgatcgactggcatttccgcatgcagcgtccccagcatctggctgctgcgatggccggcaaggggcaccgtgtcttctacatctccaacaacttcgcggactctgccgagcccggtttcaccgtcgaggcactggatacggaaggacggctgttccaggtcaatctcaacctggccggctcaccgcagatctacttcgatgttgcgaccggcgaacaggtccaggctctccaggccagcatgggcgaattgctgcgctggacgggtagcacgcgttccatctcgctggtgcagcacccgttctggctgcagcctgcacagagcctgcccaacatgcgcctggtgtatgactgcatggatcaccacggtggcttcgaggacaacgcggagagcgttctcgccggcgaacgcgcactggtggagagcgcagacctgctgatcgtcacgtcgcagtggctgtatgaagagatgcaggacaaatcgtccaatatcgccatgatccgcaatgcgaccgagtacgaacacttctgcgagcgtccggagcaggtgttcgtcgatgccgctggccgccggatcatcggttactacggtgcaattgccgaatggttcgacgtggagctggtgcgccgtgttgccgaggatcatccgcaggacctgatcctgctggtcgggcgcgataccgcaggcgctgctgaacggctcaccggcgttgccaacgtacagtttgtgggtgaggtaccgtacaaggagctgccctactggctgcatgcgtttgatgtctgcctgttgccgttccgggtgatcccgctgaccttggccaccaatccggtgaaggtgtacgagtacctgagcgcaggcaagcccacggtgtcggtggatctgccggaaatgtcgcagttcgaagggctggtccggctcgcaacggcgccggcccagttctccgagcaggtttcgctggccctccagcccgctgacatgcataccgatgcggtgcatgcgcggcagcgcttcgcacggcagcagacgtgggcgcatcgcgctgtcgacctggatgcggcgcttgtgcagatcgaggaaccgagggtcagcgtcattgtgctgtgctacaacaatctcgaattcacccaggcctgcctgcacagcctggacctttacagcgactacccgaatctggagatcatcgcagtcgacaacgcctcaagcgacggtacgccggagttccttgccgactgggcagccggtgcggagaatcgaatcttcatccgcaacgattccaacctgggcttctcggccggcaacaatgtcggtctgagcgcggccacgggagagtatcttgtggtgctcaacaacgatacctatgtcactcctggctgggtccgcggcatggttcgtcatctgaagcgcaatccagaagcagggttgatcgggccggtgaccaacaacatcggcaatgaagcacgtatcgagatccactacgcgacgatggatgagatgatcgagcgcgcaagcgagcatacccgccgtcatcctggcatggccttcgagctcaccaccgcggcattcttctgtgtgatgttgacgcgcaaagcgtacgagcgtgtcgggccgatggacgagaacttcggagttggtttcttcgaagacgatgactactgccgtcggctgtcactggaaggcttcagcatcctctgtgccgatgatgtgttcgtgcatcaccatctttcggcgagcttcaacaagctcaagagcgatgccaaacaggtgttgttcgaaaagaacaaggccatctatgaggcgaaatgggggccgtgggtgccgcacgtataccgcgaacgtgaccgccactaa

SEQ ID NO: 501985 - DNA, 1149 bp, Stenotrophomonas maltophilia
atggctgaattcgccgatatgacggaacaacgcaagaaagtgctggttgccttcggcacccgccccgaggccatcaaaatggcaccggtggtggaagcattcgaaagagatggcaccatggacgtggtcgtggcagtcaccgcccaacaccggcagatgcttgaccaggtacttgacctgttcggaatcgtgccggacgaggacctggacgtcatgcagcctggccagaccctgtctggactcttcgcccgcattctcaccgggatgagcgacgtcatcgcacgccacgcacccgatatcgtcctggtacatggcgatacgtcgaccacgctggctaccgcgctcgccgcgttctacaacaaggtcaaagttggtcacgtggaagcaggccttcgcaccggcgacatctgggctccttggccggaagaagccaaccgctgcctcaccgcaccgctgagcagcctgcatttcgcacccacggagcggtcgcgggcgaatctggctcgggaaggcatccaggatgatgtcatcgagatcaccggcaacacggtcatcgatgccctgctggacgtggtggagcgcatcgaaagcgatgacgccctggccagccgtctgggcgagcagttgcccttcctggatccgacccgccggctggtgctggtcaccggacaccgccgcgagaacttcggcgacggatttgaacagatatgccatgcgttgaaggcattggcccaacggggtgacgtgcaggttgtataccccgtccacctgaatccgaatgtacaggagccggtaaaccggattctggcaggcgccgacaatgtggtcctgatcgacccgcaggattatctgccgttcgtgtacctgatgtcgcgcgccagcctgatcatcaccgactcaggtggcgtgcaggaagaagcgccctcactgggcaagccggtcttggtgatgcgcgacaccaccgagcgtccggaagcggtggatgccggtacagtgcgcctggtaggcactgatgcacagcggattgtcgcagaggcaacgcgcctgcttgacgacccggccgcctatgcggagatgtcacgggcccataacccttacggggacgggaaggcgtctgcccgcatcgtggaacgggtacgccgcatctga

SEQ ID NO: 501986 - DNA, 459 bp, Stenotrophomonas maltophilia
atgagcatcactcgcaagacgcactggatgttcgtcgccgccattgccggcaccttggcgctggccgcctgttcaccgccgcagaacgctgaaagcgaggccgccaaggccgaagcctctgcacctgtcgcggaggcggctacgcccgcagcaaagcctatcgacgccctgaccggcttgaagatcgtgggctatggcccgaccaccgccaaggcttcgacggcatccgacgcgcgcgtggatgtgtgggctacggctgaccgttcgctggaaggttaccaggcatcgctgtggctgaatggccaacagcttgaaaatgctgcggtttccggtgtcaccgccacaggcacgctgccggcatcgctgctcgccacgccgggtacctacccgctggaaatccggatcggcgaaaatggcgaactgctgaccagtgagaaggtcgatttcgtcatcgagtga

SEQ ID NO: 501987 - DNA, 423 bp, Stenotrophomonas maltophilia
atggggtataacgtggacgcaggcaagacgctggtgattgtaggcatgttggcgctcgctgggtgtcagcgcccggcggctgatggttcggccgtaccgtacaagattgtcgaagatcgcgccaggggcgatgcctgcctgctctgcgtggcccccttgccggacgtgccgtgtgccgatgggcaggctgctgaagtccgctggacggttccggagaagaatgcggctcagggagtcaatgtgcagattgtgcgcaaaggcggcgcacgtgaggatctggctcatgggccgaggtcggggcaggcgttggtgcagcccaagcttcagccgggtgacaggattctggtccagaacgccgacaatggtaaagaccttttctttacccgggtaacggagcctgttggctgcgccatgcagaagtga

SEQ ID NO: 501988 - DNA, 1503 bp, Stenotrophomonas maltophilia
atgaaaaagggcgccagcgagtgcatgcggggcgtgttggattggcccagcgcagtcgtcctgctcttggccatggtcgcgttcgccaacgccgctatgtacatttcctatgcgggaatcccgtttgtcacctctgacggctggtatttcgtcgacggattcctgcagaagtattacaacggtggcgtgacgctgcaggatctgtacatgaagcgaagcgtggatgaccacgcccagcccatccacaaactgctgctgctctggaacgcggatcatttcgcgctcgacttcgtggtggagtcctatatcggcctcgccatagccagcgtggcctggatagcgatgtttctcgcaattcggcatgacaaccgaacgcatggatactggtgggtgctgcccgccgttgccactgccgcgagcttcgtctcgctcagcggcggcatggtttacagttggtccttggtgacgctgggttacctcgccccattggtgctggttgcgttggccttgaccagctggcatgcggtggatcgccgccgctggctgccgttgctgctggttgcgccattggttgccttcaccatggacaacacggccgtcatcgcagcactcagtgtcattctgacgcttctgatgtgggcggccaaagagcggggtcgaggctggcgggcagtcgccgccgcactcgctgtcatcgtgggaagcgtggtggcctaccggcttgccagcagcctgtactttcatgccaacttgactacgagcgcgggcggtccttcgctggctcctgcgcttctcagccaaggatggcggaaactgctgaacatggtccttgggctagcggcgttgacggtgtccgatcgtgatggcctgctcacccgtctgttcacgaatccggacattccccatcgcgcgctcgctatctgcgtaattcttgcccatgtctggttctggtggcgcgcagcccttgatcgctggaaccagacccagttcctcgccgtagcgatgatgctcttctgctacggcgccgccgcaggaatcgtcgtcacccgcgtgccggtattcggcacggattacgtctaccagcagcgttatctgatgatgtaccagctgggtaccgtggccctggcccttatggcagcaggcagtcgctggcccacgtggcaacgcgcccagcaccggttggtcagcatcggcctggctgcgctaatcctgctccagttgccgctctcatgggcgacctggcatggtgccaaatatgtgcaggcctacggtaacaatgtgggtcgacagatcatcttgctcggccgtgatccaagcgtacacctagcgaactgctcgccggtcctggtcatctgccaagcggatcgcagggagcagatccgctcgattgaactgctccgaaagtatcggttgaatgcgtactcgcccgccatgctgaagcgttactcgatggaagcgctgcaacgcgatccaggacccgccgagattgtcgccggaccctga

SEQ ID NO: 501989 - DNA, 396 bp, Stenotrophomonas maltophilia
atgcagcaggccgagcagatcacgcagcggcgcctggccatctgggatcagtaccatgcgtgggcgcaccagcacgagcaggctggccggctgcggcgcccggtgattcccccgcactgcacgcacaacgctcacatgtactacatgctgctgcccagcctggaggcacgtacccatttcatcgcgaccctgcgcgagcaaggtgtgcaggcggtgttccactacatcccgctgcactcatctccggcaggccaagcgatcgggcgtaccggatcttcgatggcggtcaccgacgacatctccgatcgcctggtccggatgccgctctggcttggcgtggaggaccatcttcccgcgatcttcgctgcagcggaccaggcactggcgggacgatga

SEQ ID NO: 501990 - DNA, 696 bp, Stenotrophomonas maltophilia
atgatccgcttcaatcgtccgttcatgaccggcacggaactctcctccatcgcgcaagcacatcagaatggtcatctctccggtgacggtccgttcaccaaggagtgccacgcctggttgcgcgaaaagaccaacgcgaaagccgcactgctgacccattcatgcaccgctgcgctggagatggctgcactgttgctcagactggaacccggcgatgaagtcatcatgccgtccttcaccttcgtatcgacagcgagcgcgttcgctctgcgcggggccgttcctgtgttcgtggatgtgcgtgaagatacactcaacatcgacgaatcattgattgagcaggccatcaccgagaagacgaaggccatctgcgtcgtgcattacgccggcgtctcgtgcgagatggacgagatcatggcgactgcgcggcgccacggccttcgagtggtggaagatgcagcgcagggcatcatgtccagttatagggggcgcccgctgggtagcatcggcgacctgggcgccttcagcttccacgagacaaagaacatcatctccggtgaaggcggcgcactgctctgccgcgacgacgagttcggcgaagcggccgagatcatccgcgaaaaagggaccaaccgcagtcgcttcttccgcggccaggtggacaagtacacctgggtggatgtcggctcgtcataa

SEQ ID NO: 501991 - DNA, 375 bp, Stenotrophomonas maltophilia
atgaacaatccttttgcttggtcaatggtggcgatgaccatcgtactgaccagctacggccagctggtcatcaaatggcaggccaatcttttcaggccggcaaccgagggactgctctcgcgccttcccggtgtactgcagctgcttcttcagccgtggatcatatcggcattcgttgccgcgttcgcagcatcgctttgctggatgctggccgtctcccgcctggagttgagcaaagcctacccgttcatggcgctcaattttcttcttgtgtgcatcgctgcagttccgctgttcggcgagtcgttcaccgttgccaagggtgtcggcctggcgaccgtggtgctcggcctcatcattctcagccagggctga

SEQ ID NO: 501992 - DNA, 759 bp, Stenotrophomonas maltophilia
atgcgtccctcaaagcatctgcaagcggcaccgctggactcacgtcgtttcggaatccaagtgttgcgtggcacggtcgacgccgaagtgaatccggccgaggtcatcgccgaactggagcacagcgcggctgatcttctgatcctgcgggtgccggctggtgcgaccgccctgcccacgcaattgcagctccaagggcacattgccatccatgcagacaccttggtttactacgccatggacctgtcgccggcgaccgcgccgccgatcgagcccaaggtggagcgggctgacgaccgccaccgggaggcgattgcggcaattgccgagcatggtttttccgattaccgcgcacactacgccgccaatccgttgctccccaaggaccaggtactcaccgggtatgtggagtgggcgctcagccgcctgcgcgaggacaccgagcgctcggcaacctgggtggtcagcgatgaagggaccgtcgccggctttgccacctgcgatgtaagcgaggattcggtggagatcatcctcaacgccgtacacccggatttcgaacgacgcggactgtacggaatgctgctgcgacagatccaacaccactacgcgcaccagggcatgaagcaactgctgatctctacccagatctggaatttcacggtgcaacggcagtggacacgcaatgggctgcgcttgtccaaagcgtatgatacctatcatatcgaccgcagactgcgagccggagcaccaagccgatga

SEQ ID NO: 501993 - DNA, 957 bp, Stenotrophomonas maltophilia
atggtagatggcatcaacgaacgcgcggcacagacgaccgaagtttcagtcgtgatcccggtttacggctgtcgaaactgcctggaggaactcgtcgaacgcattggcgtagccctgcggcccgtgtgcgaggcatacgagattattctggtagatgacaacagccctgatcagtcatggccgcggatcagggagctttcagaacggcatcccgccgtcaggggactgcggctctcgcgcaatttcggccagcacgcggccatcagcgcagggctgcagtacgccatcggtgaacgggtggtggtgatggactgcgatcttcaggatgttcctgaagagattcccaacctgcttgccgcccttgagggcgacgttgaggtggtgctcgggcagcgcgttgatcgccaggacacctggttcaagcgcacagggtcgatgctgttctacaggacgctggggtggctgacagacacgcgttatgaccacaccaccgccaacttcggcgcatacagccgcaaggtgatcgacgcgctcaacgacatgccggagacagacagattcctgccacttctcgtgcgctggaccggattcaacaccaccaaggtggcggtgtcccatggaatgagaaccgaaggcaagagcagctacagcttcggcaagctccttcagatggccagcaggatcgcgctgtctttctctgacaaaccactgagactggtcatgagcgccgccctgattattgcagcggtggcggccggctttgccatcttcagcgtttatcgttacagcgctggcgacgtccgcgttgccgggttcaccagcatcatcgcctccatctggcttgtcggcagcatcatcatgggctgcatcggcgtgctcggtctttaccttgggcgcgtgcatggcgaaaccaagcgccgcccccgctacctggtctggcaggatacaaggaagtaa

SEQ ID NO: 501994 - DNA, 3174 bp, Stenotrophomonas maltophilia
atgatgctggcaccacgtcgcacgcccgcagcaccccgccgcgccctttccacgcacctgctggtcctggcgatcggcctggccatgggcggcccgatgacggcggccgcggccacggtcaccgtgcgcgacccgaacctgctcgatggccgctggtacgcaccgggcgcatggagcaatggcgatccgaacctgaccgttgaaaaccatgcctacatcgacagcatgacaccggttgtcgtcgacggcatccgcgccgactcttggcgcgtggacatcggccacgccggcagcggcgagctgtccatccagaatggcggcgtgctggaaagcaccgccatcttcatcgccacgctgcccggctcgaccggcaaggtcacggtgaccggcgccggttcgcggtggatcggcaacaacagcatcggtgtcggccatgaaggcaggggctacctggacgtgctcgatggcggccaggtgatcaatgcccagggcacgtgggttgcctcggaactgggcagcagcggcgtcctgaccgtgtccgacaaggattcgcgcttcgccaccaaccagatccatgtgggtgcgcaaggcaccggcaccgtgaacgtgcgtgccggtggcaccttcgagaccggtgtcgcgcgcctgggcagctacagcagcgtggcccgtggcgaagccacggtgacaggcaagggtgccagctggttgaacaccagcgacctgctgatcggcgtgtccggcactggcaggatgaccgtggccgacggcgccacgctgaccgtgcagggcagcacgcagctgggccagcaacggcacaccgcaggcgtgcccgatggcgtgctggtactgaccggcgcgggcaccaccgccacggccggcttcatcgccgtgggccagaacgcggtggccgaactggatgtccttgacggcgccgccctgaccgcgggcgacgtgggcgtgggtgagaatgcgctgggcgatggcactttccgcgtggccggcgccggcagctcggccagcgtgggccgcctgaccatcggcaatctgggcaccggcagcgtgtccatccatgacggtggcgctctgacggtcaatgacgtgctgggcctgggcggcgccaacggcagccggggttcactggccatcggcgcgcagggcacgctgaccctggccggtggccagatctaccagggcgcaggcaccgccaacgtgctcatcgccaatggcacgctgcacctgacccgcaaggccttcaccaccgctgttgaaatggcgctggatggcaccgctacgctggataccgaccaggtcgatgcgatgttcagcggccgcctgaccggtaccggcgcactgcgcaagaccggcagcggtacattgaccacgtatgccaacaacacctacggcggcggcacccgcatcgagcagggcaccctggtgctggccggcaatggcgcgatccgtggcgcggtggatgtggcgtcgggtgcgacactgcagttgcagcgcaatggccagaccctgttcgccaacgtgctgtccggcgccggcgatgtggtcaagctggatgcgggcctgctgagcctgtcgggcgacagcagcggcttcaccggcaccacccgcgtgcgcgccggcgccttggacgtgcgtggccgcctcggcggcctgaccgagctggccaccggcaccgaactgagcggcgacggccagctgggcagtgtgatcctccgtagcggcgccacgctggcaccgggggcggccacgacctacggcacgctgtcgatgaccggcaacctgctgctggaaaatggctcgcgctatctggtggaccttggcgccgatggcgccggcgaccgcgtgcaggtgggcggcggcgctaccctgcagggcggcaatacggtggccatcgccagcgagggtgactggcagccgcgtacccgctacaccatcctgagcgcggcgcagggcgtgcagggcaccttctccggcgtaagcagcacgctggccttcctgacacccacgctggactacgacgccagcaacgtctacctgaccctggcccgcaacgatatcgccatgccggatatcgaactggccttccccgatgtggtggtaaatcccaaccagaaggccgtggccggcgcggtggaagcgctgggcaatggcaacgccgtgtatgacgcggtggtgcgcctggcggtggccgacgtcgtgccggccttcgacagcctgtccggtgaaatccatgccgcgcatcgtggcgcgctgctgcagaaccgattcctgcacgagggtatcgaccgccacctggacggtgccacgatggctgcagagatcgccccgggcgtgcacgcgtgggtcggcggcagcggtggccagcgccgtaccgatgccagtgccgacaacgctggcctgcgttcatcgcaacatggcgtgatggctggcgccggctggcgcctgggtgaaacgctggaagtgggcgtggccgcgggttcgcagcacctggtcagccgcctggcccgccgcgaagggcgcgccgaaaccgacagcaccgagtacggcgtgtacggccagtaccgctggcagggcctgagcctgcgtgcaggtgtcagccgtgccgattaccgcaccgacagcacccgcaccgcacaggttggcacccgcctggatgaacacctgtcggcccgcgaggatgccaccggcaccaccgcgttcctgcgtgccggttggaccttcggcggcccgcgcctgcagctgacaccggaactcgaagtggcgcaggtacgcgtggaaagcgacggtagccaggagcgcggtggtcacagcgcgctgcagtggaacggtggcagcgcacgctaccgcaccggcctggccgcgttgcgcgcggactgggatatcagcgctggccagcgtgaccgtgcggcgctgaccgcgcgcgtgggatggcaggtggctggcggtgatcgcctgccgcaggtcgatgcgcgcttcgtcgaaggtacccagggctttgcgatcagcggtgcaccgctggcccgccacagcgccctggcccagttcggtgtggcagtgagcccgaccgaccgcagccgcgtggcgctgcaggtgcagacccgccgcggtgatggccagcgcgatgtcggcgcgcagctggactggtcagtcgcgttctga

SEQ ID NO: 501995 - DNA, 984 bp, Stenotrophomonas maltophilia
atgcacggcgcacatctcaatccacgaacgctcccccttgcgctggcactgttggctgctgcgtcgggtgcctccgctgcgtgtcgccccatcagtggcgatgtgttcatcgatcgcgtgttcgatgttgccttcgtcgatgcgcccgatcagctccttggccaggccagcggccgcctggccctggtctgcgaccccgccgacagaagggcgcagctgcagccactgttcaacggcctgcgctacgcgcgcgacatcacgaatccagatggtggcctcgatcccgcgtatgagatcaacgcgacttcgcccctgatcgtgctctctttcacctatggcgcctgcgacgaacacgatgcggagtgcccgcttgaagaggtcgaaggtggcagtacgccgttccgcgatggtgttccccaggccgtcgacatgcacttgggtgatcgcaaggaggtggtcgtccatctcaccatctactcacgcggggggccgatgcgtgatgtcgcagcgatgcctgtcggtacggtctctaccactttcagtggcagcggcggcaagcaccacatcagcgcgggcttccgcttccacgcgcagacctgcgcggtaacgccccaggccataacgctggatccgatcgatgccagcacgctcgatcagcagcagagcgcaggcgaaaaggccttcaacgttgccatcaactgtggcgccagcggtcgtccgctggtgctggagatgcgcgacgtgcacgatgctgccaacaccggcgacatcctggcccctgcgccggaaagcacgacggccggcgttgcactgcaggtgttgcaggctggagcacccgtgcgcatgcagcagccgtggagctatggcaccaccacgggcacggtcatgtcggttccgttcagtgcccgctaccagcgcacgcctgcagaactgcgcaccgggaccatccgcagcgaagtatcgctgcttgccgactactactga

SEQ ID NO: 501996 - DNA, 2514 bp, Stenotrophomonas maltophilia
atgaccacccttcgatccttcacgcgcgcacgcgagcgctgccgcctgccgcgtgccattgcagcggcgctgtccctctcggttcctggcgccgctgttgccgcgcccgccatcgagttcagcgaaggtttcctggtgggtgggcaggccatcgatatgcgccgctatgcgcagggcaatccggtcgaggccggtctgcaccgggtcgatgtctggatcaacggccagtttgagcagacccgggatatccgcttcgtggtcccggacggacacgccagcgcacgcccctgcctgccggatggcctgctggacgcattgcagctgcgtgcggaacggctgcaggtggtccgcgcagacgccgtcgataccggctgtatcgatctgccgacggttgtgccgggcgccacggccaccttcgacgacagcagcctgcagttgttgctgaccgtgccgcaggcgatgcaggaacgcgctgcccgcggccacgtgatggccgagcagcgcgatcccggcattgccgccggtttcgtcaattacaccgccaaccactaccgcagcgacacccgcgacagcagctacgtaggcctgaacggggggttcaacctgggccactggcgcgcgcgccatcgcggtgcgttcagccacggcacgcagggaacccgctatcgaacgatcagcagccacctgcaacgcgatctgccggccatcatcagccagttgctgctgggtgagggccataccggcggcgaactgttcgacagcgtggccttcaccggggcccgcctgtataccgacgagcgcatgctgcccgactcgttgcgtggctacgcaccggccgtgcgcggcatcgccgaaggcaacgccctggtcagcatccagcagaacggcatcgtcatccatgaagtcagcgtagcgcccgggccgttcgtcatcgacgatctgtacccgaccaactatggcggcgacctggaggtcgtcgttaccgaagccgacgggcgcagccagcgcttcaacgtgagcttctccgcggtgccgcaggccctgcgcgaaggcagctcccgattcagtgccagtgccggcgcgctgcgggacgttggcaacgacgtcaccgcgctgcgcttcgccgagggtacgtatgcgcgcggtctcagcaatcacctcacggcattgggcggcatccaggtcgcacagggctatcgggcggtcatcgccggtgctgcagtcaactcgcgatggggcgccattggcgccgatgtcacccactcgcaggcgcagctgcacggacgccctgcagtcgccggcagcagcctgcgcctgaactaccagcgctacgtctcgcgcacggggaccaacgtcggtcttgccgcctatcgctacagcacgcaggggttcctcaccctgaacgatgtagcgcgcgcggcggccgacgactggggctacgccgggcgtgcgcggcagcgctaccaggccaacctgtcccagcgcctgggcacggccggccagctgttcctcaacggcgggcacgtagcgtactgggacactgcacagcggcagaccgacttccagttcggcttcaacggcacagtcggcctggccaactatggtgtttccgtgcagcgctatcggctgggaagtggccggcccgacacacgctatgcattcaccctcagcatgccgctgggacgcaccggaaacgccccgcgggtgagcacccggatcagtcacgccagtggcggtcagcaggtgcaggcaggcgtgagtgggtacctcggcgagcggcgcgcgctgaactattcggtgtccagcgtgcagggccgcagtggaaccagcagcagcgcctatctggactaccagggccgctacgccaacgtcaacgcggcctacagccgggcgagcggccacagcagccagacactcagtgcctccggtacgctggtggcgcacgccggcggcctgaacatggggccaccggcaggcgacggtttcgtgctggtgcatgcgccgagcgcagagggcgcgcaggtgggcacgggtgtggatatccgcgtggcacgcaatggctacgcgttgttgccgcacgtcagcccctatcgctggaatcgcatcgatctggacccttcggggctgccgctggaggtggaactgctgcagacctcgcagcgtgttgcgcccaccgccggcggcatcgtgcgcgtgccgttcgaggtgcgccgcgagcacaccttgttcatcgatgccaccgatgcactgggccagcccttgccgtttgcggcgcgcgtgcagcgcgaggacggcacgcccgccggcgcggtggggcagggcggcgtcatccagttgcgtggcgcaccgcccgaaggcgcgctgatcgtcgatccggacggcccgcagcgctgccgcctggtctatcaactacccgacgcgcccgatgcctacggcctgtcctggtcgcagggcatctgccagcccttggcgacctcaccccaatcggcaacggccgacctccccgtctactga

SEQ ID NO: 501997 - DNA, 504 bp, Stenotrophomonas maltophilia
atgaaacgcctgctgctaccctctttcacccttctggcactggtcgtgccgctcggcagcgctgcggcggccacgctcaccatttccggtcgcgtattgcccggcacctgtacgctgacggcaccggccatcaccctggacaacgtgaaggccgacgagctgaaggtgggtgacaacctgctcaagcagggcacgttgaacttcactggctgcatcggtgttgccaaagccacgctgtccttcgacggcatcgcggccgatggtgatgcgcagcgctggaagaacacggccagcaccgatccggcacgaggcgtttcggtcgccttgttggccggggcctcgggcaacgtctacctgaagaagggcgataccggtattgaagtacccgtgaccggcgccacggtcagctatacgctgcgcgcgggctattacctgcccacgaccagcggcgtcaacgcgggtgccgtggagacgaccattaccgtgactgcactctacgattga

SEQ ID NO: 501998 - DNA, 1047 bp, Stenotrophomonas maltophilia
atgccggcttcctcctcgacggtaagcttctggctgctcaatgcgttggtatgggcgctttatggcgccgcgggacttggcttgcggcatgcctacctcgccgacgccggaagtgcgggtgcattgatcacggtcggcctggcgctgaccctgttcgcgtgcagcggcggcatccgcgccctggccctgcgcgccggctggtggtcgcgcgggaccgccgggctgctgctgcgactggcgctgtcggtgggcgcaggcgctgcgttggcacaattgctggtgaacatcgcgttgcacgcagcgctggcctggggatgggtggacatcggtcgccaggtggccgacttcagccccaaggcgctgctgctctactggtacaccacggcggtgatgctggcactgtggaccgcgctctgggcaagcctgcacagccttcgccgcgtacgcggcgccgaactggcacgcctgcgcgccgaagccgaacgcagtgcgctggaacgtgacgcgctgcgtgcgcggctcaatccgcacttcatgttcaatgcgctgaacaacctgcgcgcgctgatcctggaagatcccgagcgtgcgcgcgacatggtcacgcggctgtcgcgcacgctgcgccaggcgctggcgcacaaccgcagcgagcaggtgacgttggccgaggaactggcggtggtcgacgattacctggccatcgaggcggtccatttcgaacagcgcctgcaggtgcggcagcagatcgatgccgatgccacgcaggcgcagctgccggcgatggcgttgcagttgctggtggagaacgcgatcaagcacggtatcgccagccgccccggcggcggcgaggtacagatccgcgccacgctggacaatgacgtgctgcggttgcaggtggagaatccacgtgcaaccggcagcgaacccgcccatggccatggcgtcggcctggcctacctgcgtgcgcagctgggcacgcgtggccgattcgtgctgcagccggtcggcgaccgcatgcaggccctgctggagattccacaatga

SEQ ID NO: 501999 - DNA, 369 bp, Stenotrophomonas maltophilia
gtggaactgcaagacttcaccgccgccatcgagcgcatcgtggccggcctggaaaggaagaaccgtgtgctcaatccgaaggagcgggaaaccgtggcctatcacgagatggggcatgcgctggtggcgctggcgctgcccggcaccgatccggtacacaagatttcaatcgttccgcgtggcatcggtgcactcggctacaccctgcagcggcccaccgaagaccgatttctgatgacacgtgccgacatggagcacaagatcgccgtgctcctgggagggcgcgcggctgagagctcgtgtttggcgagctgtccacaggggcttcagacgatctcgcgcgggccaccgacatcgcccgcgacatga

SEQ ID NO: 502000 - DNA, 297 bp, Stenotrophomonas maltophilia
atgattacgcgcttcggcatggatgagggcttggggtacgttgcttttgaggcacagaggccgcgttttcttgatgcgcctgaactggtacagggtggctgccgggtagccgaatcgactcagacacgcatcgaccacgccatccgtgacatcgtgatgggtgtgttcgagcgcgcctaccgaattcttgaaattaaccgagaagtgctggagcggtgcgcgcgcgaactgctggcgcgggaaaccctggacgagaacgacatccttcaattgactcaaggacttgttcggaactga

SEQ ID NO: 502001 - DNA, 1929 bp, Stenotrophomonas maltophilia
atgctttcagacctccaggttcgacaggccaaggtgaccggcaaggcgtattcgcttgtcgatttcgacggtctctacttctacatctccgccaccggcttcaaggcctggcacttccgcttcacttggggcggcaagcgcgagcgcatgtccttcggtggctatcccgcgctttccctgaaagacgctcgcaatctgcgcgacgaggcccgggccatgctggccaagggcatcaacccgcattcggagcgcaagcgcaagcgccacgccatcgtcctggcgggcgagcacaccttccaggccatctacgacaaatggctggcccaccgcagcctctctctggaaaatgagggccgccaaagtacgcccaagcagatcgggcgcgtcttcgccaaggacgtgtttcccgtattgcgccacctgaccatctacgacgtcacccgcgcccacctgctggacatcatcggcagagtggaaaagcgtggctcgctgtcggtggccgagaagctgcgcacctggttcagccagctattcacctacgcctcggtggtggtgcccaacatgggcgacaacccggccaaggatttggacgtggtggcgatgccgctgcccccggtggagaacaatccctttttgcgcatgcccgagctgccggcaatgctgcagacgttgcgcaagtacagcggtcgcctgaatacgcaactgggtctacgtctgctgctgctcacgggcgtgcgcaccggtgaattgcgctacgccacgcccgatcagtttgatctggagcgcggtctgtggatcatcccggttgtcaggctcaagcaacgcaagcagctcaccaagaagaagcgccagcgtttcgccgacatcccgccatacatcgtgccactgtcgttgcaggcacaagaggtcgttcgtcatttgctgggaaatctgaagccagcacaggtgtatctcatccccggtgattggtgcctgaaaaaccctctgagcgagaacacgctcaatggcgcgctcaagcgtatgggctatgaagaccaactcactgggcatggcgttcgcgccaccatctcgactgcgctcaatgaattggggtatccgcccaagtgggtagacgcccaactttcgcatgccgatccggatcggatcagcgcgacctacaaccacgccgagtacgtcgagcaacgccgcgtcatgatgcaggactgggccgaccggctggacttgttcgagcagaatcaggtcgaagttgccagcacgcacttgaccatcacgttgcagggcctgcccacaatcgccggacaggcggcagcgcagccgcccgccctgaatccaaacgcccctcagttgatcgttgcgcctgcacccgatgcaccagcggttccagcttccgtctatcgactttcggcggtgcatctgcccgagtacgcgcgacccacgctgtcagaggtgcagcgcgagcgcttgcaattgctggagatattcgaggcatcccacaacctgtcggtggccgattacgccaagctggttggcaagtcccgccgctggatcacttacgagattcaggccggcaatctcctgtcgatccatctgggtcaccgtgggcagcgcgtcccggactggcaactcgaccccatcaagcgcaagctgattcaggctgtcctgaagctggtgccgcgcggtatcgacacctggcacatctatcacgcactgctgcggccatacgatgccctgggcaagtgtccagtcatcgaggccgtcgatccgaccaacctgcatcttgcagctcgactggtcgccgcacataccatagaaaccgatgagcttgcagagcaatcggaggcgtctccggtgctggccaggcagactgtagagcgcctggtaaaaacggcaatgttggttgatatgcccgaagatcccgtcgcccgttga

SEQ ID NO: 502002 - DNA, 756 bp, Stenotrophomonas maltophilia
atgcacgagaacaaaaatgatgcaccaacatcaaaggtgttctaccgcccgctcgaagcgtccatccgctgggccggactgctgcgatacgagcaggtgatcctggcttcggtctcgtcgcctatggatctgccgcagtcgctggactgcccgcgtttgggcgaactgcggctgtacaccgaccgcatctatgacggcatcctcaacggggaactgcccttcgggcagcatggcatcacgacacgcgacaccgcgttgatcgaatcgcctgatctgacggtacgtcatgtcgatctgaagtgctggatgcgccagcactaccccgagcagcggcccggctttctcttctcccgcagcgagcgcatcatccatcccttcatctctctggaaacagggcaagccatgctggtcgaacgccagggtttgaaatccgccctggaacagaccaaacgtcagcttcgcgagttgcaggacaagcatgacgcgctgctcaagcagtccacggtgatttcggcatgcgcgcagtgtccgatcagtgatcgggccgaggccacctacctgaacatcgttggcggcctgttagagctgatgctcggccagtcgccatcgggcacgccgtactccagcttcaagacgcaggaggccgtggtcagcgcgctggtcgcccatcacagcggcgccatgggtatcgcggagcggacattgaacggcaagttcgccaccgccaggcgccggttgcgtagcgcctcccgctga

SEQ ID NO: 502003 - DNA, 213 bp, Stenotrophomonas maltophilia
atgtcgcaaacacctgtactgccgccaaacgagcgccgcatcctgcgcctggaagaagtcgaagcgaaatccggtttcaagcgcgcccacatctacaacctgatgaagaaacgccagttcccgcaggcgctgcgtctgggcgtgcgcgccgtgggctgggactccatcgaaatcgatcagtggatcgacgagcgcgtcaacaacagggcctga

SEQ ID NO: 502004 - DNA, 876 bp, Stenotrophomonas maltophilia
atgcaggtcgtatccatcatttcaaccaaaggcggggtcggcaagaccaccacggccgcaaacctgggcggtctcgctgcggacgccgggctgcgcgtgctgttgctcgatcttgatgtgcagcccaccttgtcctcctactacgagctggcccatcgtgcgccgggcggtatctatgaattgctggccttcaacgagcgtgaccttggccagcttgtgtcccgcacgatcatcgcgggcctggacttggtgctctccaacgaccaccgaggcgaactgaacactttgctgctgcacgcgccagacgggcgactgcggctgcggcacctgctgccgatactgaaccccctctacgacctggtgctgatcgacacccagggcgcgcgctcggtgctgctggagatggcggtgctggcctccgacctcgcgctgtcgccagtgaccccggaaatcctcgccgcccgcgaactgcggcgcggcaccatgcagttgctggcggacattgcgccgtaccggcagctgggtatcgagccgccgccgctgcacctgctcatcaaccgcgtccatccggtgtccgccaacgcccgtctgatccagcaggcgctgcgcgatctgttccagggccacaccggcattcgggttctggccaccgacgtgccggccattgaggcttatccgcgtgccgcgacgcgcggtctgccggtgcatcgggtcgagtaccgccagccagtgggcagagtcgctcccgccgcgctcgccaccatgcgcgatcttgccggcgaattgctcccgcagtggcaggatcgatttgccgcagtgtccggccgtccgccacagcctcttgataccaggaggccccatggccaacgcacatga

SEQ ID NO: 502005 - DNA, 249 bp, Stenotrophomonas maltophilia
atggccaacgcacatgaactggcccgaggccacagccggctgcgcgccctgatcgagttcgccgtcggcgaaggctggcacgtcaagcgcacggcgggcggtcacctcaagttcaccaaggcaggctgcgccgcgatctacaccagttcgacggccagcgatcaccgggcagccctcaacgcccgtgcgcagatccgtcgtgccgagcgcgagacccgatcccaagcgcagggaggcggccatgactga

SEQ ID NO: 502006 - DNA, 1593 bp, Stenotrophomonas maltophilia
atgactgagatcacctcccagcagatggccggcaaactgcttgcgtccgggttcgagcgcagcggcccgtcagcaacgaccttgagcgacccgatcgccgacacgcccatggtcgtgacgctcgaccagttgcacccctacgaccacgacccgcgcaagaagcgcaatccggtgtacgaggaaatcaaggcatccatccgcgagcgtggcctggacgcggctccggccatcacccggcggcccggcgacgatcactacatcatccgcaatggcggcaacacgcgactggcaatcctgcgcgaactctggtcggagaccaaggacgaacgcttttttcgggtctcatgcctgttccgcccgtggcccgagcgtggtgagatcgtcgcgctcaccgggcatcttgcggaaaacgaactgcgcggtggcctcaccttcatcgagcgcgctttgggcgtcgagaaagcgcgcgagttctacgaactggaaatccgctccaccctgagccagtccgagctggctcgccgcctggccgccgacggataccccgtgcagcagtcgcacatcagccggatggccgacgccgtacgctacctgctgcccgcaatcccgaccgtgctctacgccggcctggggcgtcaccaggtcgagcggttgtcggtcatgcgcaaggcctgcgagcgcacctgggagcattacgccaaaggccgctcactggttcaggacttcgacgagttctttcaggaagtgctgtcgcaattcgatgtccaggccgacgagttctctacgcagcgcgtacaggacgagctgatcggccagatggccgaattgctggacgtcgattacgacgtgctcgctctggacatgaccgaatccgagagccgccagcgtgccttggtcagcgagccgacgccgccctcgacaccgcctgccttgccagagccagaggccatcgcgcgcccacctgtcgataccgcgccacccgccgcgaagcctgcggcaacgccatcaacgggcaaaagcgacacggatggcagcctgcttcaagagcacatcgtctccccggcgccgacaaccgaacggcttgagtccatccagcgcatggtcgccgaccagttgggcgatgcactgccgcgcgacttctcggcgaacgtcttgcagtccatcccggtgcaggctggcgggctctatccgatctcggatgtctggtacatcgcccccggcctggacacacccgagcacctgcgcatccacgtcgcgcagttcgcccgcgagattgcggtcgaggcagacctgggcgagtgcatcgatgaccgcccagacggtatcggcttcgcctgccgtgcccatacctcaagcctggcgccaaagggccgtgccgtccatacgctgttggcttgcctggccggtcagcagcccgccgacgtcggtctggacaacgggcaagtcgtcatcgacctgccggcgctgctgtacggccagggcgacgtaacccgaagattgagcgacaccgcgctggtcaagctgttccgcctgctgcgactggcccgccgcctgctcgatctcgaagccggcgctgcggactctggaacctaa

SEQ ID NO: 502007 - DNA, 561 bp, Stenotrophomonas maltophilia
atgtccacagcacacccactcaaccaggctgtcatcgcccaggccctctatgacctgcgcaatgggcaactgcgccgctgcaagctgatggggtttggcgaggcagagctggacgccctcaagcatcccgcgctgatcagcgtgctggccaacgccaacgtctcctggtgctcagtgacggtcaaccgcgaagtgctgcggcggctgctccagcaggcgcaggatgtggagaaggaaatcgccacagtcgatcgcatgctcaggctgggcgcgagcacggagatggtcagcaagttctatggcttgacgcatcaggaagtggctcttcgccgtgaaatccttggtctgcccaaacggaagggtcggcaccccgtgctggacgaggagcaggacacggagctgtggcggcaatggaaggccgtgaccaacagcaggaccgtcgatctcgaagacgaaacttccatcctcgatgccgccatggacttggccgaaggcatgtcgctgcctctgtcggtggtctgggcctcgatcaagagctgggtcgatcagggactggcttga

SEQ ID NO: 502008 - DNA, 1245 bp, Stenotrophomonas maltophilia
atggccgtggacgacaccgcaccacgagccctacgccaaggccccatcgcactcgcagagctgttcgatgctgcgctaaaagaccttgtgcccaagcccgcccccagcgcacctgcgtctacaccggcacagtcgcccacgcccacctccggcgatgctttcctgttcagtggcaaccggcacgagacggtgccacgcaagttgttcctcgaccgtcgcttgacgccgctggaacgaaacgcctggcaagtgttccggctgatgctcaacgacgatggcgtaaccgcatttcccacctacgagcagttgcggccctggctggcgtccatgccctgcgcaggccaggcctcgcatgaaaccgtggcacgggcgctgacactgatgcgcctgtctcgctggctgagcctggttcggcgacggcgtgaccccaaaaccggccgcatcctcggcaatctgtacgtgctgcacgacgaacccttgacaccgttcgaggccatgcagctcgacccggactacctgcaactcgtcagccaggcgctcggccattctgccaaggccgtgcagatcgtgggcctgcacacgctcaaggaaatcggtgaagacccattactggccggacgcaccctcccgtcacggttgcaggtgatggccgaacgtctcgccaagcaggacctcacggccagcgatagttatccacaggaagacgccattcacgactccgaagaaggggctccgagccttcttcggaatggcgaacgcccctctacggattccgaagcagggtcgaaacccgcgccagacgtctctcttcggaatccgaagcaggcccgtacagtacgtagtagttgtattaatgaaatacgtactactgcgcaggcgcgcgcgctgggcgatctgcaatggcccaagcgctttgcgcaactgaaggcggaacagcaggcgggtgccaaggtggcattgcagcaggttgatgcctcgctgaggcaggacgtgctggacgaatgggccgcgcgttgtagcaaccacggcatccgcaatcccgcagggtatctgttcggcatcatccagcgggccatccacggtgagttcaatgcctgggcaaagaaagacccgccaccggcacccactcaaccaaacgaacggccaccacccgcaccgccggcccaaacgcagggtaagccggtgccaccagaagtcgccaggcagcacatcgagcggcttcgagatctgctcgccagcaagtga

SEQ ID NO: 502009 - DNA, 801 bp, Stenotrophomonas maltophilia
atggcaaccaatgaacctctgcaactgaatctcggctccctgcgcagcgcgatgtcgctgacgcttcacacgcaccacgcctcgcgcatctggcatggccgtgccgccgccgaggggcgaccgggcatcgtcggcctgaacggctacatcgcccaaatgaacaagatgcggcgcggttcggagcaggacgacccgtactcggattggtggatgctgcgcatcgaggccaagctcgaccagaccaagaccacgctgcaatcgctgcgcgagcaggtggatcaggcactggcgagcgtgccgccggcactcagcctgggcgagaaccttaacgtgcagcccgtcaagttgccgctgttcgtcaatgcgcagctcggctttgccgccgtctatctgctggccgactacgacgacatcgcccgcaaactgatcctcgcccaccacacggcgctcatcgaccgcagcaccttggagcgctggcttaacgagggcgcccatgcactgcgcagcctgttttcgctggcccagcaataccgctattcgggctgcacgcgcgacgatttcgtgtcaaagaacgccgcagcacgggcggcgttggagaaattcggcgaactgccccaggacgtgctggaaggcacgcgccgctcgaagttcgcgccgcccatcgtgcgccgtggcctgcaacagcgtgctcagagtcctgctgcagcgcctgcccccaacgacgcggccaccaccgacgagcccgccactgacgcagcacccgaagtcagcgccggcgaggtcgaggacgagcaggcatga

SEQ ID NO: 502010 - DNA, 528 bp, Stenotrophomonas maltophilia
atgagcgatccgaaccgcgaaccccgctacttccagggcctgcaacaggcagccttcatgaagctggaacacgctgcctctctaaaaggccttttaaagccttttaagggtaagggggatcttgagacctgggccagtcagtgtttcgccatgcgcgacgagttgattgacatggcgcagcggcaggtgctgcaacaggcagtcgggcatcccttccacctactgcccgtggagttggcccagcagaccacgggcgcaggcacggcgtttttgcgctggcgcaagcacgaccgctcagccatgggcgtagccctgtggcaggaattgatggcgagcaccggcacgccggtcaacctgctggccgagctgcacgcgatcgagcttcaacgcatcacgctgaacatgcagatcagcctgttgcacaccttgggcaggcaggcccaggagtgcgccagcaaggccgccaaggcggaggacgcctacctgcgacggctcaagtccatcccacctggagtgcgtgatcggtga

SEQ ID NO: 502011 - DNA, 441 bp, Stenotrophomonas maltophilia
atgagcacgcatttttggggtgaaggcaacattggctcaccgcccgagtaccgggagttccccaacggcaacgacgagccgcggcgcttgctgcggctgaacgtgtacttcgacaaccccgttcccaccaaaggcggcgacttcgaggatcgcggcggtttctgggcaccggtggaaatctggcaccgtgacgtcgcacactggaaggatctgtaccagaaaggcatgcgcgtgctggtcgtcggacgcatggagcgcgaaccctggacggacaatgaggatcagccgcgcgaaacctggcagatcaacgcgcgcagcgtcggcatcctgccgtttcgcatcgagtccgtgaccctcagcccgaagccgcaggatgcggaggcaaagtcccaggccgcccaggaaccggctgcgccaaaagagccgcggcgtaggaagtga

SEQ ID NO: 502012 - DNA, 2013 bp, Stenotrophomonas maltophilia
atgcggctgttcttgtgcgagaagccctcccagggcaaggatattggccggattctcggcgcgacgcagcgcggtgaaggctgcctcagcggctccggcgtcacgattacctggtgcatcggccatctcgtagaagcggcagcacccgaagtctatgacgcggcgctcaagcgctggtcactggagcagttgcccatcattccccagcagtggcgggtcgaggtcaaacccaagaccgccacgcaattcaaggtcgtcaaggcgcttctggcgaaggcgacccatctcgtcatcgccaccgatgccgaccgcgagggcgagctgatcgcccgcgagatcatcgacctgtgcggctaccgtggtcccatcgagcgcttgtggctgtcggcgctcaacgatgcgtcgatccgcaccgcgctcggcaagctgcgaccgtcgtccgatacgctgccgatgtattactcggcgctggcgcgttcgcgggcagactggctcgtgggcatgaacctcagccgtcttttcacgctgctcgggcggcaggcgggctacgacggcgtgctgtcggtcggacgtgtccagaccccgaccctgaagctggtcgttgatcgcgaccgcgaaatcgcggctttcaagtcggcgccgttctgggccatcgacgtgtctctgtccacagagggtcaggctttctccgcgcagtgggttgcgcccgacggctgcaccgacgacgccggtcgttgcctgcaacagccggtcgcccagcaggcggcgctgcagattcgcgtcgcggacaacacccaggtggtgtcggtcgagaccgagcgcgtgcgcgaaggcccgccactgttgttcgacctgagcaccttgcaggaggtctgttccaagcagctcgggctggacgtgcaggagacattgcagatcgcccaggccctgtacgagacgcacaaggccacgacctacccgcgctcggactccggctatctgcccgaaagcatgttcgccgaggtgcccgccgtcctggacagcctgctcaagaccgatccgtcgctgcgcccgatcatgagccagctcgaccgctcccagcgttcgcgtgcatggaacgacggcaaggtcacggcgcaccacggcatcattccgacgctcgaacccgcgaacctctctcctctgagcgagaaggaactggcggtgtaccggctgatccgggcgcattacctggcgcagttcctcccgcaccacgagttcgaccgtaccgtggctgagttttcctgcggccagcagatgctggtggccaccggtaaacaggtggtcgtcaaaggctggcgtctggtgctggccgaaccgcaagcggatgaggacggcgacgacgcggcgcgcagccaggtgctgcccccgctgcgtgggggcctggcgtgccaggtggctgaggtcgagatcaaggcgctcaagacgatgccgcccaagccctacacccagggcgaactggtcaagtcgatgaagggcattgcgcgcttcgtgaccgacccgcgcctgaagcagaagctcaaagacacgacgggcatcggcaccgaggcgacgcgggccaacatcatcagcgtgctgatcgcccgtggctacatcgtgaagaaggggcgctccattcgcgcatcggatgcggcgttcacgctgatcgacgccgtgcccgcagcgattgcagaccccggcacgacggcagtgtgggagcaggcgctcgacatgatcgaggcgggacagctcaccctggacgtattcctcagcaagcaggccgcctggatttcgcagttgatcgcgcagtacggcagcatgtccctgtccatcaagcttccccatgggccagcatgtccgcagtgcggcgcagcgacgcgccagcgcaccggcaagagcggcccattctggtcgtgcagtcgctaccccgactgcaaaggcacgctgccggtcgaatccggtacgcccaagcgtggcgcttcgcgctcgcgtagcagcggccgcaaaggcgcctga

SEQ ID NO: 502013 - DNA, 246 bp, Stenotrophomonas maltophilia
atgcaacaaccggagaaagtacgagccgcgttcgagcgcgaccttggcaacaaggtgctgttcatcaagggcggcaaactgctgttcatcgatggcatcaatctcaaggccatcgccgaccgtaaggcgtatttcgcttcgctgcgtgcgcggcaggcgcaacccattgtggtcctggccgaactgggacaggacgaggcattcgccctgtggaagcagcatgtcctgggcgacacgaccgagtga

SEQ ID NO: 502014 - DNA, 213 bp, Stenotrophomonas maltophilia; identical to SEQ ID NO: 334573

SEQ ID NO: 502015 - DNA, 393 bp, Stenotrophomonas maltophilia
atgaatcaactgctgccgcaggaagtcgtcgatcagatcatgcgggaagagcagcatttcgctgccgcgccccaagccttcttcgaggcatggaagcgtggtgccgagatcgctggccccgaatggttcggcgacggcacccgtgacggcctgaaccaggccaaaagcaagtgggatctgcgtcccaacatgctgcggctcaacgatgccctcggtgtcctgagcagcgggcaacgcatgtttctgtccgccatggtcagcttctacaacgcgcacgagggcggtgccatgctcaaacgctgccatttccacgggctgtcggacttcgacggtctcgacttggaacgccgcaaggtcattgccgacttgatgctgaactacagcggctggtga

SEQ ID NO: 502016 - DNA, 738 bp, Stenotrophomonas maltophilia
atgtcccagaatcccaatccctttctccgtggctactggaatttgaagatcgtccgcacgctgtccatcagctacgaggacggaattccgcatgtctggcgaaacatccacccgagccaacaacatctttccgacgaggaattgatttcatcgtcctgcatcgtcaccagcgattttgcggtggtcacgaacggctctgaacctgtgagtgccgaagcactggccgaatgcgatgccgatgaaggcgttaacggcgaaggcgtgatcggtgccgtggtctatgccattcatggcgaggacttcgacggccgcctgatccacgtcggtgacagctattcggtcgaagccgcgcgggaagttgtgcagcgcctgagtttcgagaccggctactacagccgatgctgggagatcagcagcgcgcacatcagccaggaaaccggccagtacctcgccaacctggcggaccttgccacgccggaggcctttttgttcatcgcctttcgggttccgtacagcccggcgatcggcgtcaagctgatctccacgccctggacggacaagaacctggagcacgccgagggcatcaccgccgagcagcttcggcaggagcaccgcagcaagggcatgcccgccgacctggcgaacatcctggagctggctggccaggccgatgtgcgcatcctcatcctcgacgctgacgcgcccgtgttgctgggcctgccgctggccgagccctag

SEQ ID NO: 502017 - DNA, 159 bp, Stenotrophomonas maltophilia
atgctgcacatgcgccatatcgccagcgccgatctggcagacaccgacattgatgcctacgaaatggtcgtcttcgacggcggcaataccggcggcgactcgtggaagcacgtgttctttccacgtcagcgcgaacactacttcgtgtaccaagtctga

SEQ ID NO: 502018 - DNA, 915 bp, Stenotrophomonas maltophilia
atgagcaccacgtccaacgagaaatcgtatttcgacctccacacctcgggcatcggttacatccagcgtgcccgtgaagtgcctgttcggggcggccgccgtgcgcagcctttcctggcatgcaccatcgccgcgctggtcggttccgcaaaggatcccagctatcgctatttcgacgtcaaggtctcgggtgccgaggccaagaagctggtcgagcgctacatcggcgttgacgatcccaagcagcgcccactggtgcgctttcgcctcggcgacctgtggggcgatgcgtatatccgcgacaagggtgagcagaaaggccaagccgccgcgtccctcaaggcgcgactgctcaaggccgagccgcttgaccgggccgaactggcttcgatcaggcagcacgagctggtcacccgcggcatcggctacctcagccgtccgaaggacgtcacacccaaagatggcgacccgttcctctcttgcaccgtcgccgctctggccgggcctgtcgatgaaccggagtatcggtacttcgacagcatcgtcaccacccctgaagccgagcatctggttcgccggtgcgtgcaggccatcgaaggggactgcaaggtgctgatcgctttccgtctcaacgacatgaagatcgatccgtacatccgcaccaagggtgagcgcgctggggaaccggccgcaagcctggattcgacactgatccacatcggcctgatcaagatcgacggcaccaaggtctatccgacgagccccgcgcaagcagattcgccgccggcccaggacgctcccgcgcccgaagccgaggacgccgcccccgctgcagatcagcctgccgagcccgccgagtgcgagcccgaaggtgaagtcgaggagcaggagccggcattggctgcttcgttctga

SEQ ID NO: 502019 - DNA, 828 bp, Stenotrophomonas maltophilia
atgtctctggcatcccgttttgctccgcagtccccgatcctgcgctcagatcgcccgctctcggacgaccgcattcgcgccattgctccatcaatcttcgccgacgctccgcatgggagccgatccgagcggtatgcctacataccgacctcgaccgtgctcgccaagctgcgccaggagggtttcgagcccttcatggtgtgccagacgcgcgtgcgcaacgaggatcggcgcgagcacaccaagcatctcatccgacttcgccatgccagccagatcaacggcgacgaggcgaacgagatcatcctgctcaacagccacgacggcacgagcagttaccagatgctggcaggcatgttcagattcgtctgccacaacggcctggtctgcggcgataccaccgccgacatccgtgtcccgcacaagggggatgtggccagccaggtgatcgaaggcgcctacgaagtccttgaaggcttcgagcgcgtgaaggactcgcgcgatgcgatgcgcaccatcaccctcgatgagggcgaagcagaaatcttcgcgcactcagcgctggcactcaagtacgacgatcctgccaagccgacgcctgtcacggagcgtcaactgctcgcgcccaggcgctgggacgaccgaagggatgacctgtgggccgtcttcaaccgtgtccaagagaacctcgtcaaggggggcctgaatggacgctcggccaatggccgcaatcagcgcacccgcccggtgcaaggcatcgaccagaacctgcgcctgaaccgggcgttgtggctcctggccgaaggcatgcgccagctcaaggcgtga

SEQ ID NO: 502020 - DNA, 699 bp, Stenotrophomonas maltophilia
atgacagccaaatcggcacccgagcaatcggtttcgcccatcatcgtccccggccagctcacgctgcgtaccatccgcggcaagaacggccccttcacggtcggacgcctcgccacgcaccttggtacgttcgaggtcaaggacccggagctggagcaataccccgaaggcaagtacgacggggagttcatcatcaggtacatcttcccgaagtcctacccggtcggtggcggcatgcgcttcgagatccgcgccagcctggacggaatgacgctctacgacatcgacaaactgagccgtgacgaagcacgcagcttcgccacccaggacctcgatccacttgatgaagagctgggcgcacagcctgcaacaacaccggcaacaccggccaagcccagcaaaacctccaggcccgccaagcccgcacccgtacaggcatccacagacccgctggtcgataccacgcccttcggcgtggatgcgccgacgcccgctgcggcaactgctccctgcagtaccgaagatggcgacgccgcgctgttcagcttgctctggccgctgggcgagtccgtgaaactggattcgaccatcgaccgccgcaccctgcgcgcgcagatcgtccgcctgggcgaactgggctacgcgctggacttcaagacgcaggagtggagccgccaggccgaactgcaacctgcgtag

SEQ ID NO: 502021 - DNA, 408 bp, Stenotrophomonas maltophilia
atgggctggtatttctcaccccaatcgcggtctgaactgatcgcggagttgatcgcaccgcaagagaccgaacgcgccagcgtgaaggtcatcgcccacgcgctgcgtggcaacgtcctctggtctgttgtgcaagtgacggccaaggccgaaggcgtacaccgtgatctcgcaccgggccagtccctgtgcaccatccgctgcgatctgctggaacgcagcggcggccagtggggctataagccactggacgaatccatgcacccgtactactactcgtgcccgctgtcctatctgaacctcgcaccggagcaatccgccgactggcgtgcaggcgttcgcgcctaccacgcgcggcggcgcacatccaaggaagccacagctccagctacggcgctgacggtctga

SEQ ID NO: 502022 - DNA, 651 bp, Stenotrophomonas maltophilia
atgcccgcaaacacttcttccaccacgctgtaccgcatcgacgaatgcccggacgtgatggccgacgcttgcgtcggcgatgaccagggcaacctgatcttcctgtcgatctgggcacgggacaccgccgtccagcagttcctggctcgcctgaccctcgggcgcgacgagcagggcctggagcagttccacctcatcaccgaccagggcagcagcgtcccggtgttcgtcagcaacgtcgatcgcctggaaaagcgcatgacccgcgcctaccggcgaacgctgttcggttcgctgtccaacgtgtggctgttcgatcggcgctgcgtcaagcccgacaaggccaacgccagcgcactggcattgctgccccgcgatagcgaccaccggcttgaccgcctgtggacgttggtgcaggacacctgcccactgccgttgctcgaccactggcgcgaaaccgtgctggaactgctgcaaagccgcgagatgctgacccgtctgccattcgccctcgggcctttggtgggccatcggctcgccatcgacgtgccggcgctgaccctggcgctcggctcgctgatccgcagtgacgtgctcaccgcctatccctatccggccaagatttggacgccggaaacggtagcggcttga

SEQ ID NO: 502023 - DNA, 1122 bp, Stenotrophomonas maltophilia
atggcgctcatgttcccgcggctcgcccgcaatttcgtgaagaacgggtacttcccgaccgacgaaccaacgctcgaaagagccctcaatgcactgatgcccagtgcgcctgaatccaatgggccgatgtgcatcctcgatccctgcgccggcgaaggcgtggcgattgccgaagcggctcatgccctcgggcgcgagcatgccaaggcgttcgccgtcgagttcgacgcagagcgggcgcgccatgcccgcggcctggtcgatcactgcctgcacgcggacctgatggacacgatgatctccaaacagtcctttgggctgctctggctcaatccgccgtatggcgacctgtacaaggacgtcaacggcaacattggctatcagggtcagggccgtgcccgcctcgaaaaactgttctaccagcgcacgctgcccctgttgcagtacggcggcgtgctggtcttcatcgttcccggctacgtgctcgacgccgagctggtcggctggctgacacgccactacaccgatctgcggatctaccgagcggtggaaacgcagttcaagcaggtggtgatcttcggtcgccgggtgcgccagcgcgagcagacgcccgatggcgtcaaggccgtgcgcaatctgctgctgcaggttgggcttggcgaagtcgaagccgaggagctgccgagcgaatggccgttcctgccgtacatcgtccccaccagcccggcagagccggggcatttcttccgcgtgacgatggagccggagcagttcgccgatgaggttggcaggctgcaaggcctctggccgtcgcgggatacgcagttgggggccgcgcagcagacgctgcgtccaccggcgcgggccttgtcccactggcatctcgccctggctttggccgcaggcgcgatctcgggagtcgtgcaatccaaggcggggcgcgtgctcgtcgtcaaaggtgacacccacaaggacaagacgctccagcgggaattcaccgaacgcgacgacggctccatcgccgaaacccgcatcctcaccgacaagttcgttcctgtcatccgtgcatgggacatgacgcctggctccgccacgcggggcgaggtgttgaccattcgctga

SEQ ID NO: 502024 - DNA, 312 bp, Stenotrophomonas maltophilia
atggcagcccaagcactttccatcagccagaccccgagcctgcgcttctcgcccggccaggtggtcatgacctgcggcgtcgatgacctgatccaacagggccaattcaacccgattccgtatctgcgccgccacctcggtggcgactggggcgacctcgacgacagcgacaggcggcagaacgatgccgcgctgaagtccggtgaggatcgcctgttctcttcctaccaggtcacacccggcctgaagctctggatcatcaccgaatgggatcgcagcgtcaccacgctgctgttgcccagcgagtactga

SEQ ID NO: 502025 - DNA, 306 bp, Stenotrophomonas maltophilia
atgacatccaaccaacatgacaagcatcgccgcaaacggctgttcgagatcggtgcactggagttcagcgaaggcgtcgaacgcctgatgaacgaaggccggctcgatcccatgccgtttttcgaacgccacatgcgtggcgactggggcgacgtcgccgactaccaatggcaacagaacaacgctgcgttggagtctggtgaacgcctcgattcgttttacgtcgtcacccgtgacctgagcatccgcatcttcaccgaagcagatcgcagcgcgacccgcatcgtgctgccgtccgagtactga

SEQ ID NO: 502026 - DNA, 2280 bp, Stenotrophomonas maltophilia
atgtccgttgatctcaacaccaccgccaacgatgcagcgcccgtacagggcgaactgctcgaagcggaatccaaccctctgaccctgagccttcaggttttcgtcggcgagttcggcgacgaactgctcgattctctcaaccgcgccaacccgccggtctatgccggtcaagcacaggcgcagcggcaactcgtcgttgccagcctcaagcgcaagctgttccaggcccaggctgaagttgtccatgccgccgccgagctgctggtcgatcaaggcgagcgcgctgcgatcgtcaatggcgaaatgggctgcggcaagacgaccgtcggcatcgccacggccgccgtgctcaacgccgaaggctaccgccgcaccctggtgctttcgcctccccacctggtttacaagtggcggcgtgagatccaggagacggtggccggcgccaaggtctgggtgctcaatggcccggacacgctggtcaagctcatcaagctgcgcgagcagttgggtgtgcagcccacgggccaggagtttttcatcctggggcgcgtcaggatgcggatggggttccactggaaacctgtcttcacccagcggcgcacccgccacggcgacgtggcagcctgcccggactgcggcacactcatcaccgacctcgacggcgagccggtcaacccggtcgcgctcgaagccgaggagtcccgcaggaagtgcagccactgcgccgcgcccctgtggacgctgatccgcccgcgtagcctgtccggcagcgaccagtcctcggtcgtcctcaaagccttgaagcgcatcccgaccatcggggaagtcactgcacagaagctgatgcagaagttcggtgacggcttcctggcctcgatgctgggcgacaacatccatgagttcatcaacctcatggatggcaacggcgagctggtgttttccgaccttcaggccacgcgcatggaacgtgcgatggccaacatggagtttggctttggcgaaggcggctaccaaccgtccgagttcatcaaacgctacctaccgcaaggcacgttcgacctgctcatcgccgacgaggcgcacgagtacaagaacggtggcagtgcccagggccaggccatgggcgtgctggcggcgaaggctcgcaagaccttgctgctgaccggcacgctgatgggcggctacggcgatgatctgttctacctgctgttccgggcactgcccggacggatgatcgaagacggctaccgcccgaccacgagcggcagcatgacctcggctgcgatggcattcatgcgcgatcacggcgtcctcaaggacatctactccgagagcgccggcacggcgcacaagacagccaaaggcaccaaggtatcggtgcgcacggtcaaggctcccggcttcggcccgaaaggcgtcttgcgctgcatcctgccgtttacgattttcctcaagctcaaggacatcggtggcaacgtcctgccgccgtatgacgaggagtttcgtgaagtccagatggacgtggcgcaagctgcggcctaccgcgatctggcgggtcggctgaccgcagaactgaaacaggctctggcgcgacgcgatacgaccttgctgggggtggtgctcaacgtgctattggcctggccggattgctgcttccggtcggagaccgtggtgcatccgcgcacgcgcaacaccttggcgtttgtcccggctcagttcaatgagttcgagatcagccccaaggagcgcgagctgatcgacatctgcaaagcggagaaggaacaggggcgcaaggttctggcctacacggtctataccggaacgcgcgacaccacgtcacgcctgaaggggctgctggagcaggaaggattcaaggtggcggtactgcgcgcaagcgtggatgccagccgccgcgaggactggatcgccgagcaactggaccggggcatcgacgtgctcgtcaccaatcccgagctggtcaagacggggctggacctgctggagttcccgacgattgtgttcatgcaaagtggctacaacgtgtactcgctccaacaggcagcacgccgctcctggcgcattgggcagaaacagcccgtgcgcgtgatctacctcggctacgccggttcctcgcagatgacctgcctggaactgatggccaagaagatcatggtctcgcagtccacctcgggcgatgtgcccgaatcggggctggatgttctgaaccaggacggtgattccgtcgaggtcgcactggctcggcagttggtcgctacctaa

SEQ ID NO: 502027 - DNA, 1803 bp, Stenotrophomonas maltophilia; identical to SEQ ID NO: 334644

SEQ ID NO: 502028 - DNA, 1533 bp, Stenotrophomonas maltophilia
gtggcacgggtccttgagaaagccaaggaactcatcaccgcggatgatctgagacttctagatgtcaacacctatcacggcttcgcatggagcgttctgcgaagtcatggctatctgctcagcaacggaaagccgctccagctcctaccacctcccgagggctccgcgcgcttggctcactttgccaaggagcagcatcaccaggagaagttgcgccttttccatgaagaggggctgctccacttcgacctcttcgcccagttgacggctgaactgctgcgccgcagccggcggctggcaggtatctacacagcgacctacccgatactcgtcgtggacgagttccaggacacgaacgccgacgaatgggcgatggtccgcgagcttggacgcggctgcaggatcattgccttggccgaccccgaccagcgtatttacgaattccgcggcgccgatcctcagcggctcaaggaattcgtggaccagttcgaccccttgccagtcgagtttgaaggggagaatcatcgcagtgccggaaccgacatcgcaacgtacggttcagacttgctcaccgggaaaaacaagggcgccgtctatgccaatgtgtcggtggtcgagtacggcgtgtactacggaaggggtccgcatttccatgcgaaggcccagctcatccaggcaatcaagcgacttcgcaaggagccggcctggtccatcgcagtgctcgtcccatccaaggccttcatgcttcaagtgtccgactacctctccgcggagtccgatggcatgcccaaccttcgccacgaggtggcgatggacgcggaatccccggcgcttgcggcaaacgtcatcgccacgctaatggaaggaggcccttcggagcttctggctgcgcggctactctccgccttacatacccacatccggggccgcagtggcaccaaacgccctgggcaggcggaactcgacatggccgacgccatcgaccaatacttggtctccggaaagatccgcggcaagaatcgccaagcgttgatcagcgagtgcgcgcgcctagcagcgcttcgccaggacgtcgtattcaccggccatcctgaagaagactggttgactgcgcgggggcttctcgcgacgtctgccgttggccaactgtcgcgcgttgccgctgatgccaagtatctccgcctgcttcacaagggctcaaacctgcgggcgtctttgtcagagctttggagatcccaaggacagtatgtcggcgctatcgaagctgtccggggcgctttgctgcaggagcatttcacagcagccgccaaggaatggcgtggagttcatctcatgaccattcacaaagcaaagggtaaggagtttgacgaggtactgatttacgaagggcgatatgctggacgaattgtgcctgcgaatgcagatacttctcgtcaaagccaagcccttttggcactgcgggtcgcagtcacaagagctatgaagagagcaacaatcctgacgccatcgggagaccgcagcatttttttgtaa

SEQ ID NO: 502029 - DNA, 579 bp, Stenotrophomonas maltophilia
atgcccgcaatccctgtatcccggcgtctggtcggcgctggtctcctggccgcagcgctggccagcggctgcgcgaccaccaccgcgccgctggtgccagacgccatagaaggcgtctcctccgctcccgaacccgaggcacccgagttcattcccgtcgtgcgctatggccgctacacgctggtcgagctggcacccacggcggcgcagcgtgacttgctgttgcagaccatcgacgtgtccatgcccgaggatgcccgcgccacggtgggcgatgggctgcggcatgtgctcaaacgcagtggctaccagctttgcgagacgcccagcgccgtgaccgagttgtatgcgctgccgctgccggcggcgcaccggcatcttggccccatgaccttgcgcgatgcgctgctcaccctggccggcccggcctgggaactgcatgcggatgaacgggcacggcagatttgctttgagcagcctggaggcagtgcgaccgccgagcacgcacacgagccgcctgttgccgaggcggtgcagacgtttccgctgatgccttcggtttcgggaggccagccatga

SEQ ID NO: 502030 - DNA, 642 bp, Stenotrophomonas maltophilia; identical to SEQ ID NO: 334642

SEQ ID NO: 502031 - DNA, 738 bp, Stenotrophomonas maltophilia
atgaaaccgtcgatcatcctttccgcgctcctgctcgcgtctgcccagttgcccgcctgggcgcagcagccggccacggctcccgccggcagtgcgcacagccaggagcgcccgctggttactcgctccctggacgaccgagtggcaggcgactggggcctgcaaccgcaggagtgggctcgctatcgcgagctgatggacgggccgttgggcatctactcgcccaacctggacccactgtccgccctgggcatcgaggcgcgcaccgacgaggaacggcgccgctacgcagagctgcaggtgcaggtcgaggcgcgccgtatcgagaagctgctcgcctaccagcgtgcctacgaccaggcctggcagcgcctgagtcccggcatgcagcgggtgaacctgcctgacgaaaaacccggcgccggcacaagcgccaatcccttgcgcggttcaggccgcacggccgtgttcgtcaaggacggctgcgcggcctgcgggcaactcgtgcagcgcctgcaatcctccggcaccgagttcgacctgtacatggtcggcagccgccaagacgacacgcgcatccgcgactgggccaagcgtgcgaacgtcgatccggcgcgcgtgcgcagcggtggcatcacgctcaaccatgatggcgggcggtggctgtcgctgagcttgcccggagaccttcctgcggtcgtgcgcgaggtgaacggtcaatggcagcgccagccatag

SEQ ID NO: 502032 - DNA, 606 bp, Stenotrophomonas maltophilia
atggcagcgccagccatagcggccacctccgtttcgcagtgcttgcgcgcactggtgatcgcggcgggcctgtgcgcctgcgccgcccatgcccaggagcttccgccaccggcttaccagcttgccgcacagcgcgcgggcatcccctcgacggtgctctacgccgtggctttgcaggaaagcggcatccgccgcaacgggcgcatcgtcccgtggccgtggtccctcaacgtcgccggtcagtcgcgccgcttcaccacccgtgccgacgcctgcgctggtttgcagcaggcaatgcgcgccacgccgcacacacgcatcgacgcgggcctgggccagatcaacctcggctaccaccagcagcgctacgccagcccgtgcgacctgctcgacccatacagcaacctcgccatcgccgctgaaatcctgaaagagcagcacacctcgggcgaggactggttgccggcgatcggtcgctaccaccgtcctgcgggcggagaacctgcggctcgttaccggcgcagcgtgtcgcgccaccttgcccgtgtgcagggcacacacccaaccgccgcggccatcgccgtgcaccaggagagcaccccatga

SEQ ID NO: 502033 - DNA, 549 bp, Stenotrophomonas maltophilia
atgaaaacatgccatttgacccatctcacactgaagggcctgctcgtgctgctggcggctctgccactggcctcgcgcgccggagagcccctgatcgtcgtcgaagaccgtggcggcacgtcggcgctgccgtactacgaggctctgaaccttcagccgcgcgccaatgctccggccgggccgcccatcccgatgctcccggtgcccgccacgcccatggatgaggccgcgatgttgccggtgcgcagtgccaagctcacgcctggcaccgtcgcgcggcgcgtgatcgaggcaccgggcctgcggcctttcgtagtcgtcggcgacgacgaagcttcccacgcctggctgcttcgccaggcgggctcgctgcgcgagcgcggcgcggtgggcctggtggttaacgtcgagaccatgcagggcctggcacggctgcgcgccctggtgcccggcgtgccccttgcgcctgtggccggtgacgacctggccgagcgcctgggtctgcggcattacccggtgctgatcacagccaccggcatcgagcaatga

SEQ ID NO: 502034 - DNA, 2184 bp, Stenotrophomonas maltophilia
atgtcggggaaacagccggtcgaggttctgctgcgcccagcggtggagttctataccgtcgcggcgtgtgcaggcgccgcgtttctgtccctggtggccccgtggtcgctcgcgctgagccccgccatgggcgtcggcagtgcgctggcgttctgcatctacggtgccatccgctaccgcgatgcccgcgtcatcctgcgctaccgacgcaacattcgccgcttgccgcgctatgtgatgaccagcaaggacgtgccggtcagccagcagcgtctgttcgtgggacgcggatttctgtgggagcagaaacatacccatcggctgatgcagacatacagaccggaatttcgccgctacgtcgagctgacgccggcctaccggctggcgcgcaggctggaggaacggctggagttcgcgccattcccgctgtcccggctacctgcgctcacgggctgggatgtgcctttcaacccggtgcgcccgctgccgcctgtgggcggcctgccgcgcctgcacggcatcgaacccgatgaggtggacgtcagcctaccgctgggtgagcgcgtcgggcattcgctggtgctgggcaccacgcgcgtgggcaagacgcggttggccgagttgttcgtgactcaggacatccggcgcaagaacgccgacggcgagcacgaggtcgtcatcgtcatcgaccccaagggcgacgccgatcttttgaagcgagtgtacgtcgaggccaagcgcgcggggcgcgagggcgagttctatgtcttccacttgggctggcccgacatttccgcgcgctacaacgctgtgggccgctttgggcgcatcagcgaggtggccacccgtgttgcagggcagctctccggggaaggcaacagcgcggcatttcgcgagtttgcgtggcgcttcgtcaacatcatcgcccgcgccctggtggaactggggcagcgcccggactacatgctgatccagcgccatgtgatcaacatcgacgcgctgttcatcgagtacgcccaacactacttcgccaagaccgagcccaaggcctgggaggtcatcgtccagatcgaggccaagctcaacgagaagaacatcccgcgcaacatgatcgggcgcgaaaagcgcgtggtggcgctggagcagtacctctcgcaggcgcgcaactacgacccggtgctcgacggcctgcgctcggcagtgcgctacgacaagacctacttcgacaagatcgtcgcatcgctgctgccgctgctggagaagctcaccagcggcaagatcgcccagctactggccccgaactactccgacctggccgacccacgcccgatcttcgattggatgcaggtcatccgaaagcgcgccgtggtctatgtcggcctcgatgcgctgtccgacgccgaggtcgccgccgcagtcggcaattccatgttctccgacctggtttcggtcgccggccacatctacaagcacgggatcgacgacggcctgccgggcgcatcggctggctcgcgcgtgccgatcaacgtccatgccgatgagttcaacgagttgatgggcgacgagttcatcccgctgatcaacaagggcggcggcgctggcctgcaagtcaccgcgtacacacagacgctctcggacatcgaagcacgcattggcaaccgcgcgaaggccggtcaggtgatcggcaacttcaacaacctgttcatgctgcgcgtgcgcgagacggctaccgctgaattgctgacccggcaattgccgaaggtcgaggtctatacgaccaccatcgtcagcggcgcgaccgacagctccgatattcgtggagcgacagactttacgtcaaacacccaagaccgcatcagcatgtccagcgtgccgatgatcgagccatcgcacatcgtcggcctgcccaaaggccagtgcttcgcgctgctgcagggcggtcagctttggaaggtgcgtatgccgttgccggcgccagacccggatgaagtgatgccggcggacttgcagcaactggccgggcacatgcgccagagctacagcgaggccacgcagtggtgggagttcaccagctccccggtcttgcaggacgcggccttgccggacgatctgctcgatgagacggccatcgccacacccaccaccggcacgggcgacacggccagcgaagaggccgcgccatga

SEQ ID NO: 502035 - DNA, 762 bp, Stenotrophomonas maltophilia
atgagcgatgccgcctcgactgcgcagcgcgagcagaaccgccgccagggcttgatcgtcggcaccatcaccttgccgccccggctgctcggggtgctggtcggctcgctgctgttctcgatcctgatggagtgcatcggcatgcacctgttctggaaagaccagggctggcagcactcccagcaaatgttgcagtacgagctggggcacctgtccaagcatttcacgcgcagcgtggtcgtgcaggagccggggcgaacggcgcacgagctggtggacacgggttatgaatgggtgttcgtgcgatcagggctcctggagcgcatgagccagaccgccgagcgcgcccgcgcgcccagccaggggaaaaaccaggacggagggcgcaacttccgctacttcatcagccaggtctatgtctggacggagagctacctgatcgccgcagccttcacgacgcttactttcctcgtgcgcctgctggtcctggcgctcacgctgccgctgatcttcacggccgctttcgtcggcctgatcgacggtttggtacggcgggatgtgcgccggttcggcgcaggccgggaatccggctttatctatcaccgagcgaaagcgagcctgatgccgctggccgtgctgccctgggtcacgtacctggcgctgccgatctcggtgcatccgctgctgatcctgctgcccagcgccggcttgctggggctggccgtgagcctgactgcagggagcttcaagaagtacctctag

SEQ ID NO: 502036 - DNA, 384 bp, Stenotrophomonas maltophilia
atgttggctccgatctggctgcgcgccgcgcatcgcggcgtgccaacttttctcgtgacggccctgctgatgggtcagttcccggttgccttggccgaatccccggcacagcgccaggagctggttgccgcgctacgccagctcgacgcgctggagcgcaccatcgcggatggcgctgcacacgcacccatccagccgggcgagcgctaccacttcgattacccacgactgctggctgatctggcgcgtgtgcgcgccggcatccaggcccatctcacaccgtcgcgcgcccagccacgcgacctctccgaactggctggtgagtaccgcaccgagcggaccgccccgccatcgctgccgacgactgcgcagggcagaccatga

SEQ ID NO: 502037 - DNA, 234 bp, Stenotrophomonas maltophilia; identical to SEQ ID NO: 334640

SEQ ID NO: 502038 - DNA, 360 bp, Stenotrophomonas maltophilia; identical to SEQ ID NO: 334639

SEQ ID NO: 502039 - DNA, 411 bp, Stenotrophomonas maltophilia
atgtccgagcaacagcatgtccgtgccgatgggacagtcacgttccttccacaccggctcaacaggcacccggtggtcgtgcgcggcctcactgccgatgagttgtggatttgctgcggcctgtccggcgctgccggcctggtggttggcgcgccgctgtcctgggtgttacgcaccattgccatcgcgccgaccttcgttgtcctgggcgtggcgctgggcgttttcatcggcggcggcatcctgcgccgtctcaagcgtgggcgtcccgacacctggctgtaccggcagttgcagtggcgcattgccacgcgccatccgctgatggccgcttgggtgggcggccatgtgctgatctcgcgctccggcttctggaccatccgcaggggcatgcacgggggcgcgcgatga

SEQ ID NO: 502040 - DNA, 693 bp, Stenotrophomonas maltophilia; identical to SEQ ID NO: 334637

SEQ ID NO: 502041 - DNA, 939 bp, Stenotrophomonas maltophilia
atgaagcccatgaagcatcctgtactcgcgctgctggggctgctggccgtggccgccgcagtggtcgtgtcccccgctgtccaggcggtggagatcctgcgttgggagcgcatgccgctggcggtgccgttgaaggtcggccaggagcgcatcgtgttcatcgaccgaaacgtccgcgtgggcgttcccgcaggcgtcggtgagcgcttgcgcgtgcagagcgcgggcggcgcggtgtacctgcgcgccagcgagccgatcgagcccactcggctgcaattgcaggacgccgacaccggcgcgctgatcctgctcgacattgcggcggagccgcccaaggacggcgaagccgagctggaaccggtgcgaatcgtcgagggcaacaactcaacagcgcgctatggcgatcagcctgacggtgccgatgcgccccatgcacgcgctcaggagcaggcgggcacccggacggcgcggcgcgaaacgccaatccccgtcgtgctgacacgttttgctgcgcagaacctctacgcaccgctgcgcaccgtggaagccttgccaggcgtcatgcgggtcaacctgcgccgcgacctcgacctcggcacgctgatgccgaccttgccggcacgcgcggtcgcgctcgcctcgtggcgcctggaagaccagtgggtcactgccgtgcgcctgaccaacagtagcaacgactggatcagcctcgacccgcgcgtgctgcaaggggatttcctcaccgccaccttccagcacgaggcgcttggcccgcgcggaacccccgaggacaccaccgtcctgtacctggtgacgcgcgggcacggcctcgcgcaatcgctgctgccggcgatccatcgcttcgaccccgctgtgcatctcccgcagcccaaagcagcagccagcgacgacagggaggcccgccatgcgcagtaa

SEQ ID NO: 502042 - DNA, 1410 bp, Stenotrophomonas maltophilia
atgcgcagtaacggactcctgaagtggctgctgatccccgtggccctgctggtgctgtttgtcgccatccggctgttttccggtggcggtgcgtcggcaccgcctgtcgcggatggcggcggcaggcttacgccggaagaaatgaaggcgctgggcatcgagggtgacaccccgcgcgacaccgtggcgacgctggttgcccaggtgaagcagttgcgcaccgagcttcagaccgcgctgtccgacaacaggtcgcagcgtgaggagaaccagcgactgcgccagcgcgagaacgccatcgaccaacgcatcagttccgccctcgaatccgagcgctccaacctgcgccgcgaccaacagcaggcggccagcgcgcgccagcagaccgaggggctgctcgctgacctgcagcagcgcctggacagcatcggcgggcgtggcggcggccatgccgatttgccggtggggctgggcctgcgtgacggcgacgaggccggcatggaaggcggtatgcgctgggtggagccggatgacgcgaaacaaagcgacgggcgtggcaggtcgaatggcggcataagcttccccaccagcttcggttccgcacagagcacgctggaaaccacagcgcaaaccgtggcgaacgcgggcgcacgcgcggcaggcgtcaagagcccgacgcccgtctataccgtgccgaccaactcgacgctgatggggtcggtggcgatgacggcgctgattggccgcgtgccgatcgacggcacggtgaacgatccataccccttcaaggtcttggtcgggcctgacaatttgaccgcgaacggcatcgacattcccgatgtggccggggccgtgttctccggcaccgcatcgggcgactggacgctctcctgcgtgcgcggccaggtgcgcagcatcaccttcgtgttccatgacgggaccatccgcaccatccccgaggatcgtgagggcaaccagcagaacaaccaacaacgcgacggcctgggctggatcagcgacccgcacggcattccctgtgtcagcggcgagcggcgcagcaatgcgcagcagtacctcggcacccaggcgctgatcacggcggctggggctggcgtggcctcgctgatcgaatccgacagtggcagggcgtcctatgtcggcgccgacggctccatcggcagcgtgggcatcagcggccaggaagccgtgggccggattctcgccagcggcgtccaggacatgtcgagctgggtcaacaagctctacggccaggccttcgctgccgtttatgtgcagcccggtgccaaggtcgccgtccacctcgaaaagccgctcgccatcgacttcgatcccgaaggccgcaaggtcgatcaccgcgcaggagaaagccatgccctcgaacttgaatag

SEQ ID NO: 502043 - DNA, 450 bp, Stenotrophomonas maltophilia
atgccctcgaacttgaatagctgggctcagggcctggcgctggccttggccgtcgcgctgctcggtggctgcgccaccagcaaggaaaagctgctgacccacggagacagcacgatgatgaacatctggcagcagaacgccggcgacggcggcggtggtgccggccaggtagcgcgcaggcagttgctcgatgcgcgccagagcctgcgcaggccgctgaccgagatggacgtgcaggccgcgcctgccgagcagatgcgctacacgcgcacggcgcgcaacgaggtctaccgccagttccagcgcctgcccaaccccgatctcgtgatgtacgtgtatccgcatttggcgggcaccgacccagtgccgattccgggctatacgaccgtgttcccgctgtaccagcgcgtgcagtacgccatgccaggcgagcgcgtggaggattactga

SEQ ID NO: 502044 - DNA, 2910 bp, Stenotrophomonas maltophilia
atgcgctggaaaatccccagaccgaagccgaccgcgccgaagctggccgcatccgatgctgacgacgacgagcagccggacggctggcaacgccacgtcgaggcactgcgccaggccggcatccccgaacccggcacggcggtgcaaggccgcaggccggcgaccctggcagacgagcaggcgctgtacgaggtcgcgccgtcgttcgtggaactgctgccctgggtggagttcctggcgcagtcgaaagccatgttgctggaggacgggcaatcggtggcggcgttctacgagctggtgccgctgggcaccgaaggccgggaacctggctggctcgcgcaggcccgcgatgccttggaaaacgcgctgcaggacagtttcgatgaactggatgagaacccctgggtgctgcagctctacgctcaggacgagcccagtttcgaccagtacatgcagaccctgcgcgactatgtgcagccgcgcgcccgtgagacggcgttcaccgagttctacctgcgcttcttcggccatcacctgcgcgcggtggccaagccgggcggtctgttcgaggacacggtggtcacacggctgcgctggcgcggccagacccggcgtgtgcgcatggtggtctatcgccgcgtgaccggccaagggcaaaacagccgccgcgggcagacgcccgagcagatgctcaatatcgtttgcgaccgcctgtgcggcggactggcgaacgccggcattcaggcccggcgcatggtggctgcggatgttcacgactggctgctgcgctggttcaacccgcgtcccacgttgcttgggcctggggccgaagacagggagcgcttctatgcgctggcgcgctaccccgacagtacggaggccggcgaagacggcgagatcgaattggcgagcgggcgggatttcagccagcggctgttcttcggccagccgcgctccgacgtggcgcagggcacctggcatttcgacggcctgccgcaccgcgtgctgatcaccgaccgcctgcgcatgccgccgggcacagggcacctgaccggcgagacacgcaaaggcgatgccatcaacacgctgttcgaccagatgcccgaggacaccaccctttgcctgacgatggtcgccacgccgcaggatgtccttgaggcggacttgaaccacctggccaagaaagcggtcggcgaaaccctggcgtcggagcagacgctcaaggacgtgcatgaagcccgttccctgatcggcagcgcgcacaagctctatcgcggcacgctggcgttctacctgcgcgggcgcgatgaggcggaactggaccgacgcggcctggatctggcgaacgtcatgctcaacgctggcctgcagccggtgcgcgaggacgacgaggtggcaccgctcaacagctacctgcgctggctgccgtgctgctacaaccccggccaggatcggcgcaagtggtacacccaactgatgttcgcccagcacgcggcgaacctctcgccggtgtggggccgcgcccagggtacggggcaccccggcatcacgatgttcaaccgcggcggcgggccgatcaccttcgacccgctcaaccgcctggaccggcagatgaacgcccacctgttcctgttcggcccgacgggttcgggcaagtcggcgaccctcaacaacctcttgaatcaggtcacggcgatctaccgaccccgcctgttcattgtcgaggccggcaacagctttggcttgttcagcgactttgcccggcgcctgggcctgaccgtgaaccgggtcaagctcgcgccgggctcgggcgttaccctggcgccgttcgcggatgcgcgccggctgatcgagacgcccagcgacgtgcagacgctcgacgccgatgccctggacgaagacctgccgcccgatgctgtggccatggaggcagatgagcagcgcgacgtactgggcgaattggagatcaccgcgaggctgatgatcaccggtggcgaagacaaggaagaagcccggatgacgcgggccgaccgctcgctgatccgtcagtgcatcctcgatgccgcagaacactgccacagcaaggatggcgagaagcgcaccgtgctcacgcgcgatgtgcgcaatgcgctgcgcacgcgcagccaggacccgacgctgccggaaatgcggcgtgtgcgactgctggagatggccgacgccatggacatgttctgccaaggcacggacggtgaaatgttcgaccgcgacggttcgccgtggcccgaggccgacatcaccctggtcgatctggcgacctatgcccgcgagggctacaacgcgcagctctccattgcctacataagcctgatcagcacggtgaacaacattgccgagcgcgatcagtacctgggccgcccgatcatcaacgtcaccgacgaagggcacatcatcaccaagaacccgctgctcgccccctacgtggtgaagatcaccaagatgtggcgcaagctgggggcctggttctggctcgccacacaaaacatcgacgatctgccgcgcgccgcagagcccatgctcaacatgatcgagtggtggatctgcctgtcgatgccacccgatgaggtggagaagatcgcccgcttccgcgaactctcgcctgcgcagaaggcgctgatgctttcggcgcgcaaggaagccgggaagttcaccgagggcgtcatcctctccaagagcctggaagtgctgtttcgggccgtgccaccgagcctctatctcgcgcttgcgcagaccgaacccgaggagaaagccgagcgttaccaactcatgcaacagcacggcatcagtgaactcgacgcggccttcaaggtggccgagaagatcgaccaggcgcgcggcatcgagtcgccggccttgggcctgccgcaatag

SEQ ID NO: 502045 - DNA, 765 bp, Stenotrophomonas maltophilia
gtgaaaccgaaacatccttccattccgatgccagtccaggcgctccgccatcggcgctcgcgcaagcgctggccctggttcttggccgctggattgatcgcgctgctgctgatctggctcgtgtcccgcgcacccagcgaacccgcgtcgttggctcccgcgccggtcagtaccgcgcaggtggccgggccgccctggcaaatgggcaacgcgcagggccggttcacgctgacgctctatgccgacctcgaatgtccgttctgccgggagtactttccgcaactcaaacgctgggtgggcgccaacgcggacgtagccctgcaatggcagcaccagccgctggccgcgcacgaaccggccgcctctgccgaggcacgcctggccgagtgcgccgccgaaagtggcgggcatgtggccttttggcaggccattgaatgggtctatgcgcacacgcgcagtgacggcctgggcttgcccgagggcctgcgctatcccggcctaaacccagccgtcgagcagtgtttggccagcgagcggcccgaaacgttgattcgcgctcaggccgaggaagccaccaagggcggcgtgaccgcgacgccatccctgcgactacacgatcgccagaccagccaggcgatcctgctgcaggggcctatcgaaggcgatgcactgctgtcggccatggacatgctggcagctgaggattcggtcgtttcacccactacggaaatgcctgccgacgtcgtcggcgacatgcccaggtag

SEQ ID NO: 502046 - DNA, 495 bp, Stenotrophomonas maltophilia
atgtctgtcgtcatcaatgactcctgcctggagtcgctttccgatatttctgttcagaacgaggactggatcgtccagcaagccatcgtgttgctggagcgacgggttttcaaagcagggccacgtcttgaacggcccgctgcggtcagggactaccttcgcttgaagctggtcgccgagcccaatgagatattcgtcgtcgtgttcatgaacagcatgcacgacgtgctggccgtggagccgatgttccatggaacgatcaatgcgacctcggtttatccgcgtgtcgtgctgcaacgcgctttgcaactgaacgccgctgcggtcatcttcgcccatcagcacccctcgggcaccaccgagccatccaatgcggatcgcttgctgaccgagcagttgaagacggccttggcgcttatcgacgtgcgggtacttgaccatttcgtgattggtcagggcacaccgtactcgttcgccgagtctggtcttttgtag

SEQ ID NO: 502047 - DNA, 447 bp, Stenotrophomonas maltophilia
atgccagcatctttattccgcttcgcatccggctggcgaacccttggcctggccgttgcactgccggcatccttggccgttttcagcccagccaccttcgccgccgatgtggtggtcgtcaccgacagccgccacccggtcaagaccatgggtggcgagcggttgatcgagttggatgaaggcccgcgcatcgaagccgagctttccgcacagctgcccgccgatcctgagcaggccacggccatcgtcaagcgccgtctgaacaacggcggtgccgacctccagcgccgcattgcttccgcataccagggcgtcgccgacgcatggagcctgggcgtcaccagcatcccggcggtcgtggtggatcagcgttacgtggtctatggcgagccggacgtggcccgtgccgtcgtgcgcatcgagcaacaccggaggccgcagccatga

SEQ ID NO: 502048 - DNA, 948 bp, Stenotrophomonas maltophilia
atgacccgacccttcgagcggatgcgccgcctgcgtgctggcgtggtctcagtgctgctgctcagcgccacgggcagctacgccctcaacaccgcaaccatcgttggctcagtggcatcgccggactgcctcgaataccgcgtcgtcggcatctgctactggctctactgcacctggacgggctgcacggtgcgcacatccatcaaggtccgccactacatccccgatgcggtcgtctccagctacagcaacaccggcgagaacccttgggtcgaagtccgggcgatgagcgcgcccaacccatccgcgcaggccggcggggacggcaccaccaacgaagaccacgaaaacaatctcgccaagttcaagaacgcggacgtcatcggccatcccggcgtcgaggtgttcaaccagttcgtctcatcgtcgggctacttctgcgagggcgcgggcacggcgttcatgccgtatctgctcagcaccctggacacactggcctggcgctacaacgtgccggagatggcctacccggaggcactaattccgggcaggcgcgaggtcggcgcgcgcaccacgatgaacctgtggggcaacgtctatccgcgcggcggcttcctgcaccaggccgacgaccacaaggccggcgccgtggtggcccagcgcgccggcgatgtcgtcacgcgccgtgggcagattcacgtctatcagccgctgctcgccaactcgcggcccggttactggcctgccggcgcgctgatggaaggcgatgcctcgacgggcaagtggcaggaactcacgcccgtcctgtcctcgtcctgcacggtgttcccgcgcagcggcttcctgacccaggcgcagcagggcgattacgcctgggcgctgtggcggccctatgcgtgctgcgaacgtcgcggccaggtattcctcggcagcgtcgatttccaatga

SEQ ID NO: 502049 - DNA, 1407 bp, Stenotrophomonas maltophilia
atgaagcgtcctgaactgacaaacctctccaccaaggcgtgccgcctgctgcgtcccacggtattggctgggctgctggctggcgcactcgttcttggcggcggcctggcgtgggcgcaggccggatttcagaccggcggctccgtgatcggcgacgaagtgatgtattcgattggcggcggcagcgcggtgtccatgggccgcgtggccggcatgcgctcgatcggcgttggcgtgggctggaacagcaacctgatctgcggcgacatgagcatccagaccacgctgcgcaaccagctcaacggcgtcaccaacggctttcagcagatcatgagcaacgtgatccagagcgccaccagcgcggtggcatcgctgcctgcgctgatcatccagcgcgccgatcccggcctgtacaacctgctgaccaacggcgtgctgcaggcgcgcctggatttcgaccgatccaagctgacctgccgtgccatggccgagaagatggccgacacggcgggcggacaactcggctggagccagatggccgaaggcatggcactgcgcgatgcggtgtcgagcacggatgccgtgtcggcaattgaacaggcggagacgcgccgcggcaacgacggcgtgccttgggtgggtggtagcaatgcgggcggcgcaggccagtcggccatccgcgtggtcggcgacgtcacccgcgcaggctacaacctggtcaacggccgcagcgtgaccgacacatcgtccatcgctgccgccagttgcgcgagtctgtcttgccagacctggacctcgccacagcaggcgaccgaatgggccacacgggttctcggcgaacaggtgcagcgcacttgcgatgcctgcaccaagaccgaaacggtgcccggcgtcgggctgacgccgctgatccaggaggagtacgaggcaaagctggaagccttgcaggaactggtctcgggaacgcgcaacaccaccttcgagaacctgcgtgcggctggcagcacctcgctgcccatcacacgcggcgtcatcgaggcgctgcgcgacgagccggatcaagacctgctggcgcggcgcctggcctcggaggtcgcgctggcgtcggtgctggagaaggcattgctgctccagcgcaccctgctgaccggcaagaaggagcccaacgtcgcggcgaaccagttggcggtcgaggccgtgaaccacgagagcgacacgctcgaccaggaaatccgcaacctcaagaccgagctggagctgcgccgcgagctggcgaacaactcccccatggccatcatccagcgccacggcacgcgcgcggctggctcgcgtggcatctacgaaggcgatcccattcccgaccgccttgaccggctccagaagggcaatccgggaggcaacccatga

SEQ ID NO: 502050 - DNA, 372 bp, Stenotrophomonas maltophilia
atgaacccgacgcgcgccagttggctgcgcccgcgctggctgctgaatcggcgcgcggcgaaggcattgctgtggacggtggtgctcgtcgccgctgccgtgggcgccaacatcgtcggcatttttctcgtcggcagcattgacaactgggagcgctggctgacggccacggcgggctacttcctggtgtggcggctgtgcctgtatggcgcaaccgcctacggctgggtctggatgcgtcgccggctgctggcgcgtgaggcccaacgcggggcggataggcaggcgcggcggcgactgctgcgcagcgagatcgctggcgtcgccgccattgtggcgctggaagccagcctgttgctgcaggccgcttga

SEQ ID NO: 502051 - DNA, 1524 bp, Stenotrophomonas maltophilia
atgacgcttttcaccaccgactacttggagtactacctgacgctggtgtcgtggatcgtccataacggcatctgggccgtgctggtggcgagcggtgtattcgcgttgcctttcattgccatcatcgtgcaggagtggctgaaggcccgcgcggaaggcgccgacgaaggcaacaagggcgtgctctcggctgcgcgcatcgagaaccgggtcttcgtcgccatcgtggtggtgatgttcgccggcatcccattcatcgacgtggatctcaacaccatccgctacgacagctcgcgctcggcccaatgccaggtcagcgtgccgcagcccaccgataccggctggtcgcagtccttcagcactatcaacaaccagtcggcgaaggtgcccgtctggtgggcctttatgcacacactctcgcgagcagtgaccggtgcctctgtggcggcgattccctgcggcaccgacttgcggcagatgcgcatggagatcgacgcgacccgcatcgacaacccggtgctggctcaggaagtggcggatttctcgcgcgactgctacggaccggcgcgcgccaaactcttcatgcagcgcccgaacctcgatgaggcgcagatgcacgacgtgacctggatcggctcgcgcttcttcactgacacgggcggctactacgacacctaccgctccagcacaccacgcgatgactggccttacgacagcaaccgtgatgctgggcttgcgcaggtggccagcggtggcggctatccgtcctgcaggcagtggtgggccgatggcagcaatggcctgcgtgcacgcctgctggggcaggtaaacccaagcctgctgaatcgcctggcgggctgggccggattcctgacccgtgccgatgtggacgactcggtgatccgcaccatcgcctcgccgaggcagcagaaactgaaccagggcagcgtctatacggactacggcggtcagatcgacaagaccctgccgaacatcgtaacgcgggccacgggcgacgtcggcatggctttcggcgcgattgccgcgtttcccgccatggacgtggtgcgccaggcgctgcctatggtgctcgccttgctcaagatggcgctggtcatctgcatcccgctggtgctggtcgtgggcacctacgacctgaagaccgtcgttaccgtgagcgtcgtgcagttcgcgctattcttcgtcgatttctggttccagctcgcgcgctggatcgacagcaccatcctcgatgcgctctacggctggggcttcggctggaaccggccacacagcaacttcgacccgctggtggggctgaacaacgcctttggcgacatgctcctgatgttcgtcacgggaacgatgtttattgtgctgcctacgttctggatcatggccctggcttgggcgggcgttcgcgccggtaacgtcttacaaggcctggctggagctaccggagatgccaaggccgctggcggaaagggaggaagtaccgcaatcagcgcggtgccgaagaagtga

SEQ ID NO: 502052 - DNA, 360 bp, Stenotrophomonas maltophilia; identical to SEQ ID NO: 345348

SEQ ID NO: 502053 - DNA, 459 bp, Stenotrophomonas maltophilia
atgcaacagcatggctggtcactgctgttccacgacaacctgatcgagcagatgatgaagctgcgcgcggccgtgctgcgcgcccaagagaacgacccggaagggttcggatcgaacgccaacgtcaagttcttccgggccttggtccagttgatgcaagacgtggtgccgagtgatccggcgcgcgacgaataccgccagggcaacaccatgggatcggcctatcgccactggcggcgggccaagctcggaaggcgataccgactgttcttccgctacgactcgaaggccaaagtcatcgtgtacgcctgggtcaacgatgagcagactctgcggtcttcgggaagcaaatcagacccgtatgccgtgttcgagaagatgctcgggcgcgggaacccgccggacgaatggagcgcattggtacaggcaagcaagcaggattggagcaaactggagtag

SEQ ID NO: 502054 - DNA, 318 bp, Stenotrophomonas maltophilia
atgcctgccattcacgaagttgccacgctgacctccaaaggtcagatcacgctgcccaagtccatccggcaggcgctgggggtggatacgggcggcaaagttgcgttcgacctgcgcggcggcgaagtcgtcgtgacccgcgctgatgccgagcacgaggaccctgccattgccgcgtttctgaccctgctggcccgcgacattgaagcgggccgaaatgtgcgtggcctgcccgaggatctggctcgcaccatgctggagcacgctgggcacaaggtggacctgggcgatgatttcgatgaggacgtggagatctga

SEQ ID NO: 502055 - DNA, 1854 bp, Stenotrophomonas maltophilia
atgctctctctgttccagcggaaacggcctccggtcgctgccgctccgtcgccagcacccgtcaccgatctcccgaaagggctgctgcaaccggaatcggccgcatcgctgctggcgacaccgcgccggcagaagctgctggaacacatctggcagcgaacctcgctctcgcgcaggcaattcgccaccctgtaccgcacgcccctggaacgctacgccgagctggtccaggccttcccggcctccgaggcgcatcaccatgcctacccgggaggcatgctcgaccacggtctcgaaatcgtcgcctacagcctgaagctgcggcagtcccatctgctgcccattggcgccagtcctgaggaccaagcggcgcaggaggaagcctggaccgctgcagttgcctatgccgcgctactgcacgacgtcggcaagatcgctgtcgatctgcacgtcgagctagccgacggcaatacctggcatccgtggcacggcccgctgcgtcaaccataccgcttccgctaccgtgacgatcgcgagtaccggctccacagcgccgcgacaggcttgctctaccggcaactgcttgaccgtgaagtcctggattggctcagctgctatccgtcgctgtgggcaccgctgctctacgtcctggccgggcagtacgagcacgctggcgtgctgggcgaattggtggtgcaggccgaccgtgcttccgtggcccaggaactgggcggcgaccccacacgcgccatggccgcgcccaagcacgcgctgcaacgcaagctgctggaagggctgcgttacctgctcaaggaggagctgaagctgaaccagcccgaagcctccgatggctggctcaccgatggcgcgctttggctggtgagcaagacagtttccgacaagctgcgcgcgcacctgctgtcgcagggcgttgacggtatcccggcaaacaacaccgccgtgttcaacgtgctgcaggatcacggcatgttgcagcccacgccggacggcaaagcgatctggcgcgctaccgtgaccagttccaccggctggacccacttgtttacgttgctacggctggcacccgcgctgatctgggaatctggtgagcgaccagcgccctttgccgggacggtgacgaccgacgcggcactggcgggcgaagctgccgaggcagcggccacgctttctgcggacggcgcagcgtccgcctccgagaaccaaaacgctccgccagcggaaggtagtggcatcgtctcggcctctccacccaaggcccaggccagccccgacgtcatggcggacatgctggcgatggtgggaatgggggattcgtcaaccaccgaggatgtggaaaccgccccggacgaagtacccgcagctctccccgatgcgacccagccgcccttggccgccgctgcgccttcgtcaccggccttcacgtcctcgacgacacagccatccggcgagcacttcatggcgtggctgaaacatggcatcgccacgcggcggctcatcatcaacgatgcgaaagcgctggtgcataccgtgagcgacaccgcctacctggtcagccctggcgtgttccagcgctatgcgcaggaacacccgcaggtaggcaaactggccaaacaggagaacctgcaggattggcagtgggtgcagaagcgcttcgagcgactgcaattgcatcgcaagcaaccaagtggcctgaacatctggacttgcgaagtcacaggcgccagaaaatcgaggaagctacatggctatttacttatcaaaccagaaatggttttcgaatttacgactccaaataacccatatctattttcaatgaaatttcccggcctatga

SEQ ID NO: 502056 - DNA, 3336 bp, Stenotrophomonas maltophilia
atgagtattactctggaaaaaatctataccgacttccgtgccaaagaaaaacttgccaaaaaactgcttgagcaaatgaattggtttggttcaatcacggatttcgatcctaagaccggcgcggctctgccgaaatccttgtcagggttcctcgccaaagtcgcacagccagaagcgagtgagataacccgtgaccgcctttggcgcataacggaacactgccgcgcttctgtcgagcgattatttcattctctcaacgaaagtcctcgccgcgaacacgctctactgcctgttcatgctgtgcgtgaactggatgccaacagttttattaagctgagtaatcgtccgggtcgtaccattcgggaaaaactggcaggtaacccctacatacaggctgtgcgtcgttttcaatccgtcgacctgccggaaaatcgcttgctgaaagcctttgccattcgccttgcggaaatgcttgatttacgcggtgattgtctcggtcaagaggatgagcttctatcaaaaatctacttatggttgcgttctgatgaggcgcaagccatcggcaattgggaaaatctgccacctaacaacacgctactagcacaccgagattaccgtcacgtgtgggatgcatggcgctggctgcaaaccctcgatgaggacatcaccagcgacctttctcaactggatgtccgcgagaaaaccatgcgcctttggcagcaatgcgcgcaaatgtggcttgatggaaagcatctttttgctgagataccgttactattcgattatgaaaagtttgagattcttccgtggacttccaagccacctttgttcaaggaagtgaagtacaagatgccccggcatttgcgacaaagcgcgagtgccgaaccaatttgtgttgatatcacagccctgcatccccgctatgccagtggtgacggaaaaggagcgcagtcgctggcggccccctttctttggcagaggtggcagcgcgaaaatgaaaccgttgacatcgaactctttggttccgatgccgtttggctgaatcccgatgcgaccaccatttctgcgccagatctgtttttcgccaaagacaacgccactgagctttttgaccccgccgcccgcgcgttcactactcggctacgcgaagagttcaagaacgatacactcatctggcttgcgcctgactttctcaacgatttcgagcttgaagtcatccgtcgcaacctcaacgcgcgtttcccgaatgccgagccgttgccgcgaagtgtggcggccgtgttcgctcaagctgacccggccaaaatcacgggcgagggttacgccatcatcgtcgttgattccattggcggcaagacgaccgccaccaagctcatcgccaagcgcgacaaagacctggcgaaacgtcttcccatcaccaaaggcttttattgggagcgttgcccgccggttgttatccctggcgaggaagcagaaaggctaggtggcagcggctacgacatcatcacgctggatgccaacgggcggtggcacgatgcgatccgcccggcaaagcccccattcattgaggcagcacacctgaagcgtattccaaacatcgggaatttcgcgttctgcatcaatttgatggaaagccccgttatgggcggaatccatctacatgctttacaacaacaggtggctgatattccactttggcgcgaccagattcctgagctttcagtcaaagtgatgaaggatggacatcagcaacgattccacctggttttgcgcggaacgacagtcaaacccattcggggtaaacccgtcaccatcccggttgatgaattcttcacactgcccgctggcaggccgcattactcgtttccgctctatgtcggcgataagggtgacgacttcggtttctctgctcgtctcgattcacccgccttcccattggaaaacaaggttgactgcgagttgaacctgacctttgaatacggcgcggatgatccctataaactcgtcttcacaccgcgcgacaaatctttcccacccatccgcgctacctggcgacgcacggaagaaatcaccgatgcccctgcgccggaatatccgcagccaatgacttgggcggagttgcagcggtttccgaagcaagacagtaataaaacctctgatctgttggactgggtggaaagggcaattgaacagcttgaccgtgatttttacatccgccccaaacagaggacgactggcacggtaaacagaaagtggctgaccgacaaaataggcgggcagtttacctttgctacatgtaaatccaccgatgagtctgtattcattcatcagaacagttttgttcatgaactgagctacgccgacttcactgagggggcagaaatttcattcgagcttcaggagcgcgatgggaaattctctggctggaaagtggcagggccgagatacaaagatgaagtgcgtctgaaaaactttgacgaagaatcagcaaaaaatctggttgccagtatacgcaagagactttactttcctgtcattcaggtttggcgcgatgggcgctcgactggagaccgtgaatgtccgaaagggtttgccgacgcaatgaaggccagaggagaacacctcgttgccctgctgaacgagagtggcattcctgagcaagtaaagaatgaaattcgatttctaatggcctgtatgcacaaggatgcgcctgaaaattgcgttcagtggataaccgggcaggttgagggtcagaaaattcgtgacctgcgagccgtcggcttcgcgcttggtgatgtttcgcagcaatggcagaaagatttgctatcccagctcgttgcgaatccgtcaaatgacgcgctcagtattttggcctatgccatctggcgagagcagcagtttgttgagaaattcagcctcgccaacttgcagtccattctgaatgctctgaacatcatgctcaacatcaagcaatatccgccccggaaagacgagtggactgctcgcaactggattcgcgccacgacagaaccgcttgaacttctgctcggcctgcttcgcacccgtgcatcatccacccccgaaatcaagattctccttcagccgcatcaaaaaatcaccaaggaattggccaagaaaatcgagcgagtgacagaaattgtcacactgtccaacatcaagctcttctcccgtgtgaaaatcaacatccagaaaccctcaggcgaccgcacccccgatctgctctacgcgctgcgcctgtacctcactggtgacgatggtgcgaacgctattcacatatctagtgtttctgatggaaatactgatgagaccatttaa

SEQ ID NO: 502057 - DNA, 2637 bp, Stenotrophomonas maltophilia
atgaacagccccgtccaacccgacaccgaagcccagcggcttgccgatttgaacgcgcgtgagagctggataaacaccaaggaaagcgaaatcgccagccgtgaaaccgccgtggctacacgtgaaagggatgcgactgcagagcgtcaagtcatcgagcaagacaaggccaagctggcgcagcgcgagcaggccgtcacgcaggctgagcaaaagtgtgatgcaggttttgccgatgaacgagccgcgctgaatgatgagctgcgtgaaaagcgcgcccagggcgaaagagcaattgccgagatgcgagagaaaaacctttcagcgttggaggttgaaatttccgagctgaaagcaaagcgactgggtgcggttgcccatgccgaaaacgccgaacgggagcgcattcggacagaaatcgcccaagagcgcgatgcatggacaaaacaacagggtgacgctcgaaagcagttgaatgcagagcgcacggaatttgagaaacaaaaaggcgcactctccgccttgcaaagcgaagtcgaaggaagacaggcagagcttgagacttcagagcggacactcgaacgcaaagaacaacggctggaacagcagaaccagaggcgcagcgagcaactggacgatgaggttgagaggcgtgttgaggatcgccgaaaatcgctagaggctgctctgcaatctgccaaagaggaaaacattcgactgcgcgaggcgtttaaaactcaagacgaacttctcggcgcgttcgaacagttaaagttgcaacttggtggcaaagaccctgctgaaattctgcgtgcgctgaacagccaggccgacgaactcaaacgcctacgagaggagcttgctacccgacctactgaggaaatgcgcgagcggtatcaagcccttgaatcagaagccaaaaatcagaaaacacgggcagaccagttagaacggcaactttccaccaatgaggctgcggtcgctgaaattggcgagctgcgccgtcaaggctcggagctcaacgccgaaaacaaatctctggcgcaaagggcatccatcttcgagggagcagccaacgaagcgcaagccgaactcaagcgtttgcgtgcagcttatgagcgccctgctgaagttaccgctcgctacaaagaaattgagatgccgcacatcagtgtggataaggtcaagcagccggtgcagcacgagatcgatgagctaacttggctcactgggattggtaatgcttgcgatacatacggactacatttcaatccacgtattttgaaagcttttcatacagctctcaaaacagcggaatggtcgccgctcactgtcctggcaggggtttccggaaccggaaaatccgaactgccgcgcctctactcgcactttggcggaatttatttcgagccgctgtctgtccagcctaattgggattcgcaggaatccatgctgggctttttcaattccatagacaataaattcgatgcacagccggtgctgcgttttctcgcgcaaagtcagatatcaggccgcgaacaatatgaacagcgcattagacgttggcagagtatgtcgccagatcagcaaatagcacttgaccctgagaaggacaaagagctgattgaagcgttgaaacaagcagattatccaggattgcaggacgcagtgtgtcttgttctgcttgatgagatgaatctggcacaccctgagctttattttgcagagtttttgagcaagctagaactgcggcgtggcagaaagggtgatgatgttccgttcataccggtgaaaattggcgccggcatggaaccctataagctccccctcggtcgtaatgtactctggacagggacgatgaaccaggacgaaaccaccaagtccctttcggacaaggtgcttgaccgttccatcatcatcaactttccgcgcccgacggaactcaaacgccgcctgaagcttgctccacttgatgacaaaaatcgaggcccggcgctacacaaaacgtcgtggcagagttggctagcacagggcagcaacttctccgacgatcaagtcagcccgttcaaaaaattcattgaagcaatcaatgcttctttagcggttacaggccgtgccctcggtcaccgcgtttggcaatccattgaatactacatggccaattacccggatgtccgtgctgcacgcgataaagatgcgcttgccagagctatgcatgtcgccttcgaggatcaactcgtgcagaaggtcatgcccaaattgcggggtattgatacacgcggcaagagcaagacagagtgcctggacaggattcgtggacaactcgttacaggaatcggcagtaactcattcaatctgacagaggatttcgaccttgcctgtgatcttggctatggtcagtttatttggcagtcggcaaattacttaaacgtcggtgacacggaaaccaatgatagatccacggccagtcgagactcggacaatgctgaattgccacactccctttttatgaaagatgaaccagattcagacaagcgtcataaaatgtggaacttaaagacaccagagcaacgagatgagctgcgcgtgaaacttgaagaaaatgccagagcaggaaggattcacgccaagcaatga

SEQ ID NO: 502058 - DNA, 1941 bp, Stenotrophomonas maltophilia
atgttgaggctccttgattacggcaaacctgcccccttcggtgagaccatcggtaggccgcgccaccttgcgtggccgctgaacgcataccgcgtgaccttgcccagagttcttgacgatggcaatggcttgaacgcatttgagcgtgtcatcctgaaactactcgacgctgccggtcgtatggatgccgatgcgctggcggctgaaacccgcatcccactcgatttggtcaagagcgttctgcttcgtttgcaagacaaggacttgattgacgaacacaatgccgtcattgagcgggagcgtgaagatgagcgcgcgccggtgtttgtcactgcgctggtctttcgcgaactcgccaccgggagaattctgccttttctgcatcggctggacgacacaaaccccatgcggaaaaaggaatgcgaggacaaagacttccgggtaatccgctgggatggtgaccgcagaaaagcgataccagcgccgcgtgatgtaatcagaaatttgcgcgccatgaaaaagcgttcgtctgcgttcggccaggacagcaagatgcccgcagtccaacagatcacgatagtcgccgagcccgagctgcttcaccttgactgccctatcgccatccagaaaagcgatggcgagttccgtatagctgacccgttcggcaacggtttctccttgattctcgaaaatgcgttcgagaaacttttggagcaggatgaaagcctcagcaagtggctgcatggttggaaacagtcattaagcactcctcgtccagaaaagcaggatgccacgccaaaagagccgttcgacaacgatgccaaccggcaacgctacccgaagctcgtcgccaatttgcgccccttgcggaatagcccgttccgctccatcgcccaaatccatgccgcaatcgaatgggcgctgttctatacctgctgccgcagaccggttgattccgttattgcaaggctgaaattcactacgcaagaccaacacgcagccctgcttgagcaggccgcgaaagccctcggtcttgagcagccgccgattggcttcaggccgattcgggaaggtaagctgcgggaatttgaggacggcggcgcgttccaagagacggttcttgccatagctttgcttcaagcgcaagacgacgctttgcatcccttgcgccgtgttgcggccgcgtattcagacctcatcactcgcctgttcgctatcaacgccaaacgcaacgagaagggccacggcaagggcggcgcagacgcaccgcagcaggcactaactgacgattcgttcatgcgcgaagtcgttcatgcgcttgtgccaggcatcgtgtttaccgacacgcctcctactgcgccagacaaggacgagcagggtgatgcactgctggatgcccgcactagcattcaggaggagttcggccaccagttgttcaaccgcctgggcgcaaacttgcaagaccggctggttcacgcggaacgttttttccagtcttgccatgacggggatgacgctttggcctatgtccgcgacctttatgccgcaatccagtcatcatttgagagagctttgacaggcaggctgccgtccgataccagtgacgcgcagctcaaagacacggctgaacgcaaggctgttgaggctggtttctgcgaaggcttgtcggagagcctgcgaaccgtcaaaacatcggctgtgcgccaggcattgcaaggcggcagccaaacgctcggggcttgcgttcttgcatggctgctggtgagcgatgctgatgaacttgccgcaattcatgacacgcagccgtccttgatcggcgatatggcaaaccttatcgctcggcgtgggcatggcaacgagccgctgccattgcccaaagagaacatcgcacagcttcgcaaagctgctttcacaactatcagaacacttatggaatcttga

SEQ ID NO: 502059 - DNA, 3381 bp, Stenotrophomonas maltophilia
atgaagtttcaggacattcctgtcaacatcataactgtccgcatcaagcggtctgacaatgtcgaagccctgcaagagcagccagtattctcggtagaggccagcctatcccgcgcagatgaatttgaaatccgcctgagagacgcggttgttttcgttcgccccgtcgcggctgttgacatccgccgcctcaacgctgaacttgccagtgggcgttccctgcttgcacaacttgaaaaccctgccgccgatggcagcatcgagctgaagatcggttttttcaccggcgtctgcctggaaatgggcgatgttgaaatcggtgtggatgagtatgtgcaagaaaagatgcggacgaagggtgaggcactttacaagaggctgggcgaactttgctgcttccaacagggaaacgacgcatttttcttcctgactgctggcccggcgattgatgaagaactgaaacctgtcggcgaggacacgccacgcgatgcagctgcggagccgacccgaataaacgctttctgtgttactggcgaaggtatccgcttcattgccaccgaaaaagcaatgccaggcggccaaactatctacatcgccacccgtctaaccaagccaaagaaggaacctgaccgcaccttacgcctggccaaaggtcggctgcgttttgtggactggacacaggcgggacaagtgcaaattcttgccaaagcgcaaatgacagcactcactcaggacgatggaagctatctgaaaaagtgggacgagtttggtgaggttgaaggtgaactgctgctcaagcaagcacgcgaagtgggtgctttgcaattcacggagatggtgccgaaacgggatggaactgtcggagttcgtattgcgcaggcatcagattctgcgtggggcgcactgagacaaggcgcagtacctgaagttgaactggtggacgagttgccggactacttgcaggatgaaaacctgagcttcacggattttgcgagagggatcgaaaaaaaggagggggaacacagcaagctcggtgaaaaacgcgagctgcgcgagaaaaatacctatttcagtgtcgcagagtttgacgaggaaactcgcgtactcacgcttaaagccgaggctctacccaaggaattcggcacgctcatcctgtcgctggcgggcgaatctgctcagatcaagcgccgcatggccgcccgtcaagccattctggaaggccgtgccgccaacccccagcttgggctgttgattgaggcgcaggggcgaatcacacagatccggccatcgcaaaaagttcaaccgctcacggccttcgttcgcaacaaggtctttcgcaatccgcccaccgtcatgcaggaaaaggccatcgaggccgccctaaaaacgccagatatagcgttgatccaaggcccgcccggtaccggcaagaccaccgtcatcgctgccattctggagcgcctgaacgagatggccgacaagcgcggcgcgagcatcaaaggccaaattctgttgacaggctttcagcacgatgcggtggaaaacatgatcgagcggctctcgctcaatagcctgcccgtgccgaaattcggcaaacggtctggcgcgacggaagacgatctcagcaccttcgagcgcaatcttgaggattggtgttcaaagttggccgccgaactacgtgaacgaaacccacagattgccgaagttgagcaggaacgggaaataaaaaacctgtgcctgcaatatgtccaagccccgtcacgcgtgctggccgccagccttgctaggaaaatcgcagcgctcggcagtgtaattcttggcgaagacggcgctcgacggtcgacgaatttggcgaaaaagctcgcgcacgaggaaaacctcaacgatggctccacccaatggcttgatgcagcgcgccgtctgcgcgttcgccatgaaagcttttctgacgacgggccagaaagggcgatggacgcactggatgacctgcgtgatgtgcttgaagaagacgaacgcaaactgctggacaaagccagtctgtggcgcaatgaagatggcccagcgccatttttggacaacctggtcgcgttgaaaaagaggctcctcgcccggttcaccgctccaccgattcttcgcgtggaaaagcagaacgacgcagtgcttgcattggcagaattcgccatacaacgcatcaaaaacgccgagtattcggctaaggataaaaaatctgctgcgctggccgagtttctagccgaactggaaggcaacccctatggcatggtagatgccctgtccgaatacagttttgcctttgccgccaccagccagcagagcgtcaatcgtgcaatgcaaaaacgcaaagggcttgtcgggcgcgatgtcaatcaaaaccagaaaggcatggaatacgaatatgtcatcgtggacgaagccgcccgtgtctcgcctcgtgatttgatggtggctatggcgcaaggcaagcgcattattctggtcggcgaccatcgacaattgccgcacatcattgacgaagaggtggctcgccagatggaggaaggcgaaacgggtgaggacgaaaatgactggctaaaaaaatccatgtttcagtatttgttctccgagcgtttaaaaacactggacaagaacttcccaattatcgacagcaccactggccgcgttacaccacgttgcatcacgctggacaagcaataccgcatgcatccgctgctgggcagctttatcagtagaaatttctatgaacgcttcgacccggaggagcaatttggctccgggcgaccagcaagcgatttcgcccatgatctgccaggcacgaacggcaagtctgccgtttggatggatgtaccagcacaaagaggaaaacatcaaaaggacggaaccagttggacgcgccccgcagaagtcactgtcatcgctcgccagttacaggcgtggatgagttcggatgcagggaaagatctctccttcggtgttatttcattttataaggcgcaggccgacagcatcagggaacaactcaaaaggaaattcggcgggatcgtgaacgatgacaagcaactgcgtgttggaacggtggactctttccaaggcatggaattcgatgtcgtcttcctctcaatggtgcgaaccttgccgcaaaactggcagccaaaggatgatgaccgcgacaaacaagctagagcgctgtttggccatctctgtctttacaaccgtctgaatgtcgccatgagccgtcagaagaagctgctggtggtcgttggagatacggggttgctacaaagtgaactcgcgaaggagttcgtgcctggactggtggatttccttcagatatgccgcgagcaaggggtgatgctgccatgttga

SEQ ID NO: 502060 - DNA, 1344 bp, Stenotrophomonas maltophilia
atgagtaacgccgaacaccaggctctgaagccacttgtggatgaatacaacaatgttcatcagatggccgatgagcttgcgcgcggtggacaaggcgtggtctatcgcaccaaggatgcggatttggccgtcaagcagccgctggacgctgccggccagccggacaaaaacgccaatctgcgcgagcgcttccagcacgtccgcctgttgcccataccacggcgcatccccgtttccctgccactcgccatcctgcgcgacgagccgggctatgtgatgcgtctgttgaacggcatgaagcccttcgccagtttcgatttggacggcagaagcaaaaagaagctggaagatcaaagccaagccttgccccaatggctgacgaagattcctgacaaggacctggcgctgcgactactgcattacgcacaaactggctccacccgccgccgttcgctcgcgcttgccaagtgcgctgccatcctcgcccgcctgcacagcgctggactggtctatggcgacatttccaccaacaacgctttcattggcgaagacgacaccaccgatgtctggctcatagatgccgacaatatgcgcctggagttacccagcggcggtgtgtccgtctatacgccgggctacggtgcaccggaggtagtgcagggccgtgaccaatcccgcccgcgaaccgactgctgggctttcgctgtgatgacattcaagctactggcgctttgccaccctttcattggcaagaaagtactggagcccgaagatgaagaagacggctgggatgccgaccctgcgcccaatggcactgccaccgatctgaacgaacaggcattcgctggtttcttgcctttcgtggatgacgaagatgacgattccaacgaaggagttggaggcctgccccgtgtattagtcgcaacagaaggattacgccgcctgtttcaggaaactttcggtgcaggacgtgaactgccgcaccgccgcccgacaatggcgttctggacattggagcttgcgagggcggcggatcagtcgctggattgcctcgaatgtggcatgagccatttcgccgatgaatacgcgcaatgcccgtattgtggcgcggcgcgcccggctttcattcgcgtcaaaacgccacgttgggaaatcctgattcctggtggtgccacggagttcagattgccgcagcggctttttcacccgttttcattcgagtatttcgataacacagcatacgaagccatgctgaactgcgcggccaaaaccgcagtccccgtgcggggcacgctgcctttcccggacaacctcacctttgagttcgtggagggctgcaaatga

SEQ ID NO: 502061 - DNA, 717 bp, Stenotrophomonas maltophilia
atgacgctttggaaaagttttggggcaagcgttcgcggcccgagccatatcgccgaaggtttgccaaatcaggatgcatgggcgaagtttcaccatgtttggggtgatggcatcgtcgtgtccgacggggttggctccaagcccttctccagcttcggcagccatgctgcctgtctcgccgtcgagttcgcagcccgggcttgttgcaccagtggtgaaatcgaacacaacgcgctgtttagcaacatccaagctaactggctgaggcttgtcgctccgctggaacctcgcgattgcgcggccacctgtcttttcgcactacgcctggatggcgtaatccacctagggatgcttggcgacggacttgccgctattgccaagtccgatggatcagtcgtttcgctgtcggaaaacaagacacaaggcttctccaatatcactactgcgctgtcctccaaggtctccgccaaagactggcagtatttgtcgctgccgggggagcagtgcatcgcagtattgctctgcaccgatggggtggctgacgatttggataacgctgacgggtttgtgagcagtttcgccgaaacgcatcgaaccctcgcaccggtaagtgccaaccggcgcatccacgagatgctcgaaaactggcccacgcccaagcacagcgacgataaaaccctcgcctgcctgtgcagtgaggaggttgcagatgagtaa

SEQ ID NO: 502062 - DNA, 489 bp, Stenotrophomonas maltophilia
atgatgctccatttggtttgcgacatctccggcagcatgagtgaaggaggcaagcccttcatcctgcgaaccttggccacgaccgtggcgcaatggttgcggcatgggtatggacaggcggaaatccgcctttgtgcttggagcagcgaggcacgcagcatcccgaactggagcgtcacggacgatctcccggtggaaatgctggtttgccatggaagcaccaatggcgaggcgctggttcaactgttgggtagcgagccggatggaaaggttctgattctcacggatggattctggacaagagacggcgtgaagactctgagccgctggcaggaaggcctaccgccggatacgctgcgcgtcatccaaatcggcgcggatgccaacccgcatctttccaaggggctcaaaggcgcaaaggtgtttgccgcagaagaagtgctcgccgtactcgataactggctgcaggcggatgaggaatgggcatga

SEQ ID NO: 502063 - DNA, 1764 bp, Stenotrophomonas maltophilia
atgaagagatttctgctcacgtggtatggaatcaccgattttcgcgcgtctctggggtttgagaataccgacggccctattgcgagcgcccttgcgggcgcgtcctactcggacatcattatcctgggttacacccggacggataattatgccagcgaattgatcgaggcacagaagacgttcacgcttgaattggcgtcaatacgaagcatggggcaagagaaagactggaagcttactaatcagtttgtctccaggttcgccaatacctctgtcgcacatgaacattttgaagcctggctgaaaaagaaagccgccgccctgggctgcaacgcaaggatccgtttaaatagcgagaaactttaccagctcaacgacaccgaaggtatttacgctagcgcaatgcgggcgctggatggggttgaacaggagccaggtgaaaagctcgtcacgctctatctcagcccaggaactccggtgatggcctttgtctgggcgctcgcggcgctgagctaccctgagctcaaaaaaagactcatagcatcgtccatcattggcaaagcacctgaagtcatagcgttgcctgctgagtggcttgagcgacacagctcaaaacaggctgcgatccgaggcatctccaacgggttcgatgtgacattccatctttttggtgagcaacggatgcctgccttgttgagcatccggcaatttgagtcggcgcatcacatttttgtcaactcaaaagacttccctgctgcatgtatgcaaacctttattggctctcgggacctgcatgaacttaccgttgacccctgggatgatcgcgctgttcacgaacaaatcaccgagctggcaaagcaatttccagaaaaaacacgaattggaatcaatttaactggcggcacaaaattgatgtttgctggcgcgctctctgctgcacgtgaactgggcgctgttccgttttattttgacagcaagaatcgtcgcgtcatattcattgacagtgttcggcgcgaaaaaatcaggcagattgattcaatcgagacatttttgcacctgaatagcgatggtttggagattgcaggcagttccttcatgaaggatatatcgccaagtcgccaacttctgaccgagaccctttggctgcatcgtgacaaggtgcgtagattttatagagaactgaccgactataacaatgcattcaggccattcgagatttgtcgtgacggcttcaatttcaagctggatgacatggaggcagtatccgtccagggctacggattagatctgagatttgagaaatggcctgatttcgccaaatacctatctggcggctggttcgaggagtttgtttatttgcagtgcaaaccctacgaggatgctggagtcattcaagacttgcgcatcaatgtcaagctgaacttgaatttagaagagtcaaaaggctattcgagcttcggtgttgaatacaacgagctggacatcacattcaccgacggttattcgctttatatcgtggaatgcaaggcgggcaatgtaacgcaagagcagattatgaagctgcagaaccttgtgcgcttctacggaggaattgaaggtcgcggtatcgttgcctgctgtgttctcccaaatactgagtcggtcaagaaaaaaataaaagatgccaggctgatgctttggagtggtgcatcattttctgagcagataacggcaatgatgaacagcatcactgagcgggctgaagcgagtgaggcaacgccatga

SEQ ID NO: 502064 - DNA, 2676 bp, Stenotrophomonas maltophilia
atgagtggaagcgcaaaggattttcagagcatcatttccaagctacacaaggcagttgcggactatcaagaaggttgtgcgcgcatcgaccgcgaattcgataccaccaaaaaagcattaagcgaagaccaggaacgcaatcgaaacataaggaggtcgaattggcaggcaggtttttccaaagagtgggaaagaaatgcaactgctatagcgaacgcaagctcgcagctcagacaacaacaacctgccttcgtggatttttgtgtagataagccattgatggcatcagaaattccagcaggtcttgtgcttggcacggagcaagtctcttttgagaagctatcttgtcaggcccctaaattcatctcattccccttatccagtgctcttgttttttcacaaggcgatgcagagcagaaacgcctcgtgcattgtctcttgttacggttgctgcaggctttgccagtaggtcaagtagagttgacactgattgaccccctgcagcaggggcaatcggtcgagccgttccggccattgctgaaggtagagcaattggtgccgcaaggtcatgttcttactcgttcggatgaaatcgaagctgcgctcggaaagctgacggacgaaattgaggagttgatccagcagcggttcaatgacaaggcatccaactggtcggaatacaacgcgatcaaccccggcaattcattaccttacaaggtggtggtgctttttgatgtgccagagcagatgtcggaaaaatctctctggtttcttggccgcatttttgaaaacggtccacgctgcggcgtgctgcccatcgttgcaattgatgagcagcgcatggaagaccggcgatatgaaaagctcaacgccacgctgaaaaactcaaccatgcaactgaatgatctgttgcaacgcgctggggctggcgagctgtcattcacataccagccggagcaatggccgcgacaggatgtgctggatggctttctcgcaaagctcgttgaagattgtgctgctaagacgcgcttcaagaaaacgatgcctgatctctggacgagcttcggcaagggtgagacgactcttgctggctttgatattcccatcggctggacgaccacaggcgacttcgctcccctgagactgggcgcgacggactccgagcatcatgtactgcttgcggggaagacaggctcgggaaaatccaatctgctccatgttttgattcacacgttatgcgagaaatacccgaccgaggagcttgatctttatctactggattacaaggaatcgactgagttcaatatttacgcaactcccccagtcccacaagcccgccttgtcgctacggaaagtgaccctgaatatggcgtcactgtattaaggcatcttgtggatgaactggaaacgcgtgcacgcatattcaagtcaaaaaatgtcaacgatttcagcgaataccgaaaatcaagcgggatacggttgccacgcgtcctgctagtcatagatgagttccaaattctgttctcagaaagtcgccaggtggcagaagctgctgagcagttgctgtcgaagctcttgaaacaggggcgctcgttcggtattcacatcctcctggctactcagactttgaaaggcatcaacgcacagtcaatcggaagcatcatcacccagttgggatgccgtattgcactggcttgtgggcaggaagactccgcaatgatcctcgggggcgggaattgggcagccgcagagctgcgcagcccacctgaaggcatcatcaacaatgctaatggtgccaaatccggcaatgtgaagttcatgattccattcgccggagaaagtgagcatcgacgtgatttgttgacgaagttgatagcgcgtacatctctttctggggtggctgaaaaaaccaaaatcttcagcggtgcattccttccgcagataccgtctccctttgaatatcagacagcttgtgcgcatgaagaagctcttcttttgggcgaaaacctcgcattcgattcaaaaccgttgacggtatcacttactcgtcgatccgcgttcaatgttctattcagcggctacaatgaccacattcacgatggactcctgtccgctacgctttttagtctgactttcgtcgatggctttgatgaaatcgtgtacttcaacgcgcgcgggatccccccaggaggaggattctcagccgcagcgcagatgctcggtgcacgcctcaagatattcgacgatatatccgagctaccacttcaagcgatatcagacgatattgggaatcgccgcgtagcattgattatcgatggcctggattccgagaaagtactacagccagccccagcgtttagatcgcccaagcctggcgaaccacctaccccggctgacttgttaaagcgtctcgccgaggacggcccaagaaaggggacgtttgtatttatttttgttgaccgttggcagcgctgtgccagtgcctgcaaagaccttttctcctttttcgaattgcgcgtggcgtactgcatgaatgaagacgatgccggatcgcttgtgagtggcggtgttggtaagttcaaaggtattgaaaaaccgagccgagctgtattcgtaaacaaaatgacgaatgacatcacatggttccggccatatgttcaggaaagcactcaatga

SEQ ID NO: 502065 - DNA, 231 bp, Stenotrophomonas maltophilia
atgtttgatgaggcttttggaatggctgcgatgtgtgctggaaaatttcgcgagggagtgcgtgatacgttcggcgcgtccattgttgccgatgtacttgatccgattctcaaggaagtcgattcactctgcattttcaatgctgcttttcagcaacaatcgctcgccattgatcgaactttgaatgacgttcgcgagcttcaattcaaagacagcgggtggaatcaatga

SEQ ID NO: 502066 - DNA, 345 bp, Stenotrophomonas maltophilia
atgaaaatacgtttcgcaattattagccatgaccttctcgcgcaagttcgagctgaggttgatgttctcctgcgtgcagtcaatgtcggaaatatggacggtgtggatgcgtccaccgcacgcctcttggagctgacagttaattgcagatcgattgagttgtccgagcaagagtggcgcgcatttctaagcgaactcagggccaagagcccggagttcgaatcgagctaccttttgcctgggactatttgcgcacccctgtttcccaaagtctcggtagctgaccactatgttctcgaacttccaatcgatggtgatatggaagaggaggaagctgatgtttga

SEQ ID NO: 502067 - DNA, 1311 bp, Stenotrophomonas maltophilia
atggcacaagtttcaattgggcaagtggagaatttggaagacctcgtgcgcgatctgcagtcagtgcgcgaggcgctagaggccgcatgccgcgaacaaattgctgttgcggagcagaaatgcgcagaggctcgtgaagaagcgcagaacagcgcaagcatgttggaaagtgccatccagcaggagcaagccgccacgcaaaatgttgacggcgctgagcaagcgctcgatagcagtcagagctcgctttcttccgccgagtctgcgctatctgcttgccttgctcagccgcacgatgacgatggacgttgcccggactgctccggcgaggactctgccgtggctgaagcagaagccgctgttgagcaggctcagagcatgctggagcaagcaagagcagagcttgaggtggcgaaaggagatcgcatatccatggagcagcgcgtggatcttgcgaatcaggccgaggcgatggcggaacataccctggagcagaccctacaagcatgcaatgcgcacttggcaactgtcgatcaggcgattgaagctggcactgcacgcttgatatccgcgcaacaagcactggatgcttatctcgcgacaaacccgtccgctgcgcaattccatgcttggttgaaatgggaccctgccaaagatggccgccctgtgactccggatatgttgcgagaccgcatgaacctatcgtcagagcagagacgattgcttcaggaatatctttacgaccgtgatccagcgtatcgcaagcaggtcgataaatttcggaaccaatgggtagccgccaagggtgatgcagagcgaaacatcgtcgcacgtaaggcacggatacacctgagcggtgaattcggggagcagatagttcggcacgcacttgcgccacttggcggccggatcgagacgcaagggcgaacctttgtgggcgataacggacgctacacaaaaacagatttgatagtcactgacttgcgggttccggtcattctgggacgtggtgagggcatgggggctcctgtgggaggctcgatggcattcgaagtgaaatgcggcaaggcggaatacctctattcgcagaaagatcacatgatttttcaggccgaagggcacaagcaagcagacgcgcaatgcactctttgctcacgagacatccacgatttgccagaagaaaaacagaaagaactgcgcgatgccctgcgcgaagctggctcaccgatggtgggaatgttgccaaggaaaaatgaaatagatcagtcctgtcttgatttcatccgccaaaacgaggaggagcaaccatga

SEQ ID NO: 502068 - DNA, 270 bp, Stenotrophomonas maltophilia
atggcacaagcaatcggcgatccagaagaacttgagcgcttcgcatattcgttacaacaatttattgattcgctcaacgatgctgtcggcaatcttaacggtgcctttgcttcactcggagacacctggcaagacgaaaagcgggtgcgatttgaggaggattacaacgcgctcgttcagcagttgcaacacttcaacgacaacgcgtctgagcaggttccatatctggcagcgctcgcggcgcggctgcgggattatttgcaaagctaa

SEQ ID NO: 502069 - DNA, 735 bp, Stenotrophomonas maltophilia
atgagcaatatcccattcgacccgtcgaaattcacggcaccgaaagcgaagcctctaccagtcgtgcttcttctcgatgtcagcggcagcatgagcggagagaaaatcagcaatgtgaatgatgccgttcgcgatatgttggatacgttcagcgacaccgagaacggtgaaactgaaatccatgttgcgatcatcactttcggctctcaggtagcgctgcatcagccgcttgccagcgccagcgatattcattggcaggacctttcagctggcggcatgactccgcttggcacggcattgcaaatggccaaagcgatgatcgaagacaaagatgtcattccttcgcgtgcgtatcgtccaacggtcgtattggtctctgatggtgggcctaatgatgcgtgggaaaaacctctgaacgcgtttattagcgacggacgctctgcaaaatgtgaccgtttggcaatggcgataggcgctgatgctgacgaggcggtacttgggaaatttatcgaaggcacctcgaatcgcctcttctacgcagagaacgccaagcagctacgtgacttcttcaagtttgtcaccatgtcggtgaccattcgcacgaagtcacagacgccaaataatgtacctgaagcgagcaccattgacatccagccggccacaatcgaagcacgccaggataaacagaactctgtgacacaaagttcttcgacagaagatggagggtattggtaa

SEQ ID NO: 502070 - DNA, 1779 bp, Stenotrophomonas maltophilia
ttgagcctgttcttcatcgacgcggtggacaaatatcgtcagtacgatgcggacggccagccggtcaagggtgtgtatgcgcagatgttcgaggaggaatatcgccgtgccgccaagttgccggcttaccagagtttgtttgccgagatcgacctggagtccgccgccgaagaagtgcacaacggttatttctccatcgacaagaaaggcggctggactgacaccgccgagaacaatgcgggtaaccgggagaatgccgaacgcgcctacaacctgatcatgaaggagaaggagaagctgctgtccttcggtacgccgctgaagttcatcttctcccactccgccctcaaggaaggctgggacaaccccaacgtgttccagatttgcaccttgcgcgacatccagaccgagcgcgagcgccgccagaccattggccgtggcctgcgtctgtgcgtcaaccaggatggcgagcgggtacgcggctttgaggtcaacaccctgaccgtggtggccacggaaaactacgaacagtttgccgaaaacctgcagaaggaaatcgagaaagacacaggcatccgctttggcatcgtggagcagcaccaatttgccgccattgccgtgactggcgctgatgggcacgccgcaccgctgggcatcgagcaatcaaaggcactgtgggagcacctgaaagccgccggccatatagatgccaaaggcaaggtgcaggattcactgaaaacggcgctgaagaacggcaccttggaactgccggacgagtttgatgcgcaaaaggcccagattgctgaagtgctgcgcaaggtgtcgggccggctcgatatcaaaaatgccgatgaacgcaggcaagtgccgctgcgcaagggcaaggatggcaaggccgtttatctgagtgacgagttcaaggcactgtgggaccgcatcaagcaccaaacaacgtaccgcgtgcagttcgataacgccaagttggtgacggattgcatcgcagcgttgcagaaggccccggtgattgccaaagcacgactgcaatggcgcaaggccgacatctctatcggcaaggcgggtgtcgccgcgacggagaaagcgggcgcggcgaccgtggtgctggacgaggcggatattgagctgccggatttgctgaccgaccttcaggatcgcacccagctcacccggcgcaccatcgtcagcatcctgacgggaagcggtcgcctgaacgacttcaaacgcaatccgcagcagttcatcgaattgactgccgaaaccatcaaccgctgcaagcgcttggccctggtcgatggcatcaagtaccagaagctgggtgaccagcatgtctatgcgcaggagctgttcgagaaggaagagctcaccggctatctcaagaacatgctgctggatacccagaagtcgatctacgagcacgtggtgtacgactcgaccactgagcgggatttcgccgatgggctggagaagaacgacgccatcaagctctacgccaagttgccaggctggttcaaagtgcccacgccgctgggcacctacaaccccgactgggccgtgttggtggaagaagacggcactcagcacctgtattttgtggtggaaaccaagagcagcctgttcaccgacgatatgcgcgacaatgaaagcgccaagatcgaatgcggcaaggcgcatttcactgcgctggagggcggcgagaacccagcccggtatgtggttgcgcgctcggttggtgatcttttgaccgaggcggcaaaggggtag

SEQ ID NO: 502071 - DNA, 1230 bp, Stenotrophomonas maltophilia
atgaaactgcacttcgagcccaacctcgactaccagatgcaggccatcgaggctgtatgcgatcttttccgtggtcaggaggtctgccgcaccgaattcacggtgaccatgaaattgcccgatgacgtgcagatgtcactgggcgtggcgcagtccgaccttggcgttggcaaccgcttgaccctgctcgatgacgagctgctcaagaatctggctgacatccagttgcgcggtggcttgccgccttccagttcgctgacttcgggcgacttcactgtggaaatggagaccggcaccggcaagacctatgtgtatctgcgctcgattttcgagctgaacaaacgctacggcttcaccaagttcgtgatcgtggtgccttcagtggcgatcaaggagggtgtttataaaaccctgcagatcaccgaggaacacttcaaggggctctacgcgggcgtacccttcgattacttcctatacgactccggtaagccggggccggtgcgcaatttcgccacgagctccaacatccagatcatggtggtgacggtgggcgccatcaacaagaaggatgtgaacaacctctacaaagagagcgagaaaaccggcggcgagaagcccatcgacctgatcaaggcaacccggccgataatcatcgtggatgagccgcaaagcgtggacggcggcatggaaggccgtggcaaggaagcactggacgccatgaacccgctctgcacgctgcgctactccgctacccatgtggacaagcaccacatggtatttcgcctcgatgccgtcgatgcctacgagcgcaaactggtcaagcagatcgaggtggcgtcggccacggtagaggacgcgcacaacaggccctttgtgcgcctggtgaaggtggaaaacaagcgcggccgcatcagcgccaaggtcgagctagataaacagaccgccactggtgtgcagcgggctgaagtgacggtcagcgacggcgacgacctccagcagagcgccgatggccgcgcgatctatgccgattttcgcgtcggcgagatcaacacggccaagggcgaagcgttcatggagctgcgctaccccggtggcgaggtgtttttgcaacctggccaagcccacggtgatgtggatgcgcttgccgtgcaacgcgagatgatccgccgcacttcaaggaacacctggacaaggagaagcacctgcgcccgctgggcatcaaggtgttga

SEQ ID NO: 502072 - DNA, 1986 bp, Stenotrophomonas maltophilia
atggaaaaactcacggcagccagccccgaagcccagtccgccgacttggtggcggcaaatatcgaacagctcaaggccctgttcccggaattgattaccgaaggcgcggacggcgtggcggtgaatgtggacgtgctcaaggcgttggtgggtgatgccagcgtgaccgacgccgatgagaagtacggcctcaactggcacggcaaacgccgcgcgcggcaactggcgctgacgcccagcaccggcaccttgcgcccctgcccggaagacagcgtggactgggagaccacccagaacctgatgatcgagggcgacaaccttgaagtgctcaagctgctgcaaaagagctatgccggcaaggttaagctgatttatatcgacccgccgtacaacaccggcaaggattttgtgtacccggacaattttcaggacaacatcaagaactatctggaactgaccggacaggtagaaggtgggcagagaattagcagcaataccgaggccagcgggcggtttcataccgactggctgaatatgatgtatccacgacttaagctggcaaaaaatcttcttctcgatagtggattaataattatctccattgactcttctgaagccactaacttgcggctaattatggacgaagtttttggtcaagagaacttcatcggcttactgccgactatcatgaatctgaaaggcaataacgatgccttcgctttcgcggatactcatgaatttacagttgtttatgctcggaataaagaaaaatgtgtggtttttcaacttccagtgtcagaggaatcgctagatgattggctggaagatgagcgtggcctctacaagcgcgctgacactttaaggcggacagggcaggatgcatcgagggagcgccgtcctaacgggtggtttccagtctttattgacgaaaagggtgaagtctacgcgacgcttgatgatgagcctcgctcaggttcagatttaactctatggccagtttcagaggcaggcgaagagctctcttggacgtggagcaaaaagaaaataaacgatgaaaactttaacttgattgttgttgaaggtaggtcaggaaagaatatctacaaaaaacaacgagccactctcggcgacctcccaaccagcaagcccaaatcgattctctacaagcctgagtacagtagtagtaatggaacggccgaaatttcatcgttgctgggaagcaatgtgttcgatagccctccaaaacctcgctcattaattcgtgactttgtaacaattggtacgtctcctcaggacatcattcttgatttctttgctggaactggaacaactggtcatgcagtaatggcacagaatttcttagatgaaggaaaccgtagatttattcttgttcaactcccccagtatctcgatccggaggataaggggcagaaaaatgcagccgaattctgcgaccagatcaccaagcctcgttctatcgcagaactcactaaagagcgcttacgccacgcaggcaccaagattaaggctgaaagctctggctggcagggcgacaccggcttccgcgtcttcaagctcgacacctccaatatccgcgtctggaatcccaaaccagacgatctggaagccacactattcgaccatcaggatcatctgctcgaaggtcgcagcgaggctgatgtgctttacgaactgctgctcaagttggggctggatctgtgtgtgcccatcgaacagcgcaatatcgaaggccttcacgtccatgccattggcggcggcgtgctgctggcgtgcctggctgagaccatcacccgcgaacaggtagagccgctcgcccagggcatcatcggctggcacaaggcgttggcccctgccggtgacaccacctgcgtgttccgcgacagcgcctttgccgatgacgtggccaaaaccaatctcgcagccattctggagcaacacggcatccagaacgtgcgcagcttgtaa

SEQ ID NO: 502073 - DNA, 816 bp, Stenotrophomonas maltophilia
atgacaatggcaacatcacgcgcgcttcttgatgctttacaactgcccgacagcgcacgggtagaccagcgggttcccaagaagctgttgctggagaacggtgcgcccacggcatccgacaagcgcctgatcacggacgccattgaagaaatccagtggcttgccgcactcaagcccaacaccattggcgtacccagctaccgggacgcgcagcgtgaatacctggaaatcgccgtgctgggcgtgaccctgcgtggtgctgtcaagcccgccagtctcgctcgccttgccgaactggtgcatcgggccgtgccgtatcccgtgttactgctgatggaaggcccggcactgaccctctcgctggcgcacaagcgctgggcgcagaacgaagcgggcaaggtcgtgctcgacggcgacccagcatctgcttcgctgtcccacatcaccgaagatgtcgtccaagatgcggaggcggtggatcgctcaatagccccccaaatcgagcgcgccttcgtgcagtccctgtcgatagcgcgccagccccagaccacgctgcatgccctttatcagggttggatggagcgcgtgtgggccttgcaggcggcacggctgacgggaacctaccaggctgacacaaccccggaacaagcggctgcccgctggcaggcgctggctgattgtgagcggctggagaacgagatcggccgcctgcgagcgcaagccaccaaggaaaaacaactggcgcgccaggtagaactgaacctgacgctcaagcgcatccaggccgaactggccgctgcgcgccgacaactttga

SEQ ID NO: 502074 - DNA, 3234 bp, Stenotrophomonas maltophilia
atgaagctgatccaaaacaccggaacacagcgcgtcatcgacttgatgaggcccaacctcaaacacggcaaccgactcgactgtgtaacgccttcgttttctctctacgccttcgcagaaatccgggaggcgttgtccgctctggatcgagtccaattgatcgtgcctcccgataatgaggcgctcgaactcctgggcacggagggcgaccgcgctgcgcgcaatcgtctgcaggcacgttggctggccaatcagtgcgcgaaatggatcagtggaaaagtagcgctccggcgggcatcgaggtcggtgccacagggggctgctgtcttgcgcagcccggatgggacacctgcacaagtggttctgggctcctttgccttcaacacatctggccttggcctgacgccaggcaatccattgaacctgattcaggcgtcagaaacggccgaggaagccgcgcagctcgcccaatggttcgatcaccagtgggcagccttgcaaactgctgcttcaaccgaccccgagggtcaggaagaagagcacgaatccgttcttgaggcgttgcgagcccttggcgaacaccgtgacccgttcactatctacaccttgatgctgcaccgcctgtttcaggacagcggtgacgagatggacgaggagcgcatcgtcaagtctgccactggcatccgtaataccgtggtgtggaaaaagctctttaagtttcaacgcgatggtgtggtgggtgccatcgacaagctgaaccgctttggcggctgcatcatcgccgacagtgtagggctgggtaaaacctttgaagctctggccatcatcaagtatcacgagctgcgcaacgaccgcgttctggtgctggcgcccaaacgcctgcgcgacaactggacgctctacaaggccaacgacaagcgcaacatccttgcggctgatcggttcaactacgacgtgctcaaccacaccgatttgtcgcgcgatggcggcctgtcgggtgacatcgacctgtctcatgtgaactggggcaactacgacctggtggtgatcgacgagtcgcacaatttccgcaacaaggccacgcacaagggcaaggaatcgcgctacgaccgcctgatgcgacgcatcatccgtgaaggcgtcaagacccgcgtgctgatgctctcggccacgccggtgaacaatcgcctggccgacctgcgcaaccagattgcctttgccaccgaaggcgatgacgccgccctgatggagcatggcatcgccagcatcgaggccacgacccgcaaggcgcaggcgcaattcaatcgctggctggcgctggacgaagctgaaaagacccccagtcagttggtagaaatgctggggttcgactacttcaccctgttggaccatctcaccattgcccgctccaggcggcatgttgagaagtattacggtaccagcgagaccggccgcttccctgacagactgccgcccatcaacatcaaggccgacgtggaccttgcgggcgaattccgtgccatccgcgacatcaaccaggaaatccgtcggctcacgctcgccagctacgcgccgctgcgctatgtgctgccccacaagcaggcggcctacgacgccaaatacagcacccaggtgcgtggcggcgaaggtttcttccgccaggcggatcgtgaggaaagcctgatccacctgctgcgcgtgaacgtgctcaaacgcatggaaagctgtgtatcggccttcaccctgaccgtgcagcgccaactcaaggatgtagagaacacactggcacgcatcgaatcccatgccgaagcactggaggaaatcgacattgccgacgtcgatatcgacgacccggcgttcgaagccttgctggtcggtcgcaaggtcaaggtgctgctgggcgatgtggatctgatccgctggaagcaggatctgctggaagaccgcaaccgcctggcgaccctgctggcggcagcgcgccaagtggatgccgcacgtgatgccaagctggcggccctgcgcgacatgattgcccgcaaatgtgcccagcccatcaacacccacgatggcaaagccaaccgcaagatcatcgtgttcacggccttctcggacacggcgcactatctctacgcccaacttgccccctgggccagggatacgctgggcatacatgcggcggtcgtcaccggcagcgccggcatccaggccacgttgccgggcctgcgcaaaggcatgggcgatgtgctttcggccttcgcgccgcgcgccaaggaacgcccgcaagacatggcgggtgaaggcgagatcgacttgctgatcgccaccgattgcatctccgaagggcagaacctgcaagactgcgactggctgatcaactacgacatccactggaacccggtgcgcatcatccagcgcttcgggcgcatcgaccgcatcggctcgcccaaccagcgcatccagctcgtgaacttctggcccaacatggagctggaggaatacatcaacctggagcagcgcgtcagcggtcgcatggtactgctcgatgtctcggccacgggcgaagaaaacctgatcgagcagcagtccggcaacgccatgaacgacctggagtaccggcgcaagcagctgctcaaattgcaggacacggtcatcgacatggaagacctgtccactggcgtggcgattaccgacctcaccctgaccgacttccgcatcgacctcgcgcagttccttaaaagccaccccggcaagctggacacccagccgctgggggcttttgcggtcaccaccacgctggatgccgacattccccctggcgtgatcttttgcctgcaagcctgcggcccgacggcaaaatccgctgcgtcgtccgactacccgctcgcgccgcactacctggtgcatgtcggcgatgacggccacgtattgttgccctacccgcaggccaagcgcatcctggatcgcctcaagcgcctggcgctggggcgagaacggccggatgacagtgcctgcgcgcgcttcgacaaggcgacaaaaagcggtgaggacatgcgccacgcccagaagctgctggccgccgcggtggcctccgtcgccggcaagcatgaggaacgagccgttgccagcctcttcacacctggcggcacgcacgccatgaagggcgagttcgctggtagtgacgacttcgaggtggtggcatttctggtggtgctgcccgagcatgaagcggcatga

SEQ ID NO: 502075 - DNA, 909 bp, Stenotrophomonas maltophilia
atgccccaccaacagcttgccaatctcacccagccacagcgtgaccgcctcgcgttcgtggaattgcgtctgcgcttcattggggagatgcgccgccaggacttggtcgcgcgttttggtatccagtccgctgccgcgtccagggatctggcgctgtacaaggacttggctccgggcaatatcgactacgacggcaaaggcaagttctacgtcctgggttcgagcttccagccgatcttcgatttcccacccgagcgggtgttgtcgtggctgacccaggggtttggcgacggtgaaccgatgcacatcaaggcgtgggtggccagcgagagcccgtcccggctcactcaccctgacctggcaatcttggcgagcgtcactcgggccattcattacgagtgcccgctcggcatcgagtaccactccatctccagcggtcgcaccgcgcgggagatcgtcccgttcgcgctgatcgacaacggcctgcgctggcacgtgcgcgccttcgaccgcaaatcgcaggagttccgcgatttcgtcctcacccggatcaagcgccctgtggtgcgcaaggggcagcccgtagagtcccacgagatgagcgatcaagacatccagtggacccggattgtcgagctggagctggtccctcatcccgaccagcctcggccagaaatcaccgaaatggactacggcatgcagggtggtgcgctgcacatgaagctgcgcgccgccacggcgggctacatcctgcgcaaatggagtgtggactgttcccccgaccatcgcctgcgcggcccggagtaccggctttggttgaaagaccatctggcgatctacggcgtgcgcaatgcggtgctggcgccggggtatgcgccgccaagcgcagaaacgtcgattgatgactga

SEQ ID NO: 502076 - DNA, 891 bp, Stenotrophomonas maltophilia
atggaactgcgacaccttcgctgctttgtggctctcgcagaagagctgcacttcacacgggccgcagagcgcctgcatatcgaacagccacccttgtcccgcgccatcaaagagcttgaggatgatctgggtgtggtgctcttcgagcgcaaccgccgaggcacggtactgaccgaggcgggagcaacgttcctgcaagatgtgcgcagagtgttcgccgtcctcaaacaggctcaggagaacgtacaggcggtcgctgcgggcctgagcggaagccttcgcattgccgtatccgacggtgcaatcgatcccaggctgtcggccctcctggcccgctgccgcgaggaagagccggagctcgagattcgcctgtcggaagtgccgttagccgatcagttgcgtggtttgcgctcaggcgacttctcgatcgggtttgcgcacacggcggaggtcggcgacggcatcgttaccgagccactctggcacgatccgctggtggttgccgtgcccgcccggcatcctttgctttcacacaaggctgttccgctgcatcagcttgcgatctacccactggtcttatgcgatccgcaggtatgcgaaggctactatcgtgaactggcgcggctgctgcggcctttggagcgtccacccgacgtcgccgagcacgtgtcgtcattggacatgatgctcaccctggtcggtgccggctacggggtaggcttcatcaccgaaaccaggatcgcggcgagcctgcgccccgacgtggtgatccgccctctggccatggattccgcagtcatcacgacctacttgctacggcccgccggcgaggactcgccggtgtcggtggagcgattcatcgcgcgcctgcgcgagcactcgggcgattga

SEQ ID NO: 502077 - DNA, 642 bp, Stenotrophomonas maltophilia
atggacaacctcaccagccaacccgcccacctcaggcttgcgatagcgccaggcgtatcgtcatcgcagctttcggtgctactcgcgctgcaacgtgccgaagaacccgaggtcagcatcgcgttctttgaggttgctggtgacgagttgcttgatggactccgtgaaggccgctatgacgtagggctgtcgcttcaagggtcgagcgatccggccatccaaacccagcccttgtggattgagcacatggccgttgcgataccgctgaggcttcccttgcttgagcaggcatcgctcaccatcgccgacctccagaactatccgatctttcgctgggaggctgagacctgttcttcgctggatcgtcggctgctcgcgcgtctgcctgctgacccgcagaaccttcagtacgtgacttccttcgagatgatggcgctatgggtttctgccggctacggtgtcggggtatccgcacaatcgcgtatcaagcacgcccctggatggggagtcagcatgcgaccactggacgacggcccctacgaaatcgtggcgcacctgcataggccccaggggcaagcgaaccctgtttccgaacggttcgagcgcagggcactgcagatcgcaaaagcgctcccttcctga

SEQ ID NO: 502078 - DNA, 417 bp, Stenotrophomonas maltophilia
atgaagaaccagaagggcttcacccttatcgaactgatgatcgtcgttgcgatcatcgccatcctggccgccatcgccctgccgatgtaccaggactacgttgccaagtcgcaggtcggtgccggcctggctgagatcacccccggcaagaccaacgccgagaccctgatcaacgaaggtctggctgctgacgtcaaggatgtgaccaagattggcctcactgcttcgaccacccgttgcgcgattgctacgaatattgagaccagcggcgctgcgaccatcacctgcacgctcaagggcaatccgaagatcaataacggtaccgtggtgtggactcgcgctgctgccgaaggcacctgggcatgcagcaccactggtggcgctgcagatgacaagtacaagccgaagggctgctaa

SEQ ID NO: 502079 - DNA, 426 bp, Stenotrophomonas maltophilia
atgagatacagggggattgtcgtgaacgagaagggttttacattgatcgagctgatgattgtggttgccatcatcgcgatactcgcgaccgtagcgctgccgatctatcaggcctatgtagccaaagcacagttgggagcggcgctcgctgaaatcagacccggcaagacgacaatcgaggcggtcgtacaagatagtcgtgatagcacgctagtagatccagcttatgttggtatcgcaccctctacgcgctgctctgctgtatctgcccaactggcctctgatggcgtggccaccatcggatgtacactgctcgggggccctgccgtcaacggcaaagacctcatcctccgccgcgcagccgacggcacctggacctgcgacggcagcgccttcgaagcgcgctatcgcccaaccggctgttga

SEQ ID NO: 502080 - DNA, 351 bp, Stenotrophomonas maltophilia
atgcttacgttgcccaggttggacggagaagtgctgaacctggacgcgacgcggtttgatggcccattggccgtttggaccagctactcggcgaccgcggagatcgaagagcgagccatcaatgacgggttggcagtgcccgaaaacgatagcccgctggttgcggtgacagccaccgtggtgccctcgcgcctgtacctgttcgaccaacccggcgcatccagcaccaggcgttatctggtccagggcaaccgcgtggaactgctggatgaacgggacggctgggtgaaactgcgctaccgcaaccccaggcagggtgaggtggtgggctggatcaacgtcagcgattga

SEQ ID NO: 502081 - DNA, 420 bp, Stenotrophomonas maltophilia
atgtcctggacgatcaatgtaacgaccgatgcgaaggagttcttggatggactcactgccgacgaaaaggtggaagtgttcgcaactatcaagctgctcagcgaggtggggccggcattgcgtcgtcccgcctcaggaactctgcgtgacagtgacctgtccaacctgaaagagctccgcatccgttttgagcgtaaacagttccgcatcatctatgcgttcgactctgaacagaatgcaattctgctcgtcggtggtgacaaggtcccacttggcgagaagctctggtaccccaaatacattgccagagcgaagaagctctacgaggcgcatgaagccgagattgagttgaggcgccgacaagctactcacagtcctcgtgggaaggtggccaaacgtggaaagaagcaggggaagtaa

SEQ ID NO: 502082 - DNA, 579 bp, Stenotrophomonas maltophilia
atgagaactagccccttacaggttggaaaggtcacttacacggatgtgaacatccgtgctacgcctaatgtcgaagctgccgcgattgagcgcgacctgccgatcgagatcgaggccgctgtgttctactcagcgaatgggcagcatttcgccacattgactgtgacccagaaggatgagcaattcgcgtacacgatagaagtgtctgcattcgctccattcaccattgatgtcgttggttgtgccgaggcttacaagactgcctttaatccaggtgtagtcggtgtaaacgtggtccgtgtgatctactcctcagtgagggacatgatcgcaggcgtgacggcgcgcgcgccgtgggagatcgcgtgcatgcccaccatgatcatcgagcctcgcgacattagcctgaactatgagcaggacggccgagaggagatccttcgatctcagtttggaatgacggacgagaagattgatgagctgaataaggcaagggcagctcagaaggctagtgcccagaagccctctgctcagaggtcaaagcgtaggatgccctcagtaccggctcagtccgaatag

SEQ ID NO: 502083 - DNA, 1155 bp, Stenotrophomonas maltophilia
atggcacctcgaccgcgaaaacacaatccatccatcccgtcacacatcgaccagacgaagatccccaagggcgtttactgggatgcgacgggccgtggccgctggtacatcttcgaagccacgactggcatcgatggcccccggaaaactcgccgaacggtcgcgggtcccgaagccaagctctccgaattgcatggcctcatggagtcagcagaaggcaccggaactgtggaatgggtctgcactcagtaccacgacagtgccaagttcaaggggctcgcggctggcacgcgtgcggactacgagtcggcgcgtaatgtcctagtgggctaccccacgaacctgggcgtgccgttcggcaagctccaagtcaacaaactacggaatcacaatttccagcgccttattgatcggattgaatcggcaggcacacccacgaaagcaaacaaggtgctgcgctactcacggctcgttttccgctgggcattgaatcggggcatcgtgaaccacaaccccgcgcagggcctggaacaggcgaaggagcgcaagcggcagcgactgcccaccgatgatgcatacatcaagctgcttaaattcgcacaggagcgcagccagcgaccagcgagaactgagggctcggtgccacagtatctatggatgatcatggagctgggctacctctgtcggttgcgtggcattgagaccctcaccctgaccgaagcacaagggacggccgagggcttgcacaccaatcgacggaagcgcagccgggataatctggtggaatggacgccgcgactgcgtagcgcctgggatgctgccattgcgcgccgcgacggcatcatcaagcaccacgggctgcccgtgcagcttcgcgccgacctgcgcttccttttcctcgcagaacacggcgagccgctgcagaagacgagcctggacagcacctggcagcgcttcatccaactagcgatcagcgccggggtcatctcggtcgaggagcgcttcagcctccacgacctcaagcgaaagggcggtaccgacacggctggcaaccgcgctgaacgccaggacgcactaggcgtgaccgatgcgatgatgaaggtctacgacaagagcgttccacgcgtaaagccttcaacgatcaaagatctctag

SEQ ID NO: 502084 - DNA, 402 bp, Stenotrophomonas maltophilia
atgagccgccgccagcacgccaacaacggcatggccgccggtggccgtccgattcgcatcccccgctcgatcgacagcgtgcgctcgcacctcaagcgccacctactggaggaaggcaagcgcatgcaggacctggcagaggtctggggctgctcgaagcacaacgtctacgacctgttctaccgcgaccggcccatctcgccgaaccacatcgagctcgccgcgaagatgctcggcctggacgagttcgacaccaacgaactgcgcctgcttggggcccgcgaggccggctggcacatcgttatccgcccaggggagcacgtgcgtggcaccaggttctccatccgggcgcccgacagcgttccctgcaaccaatgcaagaaggggcccgaccatggctga

SEQ ID NO: 502085 - DNA, 219 bp, Stenotrophomonas maltophilia
atgaagccagagatcaagagtgattcgttgagcaccagctactacggccaagacatctacgtcgaggcttggcaaccggaaggcgggaaggcatttgtgcaccttgtacaagccggtgagctccctgatatcgacaaacccgactgcggggagcacgacacgctcgaacaggcgctgcacgctggtctgcggtttgcgactaccttgatcgacaactag

SEQ ID NO: 502086 - DNA, 1983 bp, Stenotrophomonas maltophilia
atggctgacggttcccgctccttcaacttcccgccgccacaggtctcccgcctgcgccccggcgagatcgtcgtggatctgttcgccggcggtggcggcgcatcggaagggcttaagcaggccatcggcatcgatcccgccctcgcctacaaccacgacgagctggccatcggcatgcacgccgccaatcacccgctgacccagcaccaccgcgaggatatctggcacgccgacccgcgcgtggacgtggccggccggcccatcggctggttccacgcctcgccggactgcacgcacttcagccaggccaagggcggccagccgcgcagccgcaagacccgcgcactgtcttgggtggtactgaagtgggttggccagctgctgcgtgctgatcggctgcacgggaccaacaccgcgccgcgcatcatctccatggagaacgtgtggcagatcctgacctggggtccgctggtggcaaagcgctgctccaggaccggccgggtgatcaccctggacttggtccaggccgtgcatccggagtcgggaaagccgatgttccggcgtggcaagccggtcatggtcaaccgagtcgccaacaagggcgagcgggtgcccgtcgagcgccaggctcttgtcccccacaagcgctacagcggccgcacttggctgcagttcgtcgcagcactgcgggcgctgggctacgcggtggagtggcgcaagctggtggccagcgattacggcgccggcaccagccgcgaacgcctgttcctgctcggccgccgcgatggccagcccatcgtgtggcccgagccgacccatgggccagccccgggacagaagccgcgcgtgactgctgctgactgcctggacttctcgattccctgcccgtccatctttactcgggaccggccgctggccgacgccaccatgcgccgcatcgccaagggcgtgatgcggcacgtcatcaactcagccgatcccttcatcgtccctgcaacgcaccagggcggcgatcgcgtgcatagcgtgcgcgaccccatgcgcactatcaccgccgccaatcgcggcgagctgatgctggtggcgcccgagctggcgccgttcctcaccgagcatgccaacgcaagccgtcagcggacgatggcagcgggcgagccacttcctaccgtctgcgccggggtgaagggtgggcacttttcggtggtatccccgacacttgtccagaccggctatggcgagcgcgagggccaggcccctcgtgcgctggatctgcagcagccgctgggcacgattgtcgcgggcggtgtaaagcacgctgtggccgcgccgcatctggtgaagttccgcggcgacagcatcggcaggggcgccaccgagccggtgccaacgatcacttctggtgctggtgccgcgcgcccagcgggcgccgcgcatgcccttggcgtgtcctcggctttcatggtgcaggccgcgcacggcgaaggtcggccggatggccccaagcgctggggtactggcagcaaagatgcccggtcaccagtcggcacggtcatggccagtggcaacggcgggcatgccctgccagaggccgagctggcccagctgtcgcccgagcaagaggcaggcgccctgcgtgtggcagcgttcttggtgaagtactacggcagcggcatcgccgtgaatctgcacgatcccgtggacaccgtgaccaccaaggatcgcctagcgctggtcacggtggtgatcaagggcacgccctacgtcatcgtggatatcggcctgcgcatgctcaagccgcacgagctgttccgtgcgcagggcttcccggtgacctacatcatcgaccgcaccgccgacggcacagtgttgaagaccacggcccaggtccgcatgtgcggaaacagcgtcagcccgccaccgttctacgcgttgatcgccgccaacctagacccggtggccttgccgctggcggaggccgcatga

SEQ ID NO: 502087 - DNA, 699 bp, Stenotrophomonas maltophilia
atgaccgagaaacttgccactctccccacgaactgccccgttctgcgcgacgcattcgaaacgatcagcgcgctcgctgtcgaggctgtgtggctgcccaaccaagcaaaggccatcaccctcggccaggctcaaaccgcgctgcgggatctgcaccaccgcctgccacgcttgcaggatctgcgcgtattcgaaaccgccgtcaccgcctatcgcgccaccctgcgcagcagcatgcaggatggcgacacgcctctctgcgatacgacccgcgcccggctggcgcaggccgacgaactgctggagctggtcaggaatcagagccgcactgtcatcgatcctgcggacccgtggcgcggcctgtaccacccgagtcgcctcccggcgcgcaacgccgacggcgagatcctgtgccacccggacgtgcccaagtgggctgacggtcgcgaggtgtcgctacggccgttgttcctcgcacagggattcgacctgcaggtgacgtttggcgacttcaccgaagaagccgtggagaccggggaccatcgctactgggatgagatgcgcgcgtggcagcccactggccccggcgcagattggcgcttggtctggctgggtgataccgaagatggcccagcggcatggttcgtgcggccgcttgcagctgaggcgcttgtcgcctgggaggcagcacatggctga

SEQ ID NO: 502088 - DNA, 393 bp, Stenotrophomonas maltophilia
atgagcagcgaatcccaccccgcgaccgccaccgaacccggcaggcccggcagtacctattccgatggccccgtctggcgcgccttcggcctcagccgcgccgcctatcacgtggtgccgcgacgcaccctgcaatcgatgccggtcgagtggcaggcgcgctttgtcgcgctgatcgaggaagcacgcgaagtgcttccggatgaggctttcactgagtaccaggtgattcgcatcgacgccggccggttcgcctccgacccgaaccggcgctatcgccatgccgcgcccttcccccttcgctccgctggcgccgagcaagcgtcccaggtagtgccgctcgctggcgcgttcgtcaacaccgacacccaattcaagcaggcccgccgatga

SEQ ID NO: 502089 - DNA, 489 bp, Stenotrophomonas maltophilia
atgagcgcccgcccgcaacagatcggccgggccgccgaagtgcgcaaggtcctgtccatgttcccgcaaggcgctacggtcgaacagatcaagaccgctggtcgcatcaacagcacgcaccaggctatcggctacacgttgaaggggttggcgcgcagcggccaggccatctgtcaccgctcgggcgtgcgcgggatctggcgcctctccagccacacgcaacatgcgatcgcgccgctgcgcgcggtacctgcgcgggagcgaccgacctgcgtggtaggtccgctcaccggcgtcagtgacgcggcgaccacgattcgtcacagggaactcgaccggcagcagttagccgacgacctggacgccttcctcgcagcgggcgggcacatcgaggtgctcgggcacaccccacttcgcccgctgatgagccggcacaccgccaaccacggcagctatgcagagcgcatggcagcccatgagatggactga

SEQ ID NO: 502090 - DNA, 240 bp, Stenotrophomonas maltophilia
atgaaccgctctgttgtcatctatgggccgcaacgctgcggcaagacctccaacgcacaggaactgcgcacgcactttggcctgcgtgaggtactggacgactgggacggccacaccgcgtatccactggaggacacgctcgtcctgaccaacaatccggatgccgttgctcaccactcatcgcgtgtcctgcaccacggctgggcaatgcgcgaaatgctcgcggaggcccgcgcatga

SEQ ID NO: 502091 - DNA, 327 bp, Stenotrophomonas maltophilia
atgagcgtgcaacccactctgccagtggagcagcaattcgccaccggccatcagggcgagtcactcgtattgatggtctgccagggctggctatgggccggcctctacaccgccgcgccgcgcgagtcgctcctgaaggtcgccgccagcgccagccggagcgtgggggtatcgcaccactcgctcaccctcggcggcgtctcgttttccctcaaccgacttgccgcccaggccgcgcaccgctggctcgaccgccaaggcgtgcgtgttcgttcgatctcccccaacaaccgcgctacgcgccgcacgcgaggaatcgccgcatga

SEQ ID NO: 502092 - DNA, 1686 bp, Stenotrophomonas maltophilia
atggcagataatcactacgacgccattgttgttggctcgggaatcagtggcggctgggcagcgaaggagctgaccgagaagggcctgaaggtcctgatgctggaacgcgggcgcaacatcgagcacgtcaaggactacgtcaacgcgatgaaggaagcgtgggatttcccgcatcgcaaccggccgacgcaggcgatgaaggccgcgttcccggtgctgatgcgcgactacggcctggccgagaacctggaaggaatgtgggccaacgagcaggactcgccctacatcgagaccaagcgctttgactggttccgtggctaccacgtgggcgggcgctcgctgatgtggggccggcagagctatcggttttccgacctggacttcgaagccaacctcaaggatggcattgccaccgattggccgatccgctatgccgacatcgcgccgtggtacgaccatgtagagaagttcgccggcatcgccggcacgcgcgaaggactggacgtgctcccggacggcgagttcctgccgccgatcccgttgaacatcgtcgagaaggacgtggccgcgcggatcaagaaggcctttggcggaacgcggcacatgatccactcgcgcacggccaacatcacccagccgatgcccgagcaggggcgcgtgaactgccagtaccgcaacaagtgcatcctgggctgtcccttcggtgcctacttctcgacccagtcggcgacgctgccggcggcgatgaagaccggcaacctgacgctgcggccgttctcgatcgtcaaggaagtgctctacgacaaggaccgcaagcgtgcgcgtggcgtggaggtgatcgacgccgaaaccgggcagacctaccagtacaccgccaaggtcatcttcctcaacgcatcgtcgttcaactccacctggctgctgatgaattcggcgaccgacgtctgggacggggggctgggttcttcgtcgggcgagctggggcacaacgtgatggaccatcatttcggtgcgggcgcctcgggccgggtcgagggctacgaagacaagtactatttcggccgccggccctgcggcttctacattccgcgtttccgcaatgtcgcgtccgacaagcgcggctacctgcgcgggttcggttaccagggcggtgccagccgcaccggctggtcgcgcgagatcgccgagctgaacatcggtgccgatctgaaggaggcgctgacggtgccgggtgactggcgcatcggcatgaccgggttcggtgaaatgctgccgcaccacgacaatgcgatccgcctggaccgcgaccgcaaggacaagtgggggctgccggtgctggcgatggatgtgtccatgcgtgccaacgaactggcgatgcgcaaggacatggccgccgatgccgccgagatgctggaggcggccggggtcaaggacgtgaagatgcacgacaacgactacgccccgggcaagggcatccatgagatggggaccgcgcgcatgggacgtgatcggaagagttcggtactgaacgcgcacaaccaggtctgggatgcgcccaacgtctacgtcaccgacggtgcctgcatgacctccagcgcctgcgtgaatccctcgttgacctacatggcgctgaccgcgcgcgcggccgaccatgcggtgcgcgaactgaaagcggggaacctgtga

SEQ ID NO: 502093 - DNA, 510 bp, Stenotrophomonas maltophilia
atgtcgcaactgtccttttcctcgttcgatgatgctttgctggtgcgtgactctcacgggcgctatgccctggcgtctgcggatcagattctggaagccgcgcgcctggtcattgaccagaagatgcagcgtggtacttcgttcacttcaccggcggccgtcaaggagtacctgtttgccaagctgtccggcttcgagcatgaggtgttcgcggtgctgttcatggacacgcagcatcggctgatcgaatacagggagatgttccacggcacgatcgactcggccgaagtgcatccgcgtgaagtggtcaaggaggcgcttcggctcaacgcggcggcgctggtcatcagccacaaccacccgagcggaaatcccgagccaagcgcagccgacagggtgctgacgaagcggcttcgggaggcgttgtcgatggtggatgtgcgcgtactggatcacatcatcgtcggcggcacgaaaacgacatcatttgccgaacgtggcctgatctga

SEQ ID NO: 502094 - DNA, 924 bp, Stenotrophomonas maltophilia
atgatttctgacattaatggtgagcctgattcaccatcgaacgatgcgcgcctgccttcgctgctcgcgctgcgctgcttcgaggcggcggcccggctggagaacttcagccacgcggccaacgaactgcacctgacccacggcgcggtcagccgcgccgtgcgcctgctcgaagacgagctgggcgtggccctgttcgagcggcgcagccggcgcgtgttcctgaccgatgccggccgcaccctggcgcgggccgtgggcaacgggctggatctgatgcgccaggccgtcggcgagctgcgcgccagcgcccgccaggggcggcgctgggtgctgtcgtgcgagccaacgctgctgatgcgctggctgatcccgcgctggccagccttccaggcccggcatccagggatcgacgtgcatctggtcgccggcggcgggccgttctccttcgccagcggcatcgacctggccatccgccgcgacgacttcccctggcccgagggctaccacgccgaatctctgttcgcggaaaaggtcggcccggtctgccgaccggacaaggtggcgacctggttctccacgaaaaaggccagcgccgcgctcaagaccggcgcgccgcgcttgcattcgcgcacgcggccgggcgcatggtcggaatgggcggtagccgcaggccagcccgtacaggatgcggcgggacaaaccttcgagcacttctatttcagcttgcaggcggccgtggccggcctgggcgtggcaatcggcccgtggcatctggtgcgcgacgaccttgacagcggtgtgctgactgcgccgctgggctttgtcgaggacggttcgcgctactgcctgctgtcgccgcagcccttgcagcccgacggcccgcaggccgatttgctggactggctgcgggcgatggcatag

SEQ ID NO: 502095 - DNA, 618 bp, Stenotrophomonas maltophilia
atgaccgaactgatagctgtcatcacaatcaccttgctggccgtcatcagccctgggccggactttgcgatggtcacgcgcaacagcctgatgctgtcgcgccgcgccggtgtgctgacggccctgggcatcggcctgggcgtgctcgtccacgtcacctatacgctggtcggcgtgggcctgctgatccagcagtcgttgtggctgttcaacgccatcaagctggtcggtgccgtctatctgatctatctcggcgtgaagatgctgcgggccaagcctgccggcccgctggctgacagcaccgtggcgtcgctgtcggatgcggcggcgctgcgcaccggcttcctgaccaatgcgctgaatccgaagaccacggtgttcatcgttagcctgttcatgcaggtggtacggccggacacgccgctggcggtgcagatcggctacggcgcgttcatctcggtggcgcacatggcctggttcagcctggtggccttgtgcttctccgccggcgccgtgcgcgatcggctgctggccgtgcgccactggatcgaccgcgccttcggtgggctgctggtcggtttcggtgtcctgttggcggtagcgcgcggatcgcgctga

SEQ ID NO: 502096 - DNA, 387 bp, Stenotrophomonas maltophilia
atgaacgacaaatcgcacgttttcctcgaacaacacgtttgcctggtctgcggcgctcgcttcgacaccggcgccatcctgctggacaagcgcctgcgcgcgagcatggagcgccacacggcgacaggctggggcttgtgccctgaacatcagaagctgtccgacgatggctttgtcgcgctggtcgaatgcgatccgcagcgcagccgcgctgcggcgggcgccgctcgcatgaagcccgatcaggcgcatcggactggtcgcctggcgcacctgaaacgcgaggtgttcgccgatgtgttcaatgtgccgatcgaggacaagcagccatgcgtgttcgttgaacccggcgtgatcgagcagttgcaggcgatgaccgcgcactga

SEQ ID NO: 502097 - DNA, 279 bp, Stenotrophomonas maltophilia
atgagcagccatcacgattgggtcatcgaagtctcggtgcagcacgacgcgcgcaagccgttcgcgccggagaacggtcaaccgctgcgcttcaaggtcggcgatgcggtgatctacaccaatgacttcggcgtgcagttccatcgccgcgtcaccgggttctatcggcctgccgggccttgcgggctgtacgcgctcggccggcgctacttcatcaattcgacctcgccctggatgccggtcgcggaatccagcctgcgccctgacgacgcgggttga

SEQ ID NO: 502098 - DNA, 240 bp, Stenotrophomonas maltophilia
atggtctggacgaccgaccgcgcgacagtcgcagcggagaagaaacgcctccttgccctgcatcagcagctcaatgccgtggtgaacaacgcgcaccatgccgacgaatgcgccacctggcacatgatggccgaggcatcgctgttccagttggatcacgacattgacgcgctattcgactggctggaagccaacgaacgcggagtacggcgagagcgcccggacaggatgtacgactga

SEQ ID NO: 502099 - DNA, 831 bp, Stenotrophomonas maltophilia
atgcaactcgcatcccgtttcgcttcccgctccccttcgctgcgcagcgactacccgctgtccgatgaccagattcaccgcgtggccccgtccatcttcgcggatgccccgcacgaaagccgctcgcagcggtacgcctatatctccaccgccgccgtgctggccgagcttcgcaaagaaggattccagcccttcatggtgacgcaaacccgcgtgcgcgacgaaggcaagcgcgagcacaccaaacacatgctgcgcctgcggcacgcgagccagatcaacggagcggaagccaatgaaatcgtgttgttgaactcgcacgatggcaccagcagctatcagatgctggccggcatgttccggttcgtgtgcagcaatagccttgtgtgcggcgacaccgtggccgatgtgcgcgtgccccacaaaggcgacgtttccgggcatgtcatcgaaggcgcttacgaagtcttgcgcggtttcgaccgggtgaaggattcccgcgatgccatgcgcgcgatcaccttggatgaaggcgaagccgaagtgttcgcccgttccgcgctggctctcaagtacgaccctaccgacaacaagcccgcgcccatcaccgaatcacaaatcctgatgccgcgccggttcgacgaccgccgcccggacttgtggagcgtgttcaaccgcacccaagaaaacctgaccaaaggtggattgcatgggcgcagcgccaacggtcgccgccagcaaacccgcccggtgcagggcattgattccgatgtgcgcctcaatcgcgccctctggatgctggccgatggcctgcgccagttgaaagcctga

SEQ ID NO: 502100 - DNA, 2064 bp, Stenotrophomonas maltophilia
atgaacgccattacccaaaccgaagcccgcgccatccaagcccctgcgctggaagcagccgacccgaccaagaatctgattctggttccgctgtcgcggctggtgtcgcgcgcgaccgggcgcaacgtgcgcaagaccccgcgcatgtccattcccgaactggccgcatccatccagcgtgtgggcctgctgcaaaacctgatcgtgatcgccgccgccgatggcgagcattacgaagtggtcgccggtggccgacgcctcgccgcgttgaagctgctggcgaagaagcaccgcatcagcaaggaatgggacgtgccttgcctgctggtggccgatggcaccgcccgcacggccagcctgaccgagaacgtgcagcgcgaagccatgcaccccgccgaccagttcgaggcattcgccgcgctggtggccgaaggccgacccatcgaggacatagcggcagatttcagcgtgtccccgctggtggtgcagcgccgcttgaagctggcgaacgtctcgccccggctgctggccgactaccgcgccgaagccgtgacgctcgatcagttgatggcccttgccatcaccgacgatcacgccgcgcaggaggccgcgttctacgatgcgccgacatggcagcgcagcccgcacaacctgcgcgaccgcctgaccgaacgggaaatcgacgcctaccggcatccgctggtgcgtttcgtcgggctggacggctaccagcaggcaggcggcggcatccgccgcgacctgttcgcggaaggcgacaagggcgtgtatctgaccgatgccgcgctgctggaacggctggcgcaagacaagctggcaggcatcgccgccgaggtgcaggccgagggttgggcttgggtggatgccacgccgagcatgacccatgccgacctgcaagccttccagagtgcgccgagggaacgccgcagcccgaacaagcgcgacgcgcagcgtatcgagaagctgcaagccaagatgcaggaagtggccgaagccgtggatgccgcgctggacgacgaggacgaggaaaaggccgatgccttgcaggaggaaggcgagcgcctgggcgagcagttgcaggcgctggaagatggcttgctggactatgcggccaacgtgaaggccgcagccggtgccatcgtcagcatcgaccgcgacgggcaggccgtgattcatcgcgggctgctgcgcgaagccgaggccaaggcgctgcgcacgctggaacggctgcgccacgggttcggcagcgaaggcgaagccgacaacgacgacgaaggagaggaagcggacaacgcccccaagaccgccgccatgtccgaccgactggcgcagcggttgagtgcccaccgtaccgccgcgctgcaaatcgaagtcgcccggcatccgcaagccgcgctggccgccgtggtacatggcatggtgcagaccgtcttgcaggaaagctactacggccacgatctgccgctgggtgtgagcctgaaacagcaagaccggctcgaaagccttgccccggacgtgtcggaatcgcctgccgccgtggcgctgcgcaccttgcaggaagtcgcgggcgaagccttgccggaggacagcgccgaactgttcgccgcgctgctggcgaagccgcaggatgaactggtgcgcctgttggccgtgtgcgtggcgtccacggtggacgtggtgacgccccgcgctacgccgcaccagcccggcgcagaactggcgcaagcggtggggctggacatggcggcatggtggaagccgaccgcagacggttacttccagcatgtgccgaaggccgcgattctggaagccgtggaacagtacgccccggcgcacgtcacccggctggcgaagttgaagaaggccgacattgccagcgaagccgaacggctggccgatggcaccggctggatgcccgccatcttctgcgccgaagccccgcagcaggacgcgcaggaggtggtgacggacgaggaagccgaacagccggaggaagtcgccgccatggcggatgagcagccgcaggccgaggcactggccgcgtga

SEQ ID NO: 502101 - DNA, 210 bp, Stenotrophomonas maltophilia
atgagccacgacaccacgaaccgcccccgcatggccgcgacctacgcccccggaacggtacgcgcccgccgctggcatggcgatggcgacgtgcgcggctaccgtccgcctcgcggctggacggcgcgcgccgacctgacagacctgcatcccatcacgggccgcgccttgccgcgtgccgtgtggtggatcatcgaaaccaaagaatag

SEQ ID NO: 502102 - DNA, 315 bp, Stenotrophomonas maltophilia
atggcaaacatcggcaccttcaccgcagagaaagacggcttcaccggcacgcttcgcaccctgaccctcaacgtcaaggtcaagctggttgccaacgacaaaggcgagaacgaaaacgcccccgacttccgccttcaggcggccggccacgacatcggcgcggggtggaagaagaccagcgaagccgggcggccctacgtgtcagtgtccctcgacgatccttcgttcccggcgacggtctatgcccgcctgatcgagaacgaggacggcacgcacgacctgatctggtcgcgcagcaagcccaaggcggcctga

SEQ ID NO: 502103 - DNA, 141 bp, Stenotrophomonas maltophilia
atgctgctgatcgcagcgccgcacgcacagggtttcggcagttgtctcatgcgccgcatgttcagggccggcatcgcatcggtgatggtcgaatggctcgaagcccgtggcgacaagcgcaagatggcgtgtcggcgctga

SEQ ID NO: 502104 - DNA, 351 bp, Stenotrophomonas maltophilia
atgaccctgccacttgtcaccgctgacgaacgtgcccggctgctcgcccacggagcggcgctcgccgctggccagcacctcgacccgctgcccgtagtgcggctgttcacccccgacgcgcatgtgacctggctgctggtgtcgctcgaccctgcggatgacgacacggcctacgggctgatcgacctcggtatcgggatgccctcgctgggcacggtcaagctctccgacctagccggcatcgtcggcccgcgcaagctgccggtgcggcgggatcggtatttccaggcgctgcgcccactgtcggagtacgtccggctggcgcaggagaacggcgcgatcacggactga

SEQ ID NO: 502105 - DNA, 768 bp, Stenotrophomonas maltophilia
atgactgatcgcagcgccgaacactggtatccgacagcggcttatctctacgtcctgcacctcgacggccccgcactggcgtgggaatacttgcgccgaaaccccggctaccgccgcgactggcggcgccgtcgccggcggccggacgcggcgctggcttggggcctgcgcctgctggaagatcccgctctggatgcgcgcgacgcgcatccggcctggttccccgatcatgatgccgtggtgcagcttgttcccgatgccgacccgccgcccgaagccgctgccttcgagttctggcgcgtgcctggccgcaagcaactgatccatgatggcaagcgcctggtgctggtgtcgcactggcccggctgctgcctgcggctcgcgctcgcgcccggcctggaagacggcatggcctacctgtacgccacccgtgcctgcgccgcgccttgcgcgcgctaccgcacgctggcgaccgagctggatgcgctgtccgccgcgaccgtggccgcgcctgcggcagcggcgcgctcccggcccacgccggccgcggtgctggaactgcacaccttgcaggcgctcgacgcgaccctggcgggcgcgtccttgcgcgaagtcgccgaaggactgttcggcgcggatgccgtcgtggccgactggcacaaggacagcgccttgcgtgcccgcgtgcggcggctggtcaggcgtggcgaggcgctgatgcgcggcggctatcgcagtctggcgcaggtctcgccagttgcatcgtag

SEQ ID NO: 502106 - DNA, 285 bp, Stenotrophomonas maltophilia
atgcgacccgctcccttgcggcctgccgccgctgctgtccctgcgcccgcgcagccccaacgctacctgaccaacgacgaggccgccgactacctgcgcctgtcgccgcgcacgctggagaagcagcgcgtgatcggcggtggcccgaagttccgcaagttcggccgccgcgtcatgtatgcggtgagcgacctcgacgcctgggccgatgcgcgcagctacgcggccacttccgacccggaatatgccgaacggcatgcgggcgactaccgtgacggccgctga

SEQ ID NO: 502107 - DNA, 639 bp, Stenotrophomonas maltophilia
atgatccttgctctgctcaaccagaaaggcggcgtcggcaagaccacgctcgccacgcacatcgccggcgagctggcgatgcgcggccagcacgtcatcctgctcgatgccgacccgcagggttcatcgctggattggacgcagcgcagaagtcagcaaggcttgccgcggctgttcagcgccgtcggcctcgcccgcgaaacgctgcatcaggaagcgccagaactcgccaggcgggccgatcacgtcatcatcgacggcccgccgcgcatcgcggccttggcgcgctccgcactgctggcggccgagcgcgtgctgatcccggtgcagcccagcccctacgacgtgtgggccagcgccgagatggtttcgctgatccgcgaggcacaggtgttccggcctgcgctgcgcgcggccttcgtcatcaatcggcgcgtcagcaccaccatcatcgggcgtgaggcacggcaatcgctggccgaacagccgttgcccgcgctgcgctcggaggtgcatcagcgcatcgtgttcgccgacagcgtggccgctggccggctcgcccgcgagacagcgcccgacagcgccgccgcccgcgaaatcaccgccctggtggatgaactgctgcggtggccgacatga

SEQ ID NO: 502108 - DNA, 1971 bp, Stenotrophomonas maltophilia
atgaaccagcgcggaaactcccccggtgacgaccatttccgcatccggcccggcaagcccaagcagcgcggcgacacctttgtttcgcaggtgctgcgccaggccggcaaggcggccaacgcgaccggcggcaagcggggcaaggcgcccggttcacgcctgggacgcggccatgtggcggcccgcttcaccggccagtcgctgacggcaaactcacgccgcgccacggtcaaggtgcggctggtgtatctccagcaggccagcggccgctccaccgtccagcacctgcgctacatcgagcgcgagggcgtggacaggcagggcgggccgggccatgcctacgggccggcgaccgacgaggccgacaccgccgccttcgaggaacgcggccggggcgaccgccatcaattccgcttcatcgtctcccccgaagacgcggaacaactcgacgacctgcgcacctacacccggcacctgatgcaacggatggaggccgacctgggcacgcgactggactgggtggcggtcgatcactggaacaccgacaacccgcacacccacgtcgtgctgcgcggcaaggacgacaccggcaaggatctgatcgtctcgcaggactacatcacgcgcggcatgcgcgagcgggcgatggaactggcgaccgagtggctggggccgcgcaccgagctggagatacagcgtaccctggcccgcgaggtggaacaggagcgatggacaagcctggatcgcaccttgcagcgtgaagccgtcgatggcctggttcacacggaacggcttgccgaacccaggctgcaacgccggcgcctgctgctcgtcggtcgcctgcaacacttgcagcgcatgggactggcgacggaaacggcgccgggcacctgggccattcatgcagaagctgaatccaccctgcgggcgatggccgagcgcggcgacatcatccgcaccatgcagcgggcgatgggcggcaggcagcgcgagctggccgtgttccagcccggccaggacgatggcgaaaacggccacaccatcgtgggccgtgtcgcaggcaaagggctggccgacgagttgtacgaccgaggctatctggtcatcgacggcgtggacggcaaggcgcactacgtggcgctgccgccgcgcaccgagctggagcagtacccggccggcgccatcgtggaagtgaagggttcgaccgaggttcgcgccgccgacaagaacatcgccgcgctggcgagtgatggcctgtaccgtgccgaccatcaccttgccatcgaacagggccgggccaagcccggacgcgacccgcaggaggttgtcgccgcccacgtccgccggctggaagccctgcgccgggccggcatcgtggagcgcgtggccgaagggctatggaaggtgccagacgatctggccgagcgtggtcgccagtacgacgcgcagcgcctgggtggcgtggcggtggagctgaaatcgcatctgtccatcgagcggcaggcccgcgtcatcggcgcgacctggcttgaccagcaactgatcggcggcgaccgtgggctgggcgacctgggctttggcggcgaggccaagcaggccatccagcagcgcgccgacttcctggccgaacaggggctggccgagcggcgcgggcagcgcatcatcctggcgcgcaacctgcttggcacgctgcgcaaccgggaactggcgcaggccgccaaggacattgccgccgaaaccggactggcgcatcgcccggcggcggatgggcagcgggtcgccggtatctaccggcgctcggtcatgctggcgagcgggcgctacgcgatgctcgatgacggcatggggttcagcctggtgccgtggcgacccgtgatcgagccacggttggggcagcagatcgcggcgacggtgcgtggcggcggggtgtcgtgggagatcggaaggcagcgagggccgacagttggatga

SEQ ID NO: 502109 - DNA, 495 bp, Stenotrophomonas maltophilia
atgtcgaagtcaggggtctatgcgcacttcggcagcaagaatcaggtcttcgaagaactgttgatggcagccttgcctacgacggaagattctttcagcgtgtttctgtccgaggccaatggctcgatccaggagatagcagaggcctacatcgacaagctctatgcacgcctggacagtccgcttgccgttccgaccttccagttgctgatcgcggagagcaagcgggtacccggcctcatcgaacgatggcacgccaacatcctgttgaagatgcgcgcgagttcgcaggccttggtcgacgaatgcgtacgccggggagtgatccgtcaaagcgcgctgacagaacatttcgagatcgtgctttgccctgtcgtgtattggctggccaaatgcgtgctgctgggcgagcgcgctgaagaaacgggcctgtcgctgaaaaaaatgcacgagcttcacaagaagttgtttctggaactgctcttgcctcgttaa

SEQ ID NO: 502110 - DNA, 1635 bp, Stenotrophomonas maltophilia
gtggacggattggcttcgcatctggcctcctcgccgggcaagcagtccgagttgatgtcactggcggccgaacaggcgtccgcgcttgccagctatctgcgcgaatgccttctggccggcacgggagaagcccgcgattgcatcgagacaccggtgcaggatcggcgcttcgctgccccggaatggcgccattggccgttcaacctgttgcatcaggtctttctgctcaaccagcagtggtggtcgcaggccacccatggcgtatccggcgtggacaagcaccacgagaacgtggtggccttcgcggccaggcagtggctggacatgctctctcccggcaaccacctgctgaccaatccagaggcgctggcacgtaccgtcaccgaggatggcgcgaacctgcagcgcggcctggcgcatctgcttgacgacatcgagcgctcgctggccaagctgccgcccgcaggagcggaggcgttcgtggtcggtcgcgatgtggccgccacgccgggcaaggtggtgctgcgcaaccagttgatggagctgatccagtacgcgccctcgaccgaaacggtgcacccggagccggtgctggtgatccccgcctggatcatgaagtactacatcctcgatctttctccgcacaactccctgatcaagtatctggtaggccagggctatacggtgttctgcatctcctggaagaacccgggccaggccgagcgcgatctgggcatggacgagtatctggagcagggcttccatgcagcgctgcaggccgtcaacgcgatcgttcccaagcgcaaggtgcacgccaccggttattgcctgggtgggacgctgctggcgattgccgctgcggcgatggcgcgcgatggcgatgagcgtctggcctcgttgagcctgttcacggcgcagaccgacttcagcgaacccggcgaactcgggttgttcatcgacgaaagccaggtgtccatgctggaagcgcagatggccgaggccggttatctgcgcggcgaccagatggccggcgccttccagatgctgcgctcctatgacctgctttggtcgaagatggtgcaggaatacctgctcggcgaccgcaggccgatgaacgacctgatggcctggaatgccgatctgacccggatgccggcgaagatgcattcgcagtacctgcggcggctgttcctggacgacgatctcagcgaggggcgctacccggtcggcggccgtccggtctcgctgggcgacatcggtctgccgacgttcgccgtcggcacgctcaccgaccacgtcgcgccctggcgctcggtgtacaagctgcattacctcacgcccaccgagatcaccttcgcgctgaccagcggcgggcacaacgccggcatcgtcagcgaaccgggcaggcccagacgcagctaccggatcggtacgcgtgcggccggcgccagctacgtgccccccgaccgttggctggagcagacgccggtacaggacgggtcgtggtggccggcctggatcgcgtggctgcaggaacgctcgggaacgcccgtcaagccgcccgcgatcggggcgccctccaagggctacaagccgcagtacgcggcgccgggccactacgtgctggagacatga

SEQ ID NO: 502111 - DNA, 1509 bp, Stenotrophomonas maltophilia
atgaacgatatgccagccgtcgccacaggtggcaagcgccgtccgccgccgctgcgggcccggccgatcctggccagcaccgcgctggcgctgctggccggctgcgccagcctggcgccggagtatgaaccgcccgtcgcgccggtaccgcagagctatgcgtccgccgtgggcgcatcgacgccagggcgcgaggatctgccgccctggcgcgactacttcaccgatccgctgctgcagcgcctgatcgagacggcgctgggcaacaaccgcgacctgcgcgtcgccgcgctccgggccgaggaagcccgggccgcattccagatccagcgcgccgatcaattcccgggcctgggcctgggcgtgcagggcgcgcgcgcgcgggtgccgggcgatctcaactactatgggcagtccgtggtcggcagcgaataccgcgccgaagtcggcctgagcagttgggaactggacctgtggggccgcatacgcaacctgaaggatgcggcactgcagcagtggctggccaccgatgccggccgtcaggcggtcgaactggcgctgatcgtccaggtcgccgatggctacctggggctgcgtgaactggacgagcgcgtggcgatcgcgcgccgcaccgtggattcgcgcgcggagtcctaccgcatcttccagcgccgccaggaagtcggctcgacctcccggctggacctgacccaggtgcagaccctgttgacccaggcgcaggcgctgctggcccagctcgaacgcgcgcgcgccagccagtaccacgcactggcccagttggtcggcgccgatcccggcgcactcccagcccgcgcgccgttcgacgaggacacggtgctggcggcgctgcagccagggctgccttcggacctgctggtccgtcgcccagacctcatcgccgccgagcatcagctgcgtggcgcccatgccaacatcggcgccgcgcgcgcggcgttcttcccgcgcatcgccctgaccggcagttggggcacggccagcgccgagctcgatggcctgttcgattccggcagccgcgcgtggacctttctgccgacgctgtcgctgccgatcttcgacgcgggccgtcgccgcgccaacctggagctcagcgaagtgcgccgcgacatcgcggtggcccagtacgagaaatccatccagaccgcgttccgcgaggtcgccgacgcgctggcggcccgccactggctggccgagcagttgcaggtgcagaccgtcgcgcgccaggccctggccgaacgctcccggctggcccaactgcgctacgacaacggctcggccgcctatctcgaagtcctcgacgcgcagcgcaacctgctggacgccgagcagcaactggtgcaggtgcgccgtgcgctgctgtccagccaggtcgcgctgtacggcgcgctcggaggcgggcctggccagcgctccggtggcgctgaagcaggcctttccacccattcgcaacgggcgtcggacataccatga

SEQ ID NO: 502112 - DNA, 1089 bp, Stenotrophomonas maltophilia
atgagcaaagcatcgtcccttttttccaagaaacgcatcgtccccgccacgctggtcgtcgccgtcgcggtgctggcctggtggggctggcagcgctggtccgaccacggcccgggcgagggattcgccagcggcaacgggcgcatcgaggccaccgagatcgacgtggccaccaagttgcccggccgggtggaggagatcctggtgcgcgagggcgacttcgtgcaggccgggcagacgctggcgcggatgcagaccgacaccctgcgcgcccagtacgaccaggccgaggccgggcggcaacaggccgagcacggcgtggccgcggcccaggcgcagatcgcgctgcggcagagcgaggtggccaccgcgcaggcgctggtcgcccagcgcgaggccgagctcgatgccgcgcgccgccggctggcacgttcggagacgctttcggtggagggcgcctcctcggcccaggaactggacgacgaccgcgcgcgggcacgcgccagccaagcggcggtcgcggcgacccgggcccaggccgccgctgctcaggcggccgtgcgcgccgccgaggcacagctggtcggggcgcagtccacggtccgcgcggccgaggccgcggtggcgcggatccaggccgacatcgacgacagcgcgctcaagtcgccgcgcgccggccgggtgcaggtgcgcgtggcgcagccgggcgaagtgctcggcgccggcgggcgcgtgctcaacctgctcgacctgtccgacgtctacatgaccttcttcgtgcccgagaccagcgccggccgcatcgccatcggcagcgaggtgcggatcgtgctcgacgccgcgccgcaatacgtgatcccggccacgatctccttcgtcgccagccaggcccagttcacgcccaagacggtggagaccgccaacgagcgccagaagctgatgttccgcgtgcgtgcgcagattcccgaggatcttctgcgtcggcatctggagcaggtcaagaccggagtgcccggggtggcctggatccggctcgacagcgaccaggcctggcccgccgatctggttgccaatgtgccggtggagtaa

SEQ ID NO: 502113 - DNA, 2742 bp, Stenotrophomonas maltophilia
atgaccaagccgaacgcgcccaccgtcgtgcaactgcagggcgtgcgcttggactacggcaaggtgtccgcgctggatggcgtcgatctggacattcccgccggccgcatggtcggcctgatcggcccggacggggtcggcaagtccagcctgctggcgctggtgtccggcgcccgccggatccaggccggccgcgtcgaggtgctgggcggtgacatggcccggcgcggccaccgcaacgcggtctgcccgcgcatcgcttacatgccgcagggcctgggccgcaacctgtatccgacgctgtcggtcgaggaaaacctgcagttcttcgcccgcctgttcggccacggcgcggccgagcgccgccgccgcatcgacgagctgacccgggccacgggcctgtatccgttcctttcgcgcccggccggcaagctctcgggcggcatgaagcagaagctcgggctgtgctgcgcgctgatccacgaccccgacctgctgctgctcgacgagccgaccaccggcgtcgacccgctggcgcgggcgcagttctgggacctgatcgcgcggatccggcggcagagcccggagatgagcgtggtcgtggccaccgcctacatggacgaggcgcagcgcttcgactggctggtggcgatggacgacggcaaggtgctggccaccggcacgccggccgaactgctggcgcggaccggctcggcttcgctggaagaggccttcatcgccctgttgccggaagaaaaaacccgcgaccaccagccggtcgtgatcccgccattgagcggcgatgacggcgacatcgccatcgaggcccaggacctgaccatgcgcttcggcgacttcgtggcggtcgatcatgtgtccttccgcatccgccgcggcgagatcttcggcttcctcggctccaacggctgcggcaagtcgaccacgatgaagatgctgaccggcctgctgccggccagcgagggccgcgcctggctgttcggcaacgaggtcgacccgcacgacatcgacacccgccgccgggtgggctacatgtcacaggcgttctcgctgtactccgaactgaccgtgcagcagaacctggtgttgcatgcgcgcctgttcaaggtgcccgaggacgacatcccggcgcgggtgcaggagatggtcgaacgcttcggcctggaggcggtcgtgcacagcctgcccgccagcctgccgatgggcgtgcgccagcgcctgtcgctggcggtggcgatggtgcacaagccggagctgctcatcctcgacgagccgacctcgggggtggacccggtcgcgcgcgatgcgttctggcgcctgctggtggagctgtcgcggcgcgaccgggtgacgatcttcatctccacccacttcatgaacgaggccgagcgctgcgaccgcatgtcgatgatgcatgcgggcaaggtgctcgacagcgatgccccggccgcgctggtggccaagcgcggtgcgcagacactggaagaggccttcatcggctatctggtcgaggccggcggcggcacgcccgggcagaccggcgacgacgcggcgcccgcgcagccccgcgccgatggccatcgcgacgcccgtcgcaagcctttcagcctgcagcgcatgatcagctacgtctggcgcgaagcgctggaactgcagcgcgatccggtgcgcgccacgctggcgctggtcggttcgctgctgctgatgttcgtggtcggctatggcatcagcctggacgtggaggatctgcgctacgcggtgctcgaccatgaccaaaccagcctcagccgcagctacgcgatgagcctggaaggctcgcgctacttcatcgaacgcgcgccgctggccgactacgaggagctggaccgacgcatgcgcagcggtgagctggcgctggccatcgagatcccgccgggcttcgcccgcgacgtgctgcgtggcaacagcgtccaggtcggtgcctggttcgacggcgccatgcccacccgcgccgagaccatccagggttacctgcagggcatccacctgcattggctggccgagcaggcgcgcgaacgcttcggcatgcagctggccagcccgatcgccatcgaatcgcgctaccgctacaaccccgacgtgcgcagcctgccggcgatggtgccggcggtggtgccgctgctgctgctgatcctgcccgccatgctcacggcgctggcggtggtgcgcgagaaggagagcggctcgatcaccaacctctacgtcaccccggtcacccgcagcgagttcctgctgggcaagcaactgccctacgtggccctggcgatgctcaatttcctggccatggcgctgctggcggtcaccgtgttcggcgtgccgatcaccggcagcttcctggcgctgacgctggcggcgctgatcttcaccacggtatccaccggtttcgggctgctggcctccacggtcacccgcagccagatcgcctcgatgttcctggtggtggtgggcacggtcatcccggtgacccagttcgccggcctggtcgacccgatctcctcgctcgaaggcgtcggccgggtggtgggcgaaacctatccggccagccacatgatcgcgatcagccgcggtgtgttcagcaaggcgctgcacctgcgcgacctgggcggcgcgctgtggccgctgctgctggccgtgccggtggtgctggggctggccatcgccctgacccgcaaacaggagcgctga

SEQ ID NO: 502114 - DNA, 1131 bp, Stenotrophomonas maltophilia
gtgaaactcccccacctggccaacgtctatcgcctgggcatcaaagagctgtggagcctggcgcgcgacccgatcctgctggtgctgatcgcctatgtgttcaccgtgtcgatccacaccgccgccacggccatgcccgagagcctgcacaacgcgccgatcgccatcgtcgacgaggaccgctcggcgctgtcgcaacgcatcgcctcggcgttctatcccccgcagttctcgccgccggcgatgatctcgctgggcgaggtcgacccgggcatggactccggcgcctacaccttcgtgctcgacatcccgcccaatttccagcgcgacgtgctggccggccggcaacccgcgctgcagctcaacatcgacgccacccgcatgagccaggccttcaccggcaacagctacgtgcagcagatcatcaacctggaggtcaacgagttcgtgcggcgccagcgcggcagcaccgcgatgccggtcgaactggcgctgcgcgcgcgcttcaatccgtcgctggacaagacctggttcggcgggctgatgcggatcatcaacagcgtcaccatgctctcgatcatcctcaccggcgcggcgctgatccgcgagcgcgagcacggcaccatcgaacacctgctggtgatgccggtcaccccggccgagatcatgctctccaaggtctggtcgatggggctggtggtgctggtgaccgccttcgtctcgctcaacctggtggtgcggggtctgctgggcgtgccgatcgaaggttcgctggcgctgttcgtggtcggcgcggcgctgtgcctgttcgcgaccacctcgctgggcatcttcctggccacgctggcgcgcaacatgccgcagttcggcatgttgatggtgctggtgctggtcccgctgcaactgctgtcgggctcgatgaccccgcgcgagagcatgccgcagttggtgcaggacatcatgctggccgcgcccaccacgcatttcgtggaactggcccaggccatcctctatcgcggtgccggcatcggcgtggtctggaagcccttcctggccctggcgctgatcggctcggccctgttcgcgctcgcgctcacccgtttccgcagaaccatcagccagatggcctga

SEQ ID NO: 502115 - DNA, 453 bp, Stenotrophomonas maltophilia
atgaccaccgaaacgcttcccctgaacctcctcaaggccaacgccgaactgcagttgcgcctgactcgcttgctgcaggaaagcagccaccaatggctggattcggtgaaggaggccagttcgcagggtatcgcggaaacctcggccgagatcgaaggcgtgctgcgttcggccaactggcaggcactggcgtcgttgccgcctgaagccttctggcgtcagttccagggccgcgtcgcgcacgtgcagacgttccaacaggtcgcgatcaagaaccaggcggccttcacgtcgggactgcagcaggccatcgagagctggcacaaggccgtgagcagcgcgctcggcagcgacaattccgcgtcgcccttcgccgacgtcttcaagcagtggaatgccttgtggtcgcagacgaccgaggccacccagcgcaaggcgcccaagggagactga

SEQ ID NO: 502116 - DNA, 747 bp, Stenotrophomonas maltophilia
atgggcagcacaacacatactgcgctggtcactggcggcatgggagggctgggcgaggccatcgcccgccatctgcacgatgccggacatacggtgctggtcacccacgcccgcagcgacgaagccgccaacctgtggctgcgcaaagaggccgatgccggttacaccttccagtgctacgacgtggacgtggccgactgggcttcgacccaggccatggccgagcgcatcgccgccgacgggcatgtggtggacatcctggtcaacaacgccggcattacccgtgacgcgaccttccgcaagctgagcaaggagaactgggacgcggtgctccgggtcaacctggactcgatgtacaacgtcacccggctgttcatcgacggcatgctcgaacgcggctggggccgcatcgtcaacatctcctcgatcaacggctccaagggccagttcggccagaccaactactcggcggccaaggccggcatccacggcttcaccaaggcgctggcgcaggaggtggcgcgcaagggcatcaccgtcaacaccatctcgccaggctacctggccacgcagatggtgatggccgtgcccgaggacgtgcgcaaccagatcatcgccggcatcccggtcgggcgcctgggccgtcccgatgagatcgccgcgctgatcggcttcgtcgccggcgatgccgccggcttcctcaccggcagcaacctgtccatcaacggcggccagcacatgtattga

SEQ ID NO: 502117 - DNA, 1182 bp, Stenotrophomonas maltophilia
atgagcaacgacattgcaatcctggcggccacccgcaccgccatcggcagtttccagggcacgctgtccggcctgccggcccacgccctgggcgcggcgctgatccgcggcatcctcgagaagaccggcatcgcgcccgcggagatcgacgaggtcgtcctgggccagatcctcaccgccggcagcggccagaacccggcgcgccaggccgcgatcgcggcgggcctgccgcacgcggttcccgcgctgagcctcaacaaggtctgcggctcgggcctgaaggcggtgcacctggccgcgcaggcgatcgccccgggcgacgccgacctggtcctggccggtggccaggagagcatgagcctggccccctacgtgctgcccaaggcacgcaccggcctgcgcctgggccatgcgcaactggaggacagcctgatccgcgacggcctgtgggacgcgttcaacgactaccacatgggcatcaccgccgagaacctggccgagcgctacggcatcacccgcgagcagcaggacgccttcgccgccgactcgcagcgcaaggccgccgaggccatcgccgccggccgcttcggcgacgagatcaccccgatttcgatcccgcagcgcaagggcgatccggtgctgttcgacaccgacgagcagccgcgcgccggcaccaccgccgacgcgctggccaagctgcgccctgcgttcaagaaggacggcacggtgaccgccggcaacgcgtccacgatcaacgacggcgccgcggtgctgctgctggccagtgcgcagaaggccaaggcactgggcctgccggtgctggcgtggatccgcggctatgccagcgccggcgtggacccggcggtcatgggcatcggcccggtgccggccacgcagaagacgctgagcaaggcgggctggcgcatcggcgatctcgacctgatcgaggccaacgaagccttcgccgcgcaggcgctggcggtgaaccaggaactgggctgggacacggccagggtcaacgtcaacggaggcgcgatcgcgctcggccacccgatcggcgcgtccggtgcgcgcatcctggtcaccctggtccacgaactgatccgccgcgatgcccgcaagggcctggccacgctgtgcatcggcggtggccagggcgtggccatcgccatcgaacgctga

SEQ ID NO: 502118 - DNA, 2487 bp, Stenotrophomonas maltophilia
atgagcgacgatcgcgccccccacgagacgaccggggacatccccgcagactggccgaccgacccgctgcggctgggtgccgccgcggccgaatacgccatcgacgcctggcagcgcggcctgctgtatgccgacgtacgccgccagcgcggcaaccagtaccaggcgcacctgcgcgagcgcgtgcccaacgtgctcgacttcgaggccgagctggtgctctccggcctggacctgccgcgcccggtcaactacgggctggcgcgcatcgtgcccggcgccggaaccccggtcgacccggccaagcgcccgttcgtcgtggtcgatccgcgcgccggccacggtcccggcatcggtggcttcaagcccgacagcgagatcggcgcggcgatgaaggccggtcatccgtgctacttcgtcggcttcctgcccgacccggtgccagggcagacggtcgaggacgtgatgcgcgccgaggccgcgttcgtgcgcaaggtcggtgaactgcatccgggcaacggcaagcccgtggtcatcggcaactgtcaggccggctggcaggtgctgatgaccgcggcggtctggccggagctgttcgggccgatcatcctggccggcgcgccggtctcctactgggccggcgacaacccgatgcgctacggcggcggcctgaccggcggcagctggttgaccgcgctgaccagcgacatcggcgccggccgcttcgacggcgcctggctggtgcagaacttcgagcatctggacccggccaacaccctgtggaagaagcagtaccacctgtacgccaacatcgacaccgaggccgaccgctacctgggcttcgagaagtactggggcggttacgtcttcctcaacgacgtggagatgcagtacatcgtcgacaacctgttcatcggcaacaagctggccactgccgagctgctgacctccgacggcgtgcgcgtggacctgcgcaacatacgctcgccgatcgtggtgttctgctcctacggcgacaacatcaccccgccgggccaggcactgggctggatcaccgacctgtaccgcgacaaggacgacctggtcgcccacgaccagaccatcgtctacgccacccacgacagcatcggccatctggggatcttcgtctcggccagcgtcggtcgcaaggaacaccgcgagttcgccgccaacatcgacatcatcgacctgctgccgcccgggatttaccgcgccgaggtcgaggaccatcccgacggcgtgccggcgggcgagctcgacgacgccgagtacctcatgcgcatccgcggcagcagcctggaggaggtcggccggatcgtgcgacccgatcccgagtccgaccgccgcttcgccgctgccgcgcgcctgtcggagatccacctggcgctgtaccgcaacacgctgcaaccctggatccgggcgatctccacgccctggtcggcgcgctggctgcaggcgctgcagccgctgcgggtcggcttcgagtggtggtcggaccagcacccactggccgcgccggtcgccgccgccgccgcacagatccgcaaggagcgtgcgccggccgccgcggacaaccccttcctgctggcgcaggagcgcctgtccgagacgatcgtgcaggcgctggatcagttccgggaccatcgcgacgccttgcagggacgcctgttcgagctgatcttcggctcgcccctgttgcaggcgctggccgggcagaccctgtaccagccgcagccgcccaggacgcatccgggcgattcgcccgagcaccgcgccttcctggccggcgagctggcacggctggaggccgacctggaccggggcgggctggccgaggcggtgatccgcggcctgttcttcgtgctcaagacccgcggcgaggccgacggacgccatttccgccatgcctgggaactgctgcagccgcgccttgaccgccccgacctgggcgtgccggacctggcgcggttccgcgaactggtgcgccggcagggcctgctggtctggcgcgacggcgaggccgcactggcggcgatcccgcgcctgctggccggcacgccacccgacatcatccaccgcgccagcgacatcatcgccggtctggtggaactggccggcagcctgtctgcccaggagcaggccagcctgcgacgcgtgctcgacctgttcgcacacgccgcgcaagcggcgaccgctgcggccgcgccggccgcctcggtgccggtgacacctgcccatgcgcccagcgtgcctgcgaaggtcggcaaggccgccaccgccaaagcggcttccgcggcaaagcacgcgccgcgtcccgggactgcgcagacgcgaaagcgcggcaccaaggcaggcgctgcagtcccatcggggaccgctggcgagcccgccacccgtcccggcccctccggttcgcctgggcgtcccggcaagaaggccaccggcaagaaaggaacccgcccatga

SEQ ID NO: 502119 - DNA, 948 bp, Stenotrophomonas maltophilia
atgaccgcgacaaccggccaggccgccggcaacgaaggcctgctgcacctgctcgcccacgtcgcgggcaagtcggcgattcgggtcgcagtggtgcatccctgcgatgccttgagcctgtcggcggccctggaggcgaggacggagggattgatcgagcccatcctggtcgccccgcgcccgaaactggaagcggtcgccagccaggccggcctggagctggccggcctggccatcgaggacgtgccgcacagccacgccgccgccgcgcgcgcggtcgaactggcccgcgagggacaggtcgaggccctgatgaaaggcagcctgcataccgacgaactgatgtcggcagtggtgtcctccaccaccgggctgcgtaccaagcgccgggtcagccattgtttcgtattgcagacgccgcagtatccgcgccccttcatcgtcaccgatgcggccatcaacctggccccggacctgctgcagaaagccgacatcgtccgcaatgccatcgaactggcgcaggtcatcggcgtggccgagcccaaggtcgccatcctggcggcggtcgagaccgtcaacccggcgatgccggccacgctggacgccgccgcgctgtgcaagatggccgaccggggccagatcaccggcggcgtgctcgacgggccgctggctttcgacaacgcggtgtcgatcgccgccgcgcgtaccaagggcatcgcctcgtcggtggccgggcaggccgacgtgctggtggtgcccgacctggagagcggcaacatgctcgccaagcaactcatctacctgggcaacgcggagagcgccggcgtcgtgctcggtgccaaagtgccgatcatcctgaccagccgtgccgacagccgcgaaacgcgcctggcctcctgcgcgatcgccctgctgctggcgcaccgctaccggcagatcccgccctga

SEQ ID NO: 502120 - DNA, 753 bp, Stenotrophomonas maltophilia
atgaaatacacattccagggtgacgtggtgctggtcagcggcgccggctcgggcatcggcgaggccaccgccaggctgctggccgccaacggcctgcgtgtggtggtctcggacatcgacgccggcaccgccgggcgcgtggccggggccatcgtcgccgacggcggcaccgccgtggcccacgccggcgacgtctcgcgcccagaggacgccgaatcggcggtggcgctggccgtgcgcgaattcggcgcgctgcagctggcgttcaacaatgccggcatcggtgccccgttcaagccggccggtgaactcaccaccgaggaatggcgccgggtcatcgacatcaacctcagcggcgtgcagtacggcctgcgctaccagatcccggcgatcctggccgccggcggcggcgccatcgtcaacatgtcctcgatcctcggcctggtcggcgacgccggcgccccggcctacgtggccgccaagcacggcgtgaccggcctgacccgctcggccgcgctggcctatgccagccagggcgtgcgcatcaactcgatccaccccggctacgtggagacggcgatcctggccaacctggacggcgccacgcggcaggcgctggtggccaagcacgcgatcggccggctcggccgcgccgaggagatcgcccatgccgtcgccttcctgctgtccgatggcgccagcttcctggccggcagcgcgctggtcgccgacggcggctacaccgccgcctga

SEQ ID NO: 502121 - DNA, 1203 bp, Stenotrophomonas maltophilia
atgtccgaacccacccgagacgtcctgctggtgctcaactgcggctcgtcgagcatcaagttcgccgtgttcgatgccggcgccgtgccgctgccgcgcaggccgctgtggaacggcaaggtgcagggcatcggcgggccggcgccggatttcggcgagaccgacgtggcgccgttcccgatcgaactgggcccggaccacccctaccgcgacgcgctggcgctgatccggcagcgcgtcctggcccggctcgacgggcgcggcgtggccgcgatcgcgcaccgcgtggtccacggcggtagcaagtacttcgacccggtgcgcgtcgatgcccaggtgctggccgacctcaagggctacatcccgctggcgccgctgcaccagccgttcgcgctggaggccatcgagatcctgctgcgcgagcgcccggacatcgcccaggtcgcctgcttcgacaccggcttccaccacaccctgccagtggtcgagcagatgctgccgctgccctgggatgcgtggcagcgcggactgcggcgctatggcttccacggcctgtcctacgcctacatggccgcggtcctgggcgagcgccacggtgccgtcgcgcatggacgcaccatcgttgctcacctgggcagcggcgcgagcctgtgcgcgatgcaggatctgcggagcgtggccaccaccatgggcttctcggcgctggacgggttgatgatgggcacccgtaccggcgtgctggacccgggcgcggtgctgtatctgatggagatcgagaagctgtcgctggaagaggtcggccgcatcctctaccaccgctccggcctgctcggcgtgtcgggaatctcggccgagccgcgcgtgatcgtgcagcacgaaggcgacgatggcgaacgcggcgagcgtgcccgcatcgcactcgcgctgtacgtgcgccgcatcgtgcgcgagatcggtgcgctcaccgccgtgctcggcgggctcgacctgctggtgttcaccgctggcgtcggcgagcacaacgcttttgtacgcgagcgcgtctgccgcgcgctgggcttcctcggcgtgcaactcgacgaccaagccaacgccgccgacgcagcgttgatctccacttccgacagccccgtgcgggtcgcggtggagccgaccaacgaggagtggatcgccgccggccatgcacttcaagtggccgggtga

SEQ ID NO: 502122 - DNA, 1032 bp, Stenotrophomonas maltophilia
atgcccgtgagccatcgagtcggcaaccgtttccggcgactccgggcgatctgcctcgcgctggtggtgccgctgctggcagcctggggcgcgttggcgctgtggttccagggtccggggacaccgccggtacgtggttcgctggccgcgctgtggtgtgtcgcctgtggcgtatcgctgggcctgcgtcttcgcgcacgcgcaccgctcgccatcccgttgctggtcctggccaccgcgctcctgctgggctggtggcagacgctggcgccatcgcacgagcgcgactgggccgatgacgtcgatcgcctgctgcgggcagagatatccggctcgcaggtggtgctgcacgatgtccgcaacttcgactggcgcgacgaaggcgactacaccgcacgctgggaaacccgcagctacgatctcgaccggctggtctccgccgatctgatcctgtcgtactggatggggccgcacgtcgcgcacaccctggtgtcgttcggtttcgacgacgggcgccaactcgtgttctcgctggagatccgcaaggaacgcggcgagtccttctccgccctgggcggcctgttccgcaagttcgaggccgtgctgatcgccgccgacgagaacgacatcgtccgggtgcggaccaatgtgcgcggcgaggacgtctacctgtatcggctcgacctggcgccggaagcgctgcgcagcgccttccttggctatctcgagcaggccgacgacattcgccgccggccgcgcttttacaacaccctgaccagcaactgcacgaccatcgtgttcgggctagccaagcgcctgtcgccgtcgttgccgccggactaccggctgttgctgtcggggcatttcgcccgctatgcccacgatcaccagggcctggtgccggggtacgactttcggacgctgcacgcgcgcggccacattgtggcgcgcgcgcaggctttcgcgggtaccgcggaggatttcccgaaagccatccggcatggcgttccaggcacggagccttcccgatga

SEQ ID NO: 502123 - DNA, 2022 bp, Stenotrophomonas maltophilia
atgacccggcatgcacgctccctccgcctcgtgctgctggcgaccgtggtgctgccgctgttcaacggttgcgccgtgtaccgcgaactgcagccggcggtcagattcgacccgatgagcgcgggcgagtacattgcgatgcagcgcggcgacatcctcaccaccggcaggctcagtgccgcaaccgtgcagacgctgcgcgtggcggggctcgatgcgtgctgcagccaaccttcgctgggctgcatcgacgcggcggcgcagcagaccacgctgtccgacgagcagcgcctgtcggcgctgtccgagctttggctgcaagcggccatgcagacgccatcggacgctgcgcacgccgaagcgcgcatgcaggcctggatggaaagcgcccgccacgcctacgcctatctgttcttcacccggcgcgatcccagtgaacgcgcattcgaggatcgccagactcaggcacgcgactggtacaaccacgcggtccagcaggcctcgaccctgctgttcgacgtgctggacgagcaggggcgcatccatgcggcgcaggacgtcccgcgcaacgatcagccaatcgcctacgccggctggaatctgcatctggaccttagcggcatccgtcttcccgagggcacacgactgccgcaagaactcctgcccgccaggcagttggccttcaccggtctgcgcaacacgtggcgccgcgacggcttcggcgccgaactggtcgcctcggtcgaacccgccgttcgcctgcccgacaaagccgggcgacctgcgccctccctcgacggcgacggggccgcagcgcgcggctggagcgaaatgccgtcccccggtgtcaccgcactgtttcgcttccatggcgatgacctggacggcgtgctcggcacccggacggtactcgtcagcgcccatgacccttacctgcaggacagcatcgccttgcagggccaacgggttcccctggccgccaacttcaccgccggctacggcctgtggcttgctcgatccggcttcaatcggcagtccttgcgcaccctgttcggtcgcggcgagggcatcgagcgaccgcacctgtacctgctgcaaccatgggatccgaaccgtcgcatcgtcctgctgctgcacggcctggcgagcagcccggaggcctgggtggacgtggccaacgaactgcaggccgaccacgatgtgcgggagcacttccagatctggctggcctactaccccaccaacatgccgatcgtcctcaaccacgcgtggctgcgcgagtcggtgagcaacacgctggcccacctggatccgcagggaacggccgccgcctcccagaacatggtcctggtcgggcacagcatgggcggggtcatcgcgcggctgatggtgtcctcggccgaccagaagctgtggaactgggcggtcgagcaaagcggattggactcggagcgaatcgaacgactgcgcccgcgcgtggacgcggccctgcgcttcgagccgatggacaacgtcgggcgggccgtcttcatcgccgccccgcaccggggcacccccgttgccgcggaccggttggcccggctcgcctcgcgaatggtgcgcatgccactgacggtgctggaaagcctgtccgaaatggcccagggcgtcccgcgcgaacaggcactggaacgcctctcgctgctgcccaacagcatcgacaacctgcgcgaggacgatgccttcatgcgagcggccgccgacctgccgatctccgcccgcgtgtcctaccactcgatcatcgcccgccgcgaccccgccgtcagcctggccgcatccgacgacggcctggtgccgtatcgcagcgcgcacctgccgggcgccctgtccgaaagggtgatcgacgccgaccacagcgtgcagggcaccgcgcaatccgtcctcgaacttctccgcatcctgcgcgaagacatggccatgcatggcaaatcgttcccaccaccggagcagcgctccctgtccatcgtagaggtagtcccatga

SEQ ID NO: 502124 - DNA, 855 bp, Stenotrophomonas maltophilia
atgagcattcggcatgtcaccctggtcggcgccggcgtcctcggcgcgcagatcgccttccagaccgccttcaagggtttcgacgtcagcgcctatgttcccgaccaggccgccctggacaaggccggcaaggccatcgactggctgcagcggcgctacctgcaagacatcgacggcgccgatccgcaggcgctggcggcagcggcgggacgcatccgctggaccactgatctggccgcggccgtcaaggacgccgatctggtcatcgaagccattccggaacagctggagctcaagcgcagggtatatgccgaactggggcgcctggcaccggcgaaggcgatcttcgccaccaattcctcgaccctgctgcccagcgcgatggccgacgcgaccggccgcccggagcgattcattgcactgcatttcgccaacgagatctggctgcacaacgtggctgaagtcatggggcacgccggaaccgaccccgaagtgttctcgacattggttcgctttgccaacgacatcggcatggtgccggtcgaaatccataaggaaaaagccggctacgtgctcaattcgctgctggtaccgctgatgtccgcggcttccgaactcctggtcgatggcatcgccgagcatgaggccatcgacaggacctggaagatcgccacgggttcgccgagaggaccgttcgagatatacgacatcgtcggcttgggcaccgcgtaccacatttccttggccggcgggccaaagcagcaggcgttcgcccgtctcctcaaggaacgctacatcgaccacggcaagctcggcgtggagaccggcgaaggattctatcgttacgagtcctga

SEQ ID NO: 502125 - DNA, 945 bp, Stenotrophomonas maltophilia
atggaacttcgacaccttcgctgctttcttgcggttgccgaagaactccacttcgcccgagccgccgagcggctgcatatcgagcaatcgccactgtcacgcaccatcaaggaactggaagaagagctgggcgaacaactgttcgttcgtaccagccggagcacgcgcctgacccgtgcgggcaagttgttccatgaacatgtgccacgcgtcttcaccgccctgcagcaggcccgcgacagcgtcaaggcggcggccaacggcttccacggccaattgcgcatcgccctgtccgatggcatcaccccgtcgcgtctaccgagcttgctggccctttgtcggcaggaggagccagaagtcgagatccgtctgttcgaggtgccgctgtcgcagcagatcaaagggatgaatgacgatctgtacgacgtcggctttgcgcagtccgacgaggtaggcgaaggcatcgcaacagtagcggtatggagcgatccattgatggtggcagttcctgcccgtcacccgctgctcaggcacaagcgcattccgctggaagaggtgctgcgccatcccctggtgctgtgcgatccgcaggtttgcgagggctatgcccgtcaggtggatcgcgtgctgcgacgtgcggacatggagccattgattgccgagcgtgtggcgtcgttcgacctgatgatggcactggtcgcggcgggctttgccttgggtctggccggagcgccacacatcacgggcagccgcgaacccggtgtggtcgcccgtccgctggcggggcgctcccccatgctgaccacttacgtgctgtaccgcgaaggtgaatcctccgacgtgctggcgcgtttcatcgagcgggtgcaggccatcgaatcaccagaaggccacagatccacaccacctgttgaacctgacccccaagaggaattcgagccatga

SEQ ID NO: 502126 - DNA, 273 bp, Stenotrophomonas maltophilia
atgatcgtgaagctgatcgcgcctgttctgatgttggctgtgctgtctgcctgccgcccgtccgagccaccgaagcagggagccaatatgccgaccgtggaagaactggcctccgaccccgaacgcttgaaggaactgcgccgccagtgcaagaccgagcgcccgacgatgggcgacgtgctgtgcaaccgcgtggccgaagcgacgaacaagcgcttcttcggcgacggcaaggtgccttacacgccacctgaaacgccgccgaagttctga

SEQ ID NO: 502127 - DNA, 2013 bp, Stenotrophomonas maltophilia
atgcaggctcagggcgtgttgttcgggcagatcgccgccgtcttcggcatcgtgatcgccggtgtgtggggtgccacgcaatggacagccgctgcattgggctatcagctacgccttggctcgccctggttcgacttgtacggcacgccgatctactacccgtggaagctgttcgagtggtggttcttcttcgacgcctacgcgccgcaggtcttcgacaccggcggcatgatcgcggtgggcagcggcctttttgccgtggcggtcgccatcgccatgtcggtgtggcgctcgcgccaggcgcgccaggtgacgacctatgggtctgcccgctgggccgatgccgccgacattcgcaaggccgggttaacacagcccgctggagtgtttctcggccagcatgatggccactacctgcgccacgaagggccggagcacgtcctgaccttcgcgcccacccgctcgggcaagggcgtgggtctggtggtgccgacgttgctgtcgtggccggcatctaccgtcatccacgacatcaagggcgagaactggcagatcacggccggttggcgttcgcgcttctcgcattgcctgctgttcaacccgaccgatgcgcagtcggcggcctacaacccgctgctggaggtacggcgcggcgcgcatgaagtgcgcgacgtgcagaacatagccgacatcctggtcgatcccgaaggcgcgctggagaagcgcaaccactgggagaagaccagtcacgcgctactggtcggcgcgatcctgcatgtgctctacgcgggcgaggacaagacgctgcgcggcgtggcgaacttcctcagcgacccggcttgtcccttcgagctgacgctgcatcggatgatgacgaccaggcacctgggcgatgcaccgcacccagttgtcgcgtccgccgcgcgtgaagtgctcaacaagtcggacaacgagcgatcgggcgtgctctctaccgccatgtcgttcctcggcctgtaccgcgatcccacggtggccgaagtcacgtcgcgctgcgactggcgcatcgccgacctgatcgcatccgaacatccggtatcgctgtacctggtggtgccgccttcggacatcagccgcaccaagccactgatccgtctgatcctcaaccagatcgggcgacgactgaccgaatcgctcgacggttccgacggtatcgagcgccgccacaagctgctgctgatgctcgatgagttcccggcgctggggcgcctggacttcttcgagacggcgctggccttcatggccggctacggcatccgcagcttcctcatcgcccaaagcctgaaccagatcgacaaagcctacggccagaaccattcgatcctggacaactgccatgtgcgcgtgacgtttgccaccaacgacgaacgcacggccaagcgcatttccgaaacgctcggtacggccaccgaactgcgcgcgcagcgcaactacgccggccatcgcctggcgccgtggctcgggcacctgatggtgtcgcggcaggaaacggcgcggccgctgctgacgccgggcgaggtgatgcagcttccgcccgatgaatccgtggtgatggtgggaagcagtccgccgatcaaggcgaagaagctgcgctactacgccgacaccaacttcaagcgtcgcgtgttgccgctgcccgtactcgcggccgggcagtacgccgacgcgccgccggctcgccccgacgactggagcgccttggcgattcccgccgtccccgccgcgccggccacggcatccgccgatgccctgggcggccccgatgacggcggcccgcgccgccagccggagctgaccgaagtcaccgaatacagccccgagccactgatcgcaggcaacgacctggggctgctcgatgacgacgacgacctgccgctgccttacatggcctctctccccggccagttcgacccggccatgcagcgcacggcccggctggcttccctcgaccccaacgacggcatcgacttatga

SEQ ID NO: 502128 - DNA, 1047 bp, Stenotrophomonas maltophilia
atgagcgccgtcccccagatcccgcccgaaccgcattcgtcggcagcggcgtcccaggatcgccgcatccagatgctgcgcacggcgatggggccagtgatcgctgccgcgcttgaagacccggacgtggtggaggtgatgctcaaccccgaccggacattgtgggtggatcgcctgtcgtctggtcggatgcctgtcggcgtcgaactgcccgaggccgatggcgagcggatcatccgcctggtcgccgcccatgtcggtgcggaggtgcatcgcggccagccgctcttgaccgccgagctgccggagacgggagaacgcttcgagggcatcttgcccccggccgcgcccggcccggccttcgcgctgcgcaagcgggccgtgagcatcatcggcctggatcactatgtagccgacggcatcctgaccgccggacacgcggacttcctgcgccgcgccgtgcacgagcgccagaacatcctgatcgcgggcgcgaccagcagcggcaaaaccacgctcgccaatgccttgctggccgagatcgccgccaccggcgaccgcgtgctggtgctcgaagacaccatcgagctgcaatgcgcggcccgcgaccatgtaccgctgcgcacccgcgtcggcgtggtgtccatgaccgagctggtgcgcgccacgatgcggctgcgccccgaccgcgtgatcgtcggcgaagtacgcggcggcgaagccctcgacctcatcaaagtgtggggaacggggcatcccggcggcattgccaccatccatgccggttccgcgttgggcgcgctgctgcggctggagcaactgatcctcgaagtcgcggtgaacccgccgcgggcgctgatcgccgaagcggtcaacgtcgtcatccacatcgccgggcgcggccgcaagcgccgcgtcggaagcatcgcccgcgtcgtcggcttcgacggagtgggctatcgcctggcggacgccttcgaaacaccgtttcccgagctgccgccactttcttccccgtcccctcaccaacctggagaactgccatga

SEQ ID NO: 502129 - DNA, 393 bp, Stenotrophomonas maltophilia
atgacgcagatgcacgttcgcgctttccgcttttccgtcaatccgcttccccgcctgtccagcctcgcccggctgcgcagtctgacccgtcctgcggggcaagggctgctgctggccgcgctgctgctgtttctggccggcacggcccaagccgccggttcctcgatgccctgggaagggccgctgcaatccattctggagtcgattcaggggccggtggcgcgcatcgtcgcggtcatcatcatcatagccaccggcctggcgctcgcctttggcgacacgtcgggcggcttccgcaagctgatccagatcgtcttcggcctgtccattgcgtttgccgcgtcgtcgttcttcctgtcgttcttcagcttctccggcggggcggtcgtatga

SEQ ID NO: 502130 - DNA, 2451 bp, Stenotrophomonas maltophilia
atgctgaatcttgccgaataccgccagcggcccgccttgctcgccgactggctaccctgggccgggctgatcgcgccgggtgtcgtcttaaacaaggacggcagtttccaacgcacggcccgctttcgcggccccgacttggacagcgccacgcaaggcgagctgatcgccgcatcggcgcggctcaacaacgcgctgcgccgactgggatcgggctgggccttgttcatcgaggccgagcgctgcgcagcggctacctatccacgctccgagtttcccgaaccactgtcatggctggtggacgaggagcgccgcgccgccttcgaggagtcgggccatcacttcgagagcggctatcacctgacgctcgcatacctgccgccggaggaatcccgcgctcgcgccgcgaagatgctctacgagaacgcacccggcgacggcgtggactggcgcggtcgcctcagtgcgttcgtggcggaaaccgatcgcgtattcgacctgctcgacggcgtaatgccggaaatcgcctggctcgatgatgccgagacgctgacctatctgcacgccaccgtctcgacgcgccgctaccgcgtgggcgtgcccgaagtgccgttccacctcgacgcgctgctggccgattccgcgctggtcggcggtctggcgcccgcactgggcgtccagcacctgcgcgtggtgtcggtgcgcgggttcccgacgtccacctggccgggtctgctggacgacctcaatcgccttggcttcggctaccgctggagtacgcgcttcctgtgcatggacaaagccgaggcggaaaaggaactcggccgcctgcgccgccagtggttcgccaaacgcaagaacgtcgtcgcgctattgcgcgaaacgatcttccagcaggaaagcccgctggtcgatacggacgccagcaacaaggccgccgatgctgatgcggctttgcaggagctgggcagcgatcaagtcgccttcggctatctcaccgccacggtgacggtgctcgacgccgccccggccgtggccgacgagaagctgcgcatggtggagcgcgtcattcagggccgtggtttcgtgacgatccccgaaacgctcaacgccgtggatgcgtggctgtcctcgatcccgggcaacgcctatgcgaacgtgcgacagcccatcgtctcgacgctgaacctggcgcacatgatgccgctctcggcggtatgggccgggccggagaagaacgaccacctcgacggcccgccgctgatcgtgacgcgcaccgatggcgcgacgccgttccggctggtcacgcacatcggcgacgtgggacacacgatgatcgtcggcccgaccggcatgggcaaatcggtcctggtcgccatgatggcgatgcagttccgccgctatcccggctcgcgcatcttcgccttcgacgtgggccgatccattcgtgctgccaccctgggcctgggcggcgagcactacgacttgggcgcggatggcgacattgccttccaaccgctggcgcggatcgacgacgagggctaccgcacctgggccgccgattgggtcgaaggtcggttgatacgcgaaggcgtggcagtcggccccgacgagaaggcggcgatctggtcggcgctggaaagcctggccggtgcgcccgtggcgcagcgcacgatgacggggctttccgtcttgctgcaatcgaacgcgctgcgccaggcactttcgccctacgtgctcggcggcgcccacggcaagctgctggacgccgaccacgaccggctgggtatggcggacgtgcagtgcttcgagatggaggagctgatgcacagcaaggccgctgttctggccgtgctgaattacttgttcgcgcgtctggaagagcgattcgatggtgctccgaccatgcttttcctcagtgaagcatggactttcctggatgacccggtgttcgccgcacggctgcggcagtggctgaaaaccttgcggaaaaagcaggtctccgtcgtcttcgatacgcaatccctcgcggacatcaaagagtcgtccatcgcgccagccgtcatcgaaagctgcgccagtcggatttttctaccgaacccgcaggccaccgagccgcagatgcgtccgatctacgagggcttcggcctcaacagccgacagatcgagatcgtcgcgaacgcccagcccaaacgtgactactactaccaatcgcggctcggcaatcgcgtgttcgacctcgacctggggcaggccgcgctcgctttcgcgggcgcatccactccccaagaccaacgcgacatcgaccgcgtgctgacacaagccggcgctcccggcttcgccggtgcgtggctgcgccatcgcggcctcgattgggctgctgacctgctgccgtcctcaccgccagcggcttccttcctcgcgtctcaacgaccggaggtttcaccatga

SEQ ID NO: 502131 - DNA, 744 bp, Stenotrophomonas maltophilia
atgaagaccaaaccccgtttgctgtctgcctcgctcgccgccgtgctgtcggtgtcgctgctggccgtgcagcccgcatccgcgctgacggtgttcgacccgtcgaacttcgtacagaacacgctgaccgccgtgcgcacgctggagcagatcaacaaccagatcaaccagcttcagaacgaagcgcagatgctgatgaaccaggcgcgcaacctcgcgaatctggacttcaacatcgtcaatcgcctgcgctcgacgctcgccacgaccgagcgcctgatcgccgaggcgcgcggcctagcctacgacgtgcagagcatggatgccacgttcgcccggctgtacccggagcagtatgccgcaaccgtcagcggcgaccagatgctgcgcgatgcgaaggaacgctggacgaacaccttgaacggcctgcacaccgcgatgcggatgcaggcgcaggtgtcgcagaacttggcgcaagacgagagcgctctgtccgatctggtcagccagagccagtccgccaccggcgcgctgcaagccatgcaggcgaccaaccagcttctggccctgcaggccaagcagtcgatccaggcgcagcagctccagatcacgcaggaacgcgccgccgcactggaactggcacgccaagcggcggctgtcgagcgcggccgggaagtaacgcgccgattcctgggcgatggcacgccgtacacgccgcagcgtgtggatttctacggcaactga

SEQ ID NO: 502132 - DNA, 327 bp, Stenotrophomonas maltophilia
atgcgatgcgttttcttcctgctgcccgtgctgctggtcgcttgcagccagcagccgaccgaagacctggccgccaccttggccgccgatcccgtgcggctcaaggcgctgcgtgcccgatgcgcaaccgacctgcaagccgcaggcgaaggcgcctgccgcgccaccgccgaagccttccggcagcgcttcttcgccggccagaccgggccagacgagtaccgggcgctggccgacttgccgccgattccgccgagcttcgatacgcccgccgacgacgtacacgaaggcgacgcgccacccgcatcgccggaggacgtgccatga

SEQ ID NO: 502133 - DNA, 1389 bp, Stenotrophomonas maltophilia
atgaacgacgtgacggtgatcgaccgctttctcgatactttctcgcgctacatcgactcgggctttgggctgctgcagggagaagtcgcgttcctcaccgccacgctgatcgtcatcgacatgaccatcgccgggctctactgggcgatgagccatgccaccggccagggcgatgacgtgatcgccaagctgctgcgcaaggtgctctacgtcggtgccttcgcctacatcatcaacaacttcaactggctggccagcatcgtcttccgctcgttcgcgggcctgggcctgacggccagcggctcgacgatgagcatgggcgagttcctgcaaccaggacgcctggccaaaaccggcatcgactcggcggcccccatccttgagcagatcagcgacatggcgggcttccccgaggtattcgtgaacatgacgcccatcgtcgtcatgttcctggcctgggcggtggtgatcctgtgcttcttcgtgctggcgatccagcttttcatcacgctgatcgagttcaagctgaccacgctcgcgggcttcgtgctggtgccgtttgcactgtggaacaagaccagctttctcgccgagaaagtgctgggtaacgtcgtgtcttcaggcatcaaggtgctggtgctggccgtcatcgtcggtatcggctcaggcctgttcgccgagttccaggtgcatccgtccgagccgtccatcgaccatgcggtggtcatcatgctggcctcgctcacgctgctggcgttgggaatcttcggccctggcattgccaccgggctggtctccggcgcaccacagttgggtgccggggcgatggccggtgctgcgattggtgccgcaggcgcggcggtggccgtgggggccactgccaccggcgtgggcggtgcggtcatggccggagcgcgcatggcaccggctgccgccaaactcgccggggctggcgcgcgggccgcgacctcggcggctggcagcgcgaagtcggcattccaagctggttccgccgctgcgggcggcggagccaagggagcgatggcagggctgggtaatgtcgccaagggcggtgcacaggcggcaggccagcgcgccggtgctggcatcaaaacggcggcagccaaggccgctgcgccattcaaagcaggctggcaaggctctggcgcagatggtggctcaggcggtggcactactgggccagccgccacgggtgatgccgctggcaccacggccaccgcacagaagcaggaacaacccggctgggcaaagcgcctgcaacgccgccaacgactcacccaggccaccaccactgccgcccacacgctgcgcggtggcgatggcggcggctccgggcaaggcccgagcctgcgcgattccgatagctga

SEQ ID NO: 502134 - DNA, 990 bp, Stenotrophomonas maltophilia
atgaatgcgcttttccgcaaatccgccttgccggggattctttttgccttggccggctgcgcctcgcagggcaaaccgccgccgaccatctcgctcgatgagccggtgctggcccagccattgcccgaaccgcccatgccgatggaagtcgtcgccgtccccgaaccgctgccgatgccggcgcagttgaagccgttgcccgaggccgaggacgctgaacctgcaccagagcctgccgacgagaaggtgcgcgtctcccgcgccaacgcggaggcgcgcatcgcaccgacccgtgagggctacgtcaatgcgatccaggtctggccgttcactgacggtgcgctgtaccaggtctatgcgtcggtgggccgcgtgacggtgatcgcgctccagcccggcgaggaactggtgacggtcgctgcgggcgataccgtgcgctggatcgtgggcgacacctccagcggcagcggggccgatctgcgcgtcaatgtactggtcaagcctatccgttccagcttgaagaccaatctggtcatcaccaccagccgcaggacgtacctgctggaactgatctcgaccgacaaggcatggatggcatcggtgtcctgggactaccccagggatcggatgctggccttgcagcgccaagcacaggctgccaacgctgccgcgccggtagatgtgggcctgtcgttggagaacatccgttttcgctatgcaatcagcggcagcaatccaccgtggaagccgctgcgcgccttcgacgatggcgagaaggtctatatccagttcccgccgggcatcgcccaaggcgagctgccgccgctgttcgtcatcggcgcgcagggcgacgggcaactggtgaactaccgcttccgcccgccgtactacatcgttgatcggctgttcggtgcggctgaactgcgcctgggcggggataagggcgacgtggtgcgcatcgagcgcacggatggtacgcggaggaactga

SEQ ID NO: 502135 - DNA, 1293 bp, Stenotrophomonas maltophilia
atgagccaggacgacactcccgacgttgccgtgccgcaggcgggcaaggtcgaacccgaggcggtggcgctgcgcgcccagccgcgtccggtcacacggctgaaccggcgcacgctggccatcctcgccggcggcctgtcggtcgccgtgctcggcgcgttgatgtggtctttgcaaccgcagcggcgcgcggccaacgagcagaccgagctttacaacgtggatcgcgtttcacgctccgaaggactcgaccagcttccggccgactattccaagctgccgccgaccttgctccccgacgtgcccgagctggggccgccgctgccgggcgaccttgggccggccatcgtgaactcgcagcagccggccgtggccgcctacgccacacccggtcacgacccggccgaggcggaacgcttggcgcggttaaaggaggccgaggaagcggctgcatcgtcggtatttttccgcaccggcacccagcaagccgcgccggtggcgcagtcgcaggtggccgccgcgccgggcttcgccgccaatgcggccttcgacccgatggcagccgggccggcttcgacggcggcccagcccgccgacccgacggccgtgcagaacaggcaagaccagaaagaggcgttccagcaagccggaaccacggaaacccgtaattccggcaacctgcaaatgcccgcatcgccgtatcaggtgatggccggaacggtggtcgccggggcgctggttacgggcatcaagtcggacttgcccggcgacgtgatcgccacagtgacggagccggtctatgacacggccaccgggcgcttcctgctgattccgcagggttcgcgcatcctcggccgctacaacagccaggtcagctacgggcagagccgcgttcaagtcgtctggaaccggatcatcctgcccgacacgtcctcgctcacgctcgacaacctggccggcaccgacccggccggctacgcgggcctggaggatggcgtcgattggcattgggatcgcatcttcgccggtgcggtgctgaccacgctgttaggcgtcggcgccgagctggccgcgccggagaaccgccaggacggcgatcgcatcatcatcgccgggcgcgacagtgcgcaggacagcatcaatcaggtcggccaggagatgacccggcgcaacctcaacatccagcccaccttgaccgagcgaccgggcctgccggttcgcatcatcgtcaatcgggatctcgtgctgcggccgtaccagccgttgttcttcaatcggggggcttcgcgatga

SEQ ID NO: 502136 - DNA, 657 bp, Stenotrophomonas maltophilia
atgatcacgaccgacgcgctcgcccgacccggtcggcgcgaccgcaacatgcaggacaagcatggccgcatcttccaggcggccgcagcgctgttcgaggcgcatggctatgccggcgtcaccacgcaggcgatctccgagcgcgccgacgtcggcgcgggcacgctgttccgctacgcgtcctccaaggacgaactgctgctgatggttcttaaccaggcgttgcgcgcggcgctggcacagggcgccgcgcgggcccgtggattgcgcgacccggtggacatcgcggtggcgatggtcgcgcccatcctgcaattgggcggccggcatgcggagaacctggcggtctaccagcgccagctgatgttcggcgccccgggcgagaaataccgcaacgaaggcctggcactgctggccgggctggaggcggccgtggccgccggcctgctcgagcaggccggcgcgcgcggcctgccggcacgcccggagctggcgcgagtggccagcatctcgatcttcggcgctgcgcatctggcggtctcgcgcgcctccaccggcgcccatcccggccatgtcccgatggacgacctgcgcgcgcaggtccggcaaatcgtggacggctatttcgcgggcctggctaccgaagggccagcctag

SEQ ID NO: 502137 - DNA, 867 bp, Stenotrophomonas maltophilia
ttggacaagattaacaaggtgacggtgctgggcacgggcgtgctgggttcgcagatcgcgttccagaccgcctacagcggcttcgaggtatcggtctacgacatcgacgaggcggccatcgccaaggcgcggcagcgcctggacgggctggtcgaaacctacgaggaggaggtggccggcgccgacggcgacaagctgcacgccgcattggcgcgcatcgccttgcacaccgacctgggtgcggccgtggccgatgccgacctggtgatcgaggccatccccgaagtgctggaactcaagcgccagacctacgccaggctggaccggctggcgccggagaagaccatcttcgccaccaactcgtccacgctgctgccgagcgcgatccaggacgccaccggccgacccgaccgcttcatcgccctgcatttcgccaaccagatctggaagtacaacaccgccgaggtgatgggcacgcaggacaccgacccgaaggtgttcgacgcgctgctggctttcgccgccgacatcggcatggtgcccatcgcgctgcataaagaaaaagcgggctacgtgctcaactcgctgctggtgccgctgctcaacgcggccgccgagctggccgccggcggctatgccgacccgcacgacgtggacaaggtctggcgcatcgccaccggcgcgccgctggggccgttccagatctacgacatcatcggcctgactacgccctacaacatcctgtcccacggcaacacccacacccagcagctggcggcctggctgaaggagcactacatcgaccacggcaagctcggcgtcgcctccggcgagggcttctaccgctacgacaagaccccgaactga

SEQ ID NO: 502138 - DNA, 1770 bp, Stenotrophomonas maltophilia
atgtactacagcagcggcaactacgaagccttcgcccgcccgcgcaagccggccggggtggagaacaagaccgcctggttcgtcggctcgggcctggcttcgctggccggcgcggccttcctggtgcgcgacggacacatgcccggcgagcgcatcaccatcctggagcagcaggcgatcgccggcggtgcgctcgatgggctggacgtgcccgagaagggtttcgtgatccgcggcgggcgcgagatggaggaccacttcgagtgcctgtgggacctgttccgctcgatcccctcgctggagattgaaggtgccagcgtgctcgacgagttctactggctcaacaaggacgatcccaactactcgctgcaacgcgccacggtgaaccaaggcgaagatgcgcgcaccgatggcctgttcacgctcagcgagcaggcgcagaaggacgtgatcaagctgttcctggccacgcgcgaggagatggagaacaagcgcatcgacgaggtgctgggccgcgacttcctcgacagcaacttctggctctactggcgcaccatgttcgccttcgaggaatggcactcggcgctagagatgaagctgtatctgcaccgcttcatccaccacatcggcgggttgccggacttctcggcattgaagttcaccaagtacaaccagtacgagtcgctggtgctgccgctggtgaagtggcttcaaggccacggggtgaagttccagtacggcaccgaggtgaccgacgtcgatttcgacatcgccccgggccgcaagcaggccacccgcatccactggaagcgcgacggcgccgatggtggcgtggaccttggcccggacgacctggtgttcatgaccatcggctcgctgaccgagaactcggacaacggcgaccaccacaccccagccaggctcgatgaaggcccggccccggcctgggacctgtggcgccgcatcgcggccagggcaccggacttcggccgcccggatgtgttcggcgcgcatattcccgagaccaagtgggagtcggccaccgtcaccacgctggacgcgcgcatcccgcagtacatccagaagatcgccaggcgcgacccgttcagcggcaaggtggtcaccggcggcatcgtcagcgtcaaggattcgagctggctgctgagctggacggtcaaccgccagccacatttcaagaaacagcccaaggaccagatcgtggtctgggtgtactcgctgttcgtggacacgcccggcgactacgtcaaaaagccgatgcaggcgtgcaccggcgaggagatcacccgcgagtggctgtaccacctaggcgtgccggtggagcagatcgacgaactggccgcgaccggcgccaagacggtgccggtgatgatgccgtacatcaccgcgttcttcatgccgcgccaggccggcgaccggcccgacgtggtgccggaaggcgcggtcaacttcgccttcatcggccagttcgccgagtcccggcagcgcgactgcatcttcaccaccgaatactcggtgcgcacgcctatggaagcggtgtataccctgctgggtgtggagcgcggcgtgccagaggtgttcaattccacctacgacgtgcgcacgctgctggcggcgaccggccgcctgcgcgacggcaaggtactggacattcccggcccggcgttcctgcgcaacctgctgatgaaccggctcgacaagacccagatcggcgcgctgctgcgggagttcaagctggtcaccgaagattga

SEQ ID NO: 502139 - DNA, 2487 bp, Stenotrophomonas maltophilia
atgcacacacctcatccgcctgccggtcaggcaagcacaagcgacaagaccaccagcccacaggtggagcatggccctggtgcgcacggccctggcagcgcgcaccaggtcacgccgttgcacgacccggtctgcggcatggcggtatccggggactcgccgcaccgcgtcgagcatgccggggccacgcaggtgttctgcagcgcccgctgccttgagaagttcgtcgccgagcccgatcggtatctcgcgcccgtgcaggcgaccgctgcggtgccatccgcccctggcgggcacggggcacaccatggcgaacatgccgcaccggccgcttctgcctcgcaggcaacaggggcgccgtctcgcgccgggatgctctacacctgccccatgcacccggagatccgccaggaccaccccggcacctgcccaaagtgcggcatggccctggagccggaattgcccagcctggaagacgacgacaaccccgagctgaaggacttctcgcgccgcttctggtggacgctgccgctgtcggtggtggtcatgctgctggcaatggccggccaccggctgcacctgttcgacatggcgacccagagctgggtggaactggtgctggccgcgcccgtggtgctttgggccggcgcaccgttcttccagcgcggctggcaatcgctggtccatcgcagccccaacatgtggacgctgatcggcctgggcaccggcgcagccttcgtctacagcgtggtggccaccgtggcgccgggcgtcttccccgcgtccttcgtctcgatggggcgggtcaacgtctacttcgaggcggcggcggtgatcatctcgctgacgctgctgggacagatgctggaactgcgcgcgcgttcgcagacctcggcagcgatcaggtcactgctggggttggcgcccaagaccgcccggcgcgtgcgcgaggatggcacggaggaggacgtgccgctgacccacgtgcaggtgggcgaccgcctgcgcgtgcggcccggcgagaaggtgccggtcgacggcatcgtgctcgaaggcgcaagcgcgctcgacgagtccatgctgaccggcgagccgctgccggtgaccaagcgcgcaggcgaccggctgatcggcgccaccctcaacaccagcggcgcgctgctgatgcgctgcgagcgggtcggtaccgactccgtgctgtcgcagatcgtgcagatggtcgcccaggcgcagcgctccaaggcgcccctgcaacgcatggccgatggcgtggccggttggttcgtgctggccgtggtcggcgtggccatcgtcaccttcttcgcctgggggctgttcggccccgcccagggctgggtgttcggcctgatcaacgcggtctcggtgctcatcatcgcctgcccgtgcgcgctgggcctggccacgccgatgtcgatcatggtggcgaccgggcgtggcgccagccagggcatcctgttccgcgacgcggcggccatcgagaacctgcgcaaggtcgacacgctgatcgtggacaagaccggcacgctgaccgagggccgcccggccttcgaccgggtggtgcccgccgagggcttcgccgccgaggaggtgctgcgcctggcggccagcctggaccagggcagcgagcacccgctggccgacgccatcgtccgccaggcgcgcgaacagggcatcgccttggatgcggtggagcagttcgactcgggctcgggcatcggcgtgcaaggccgcgtcgccggccgttcgctggcgctgggcaacaccgcgctgatggcccggctcggcgtggccgtcgaggtgctggcggcgccggccgaggccctgcgccgggaaggcgccagcgtcatgcacctggccgtggaggatcggctggccgggctgctggccgtttccgacccggtcaaggcgagtacgcccgaagccctgtcggcgctgcacgcggcgggtatccgcatcgtcatggccaccggcgacggcgtgaccaccgcccgcgcggtggccgcgcgcctggggatcgacgaggtgcacggcgaggtcaagcccgaggacaagctggcgctggtcgagcgcctgcaggccgagggtcgggtggtggcgatggccggcgacggcatcaacgacgccccggcgctggcgcgcgccgacgtcggcatcgccatgggcaccggcaccgacgtggcgatgaacagcgcccaggtgaccctggtcaagggcgatttgcgcggcatcgccgtggcgcgcgggctgtcgcaggccacggtggccaacatgcgccagaacctggcgttcgcgctggtctacaacggcctgggcgtgccgctggccgccggcgtgctttacccgctgaccggctggctgctctcgccgatgttcgcggccctggccatgagcctgagctcggcctcggtggtgggcaatgcgctgcggctgcgcgcccagcgtatcaatccaggccgagctggctga

SEQ ID NO: 502140 - DNA, 978 bp, Stenotrophomonas maltophilia
atgcgcagtgccatccacaccacatttggcgagcctgccgacgtcctcgaactcggcgaccgtcaggtgccgcagcctggcgcgggcgaagtccgcatcaagacctcgctggcgccgatccacaaccatgacctgtggacgatccgcggccgctacggctacaagccggaacttcccgccatcggcggcagcgaggcggtcggcatcgtcgatgcactgggcgagggtgtcgaaggcgccaccgtcggccagcgtgttgccgtggcctcggcacacggtacctgggccgagtacttcctggccccggcgcggctgctggtgccggtgccgcaggccctgcccgacgagaccgccgcgcagctcatcgccatgccgctcagtgcgttgatgctgctggagttcctgcacgccgagccgggccagtggatcgtgcagaacacggccaacggcgcggtcggcaagacgctggccatgctggccgccgcacgcggtgtgcaggtgctgagtctggtgcgccgcgacgcgggcgtggacgaactggcggccctgggcatcggcaacgtcatttccactgcgcagccggagtggcaggaacgcgcccgcgcgctccttggctccaccctggcccacgcggccgtcgactccatcggcggcgcggccagtgcagcgctgctgggcctgctgggcgaaggcggcacgcttgtttccttcggcacgatggcaggagagccgatgcagatcgactcgggctcactcatcttcaagcaggccacggtcaagggtttctggggcagcaaggtcagccaggctttgtcggcggatgacaagcgccggctggtgggcgaactgttgcagcgcacgctggccggtgaactgttgctgccggtcgaggcgatctacgacctggccgatgcagcccaggccgcggccgccagcctgcaaccggggcgcaagggcaaggtcttgctgaagccatga

SEQ ID NO: 502141 - DNA, 411 bp, Stenotrophomonas maltophilia
atgaagatcttctacaagacccgcgccaccgccacgggcggccgttccggccgcaccgcgctggacgacggcagcctggcgctcgacctggccacgcccggttccggcaagaccggcgccaaccccgagcagcttttcgccatgggctacgccgcctgcttcgacaacgccttgcccgtggccgccaagcaactgggcctggcgccgaccgggacgcgcacctcggtggaggtcggcatcggccagacggccaccggcggctatgcactggacgtggacttgcatgtggaagtccagggcctggacgaggccgctgcgcgcaagctggtggaggccacgcatcaggtgtgtccgtattcaaatgccacgcgcggcaatatcgacgtgcgcctgcatgtttccgtggcctga

SEQ ID NO: 502142 - DNA, 330 bp, Stenotrophomonas maltophilia
atgaatgcagacaacgcgcatccgcgtccgctggcggcctattacttcggaaacgatccagccaggcagcaggcgtttctcgaccgcaccacctccggcgccgcggtcatcaacgacgtgatgacgcatgccgtggtcgaaagcgtgcctttcggcggcgtgcgcccgtccggcatgggcgcctaccacggcatccacggcttccgtcgcttcagctacgccaaggccgtggtggtgcaaagcgccgatggcgcgtccaacctgcgcttgcgcgcaccgtatgccgacgcgctggcgcaggcgcaggccgcgctcgcctgcgttgcgtga

SEQ ID NO: 502143 - DNA, 696 bp, Stenotrophomonas maltophilia
atgaaaatcctgttcgtactcacttcccacgaccgcctgggcgataccggccacaagaccggtttctggctggaggagttcgccgccccctactacgtgttcaaggacgccggcgccgccatcacgctggcttcgcccgcaggcggccagccgccgctggatcccaagagcgacgaacccgatgcgcaaacggccgcgaccgaacgctttcgccaggacgtccaggcgcaagcggccctggctgccaccgtaccgcttgcgcaggtggacgccgcggatttcgatgcggtgttctaccccggcggccacggcccgttgtgggatttggccaacgatcccgcctccatcgccttgctcgaagccttcgagcgcgccggcaaaccgctgggcctggtctgccacgcgccgggcgcgctggtgaaggtgcgtgcagcgaacggccagccgctcgtcgcgggacgccgtgtcaccggcttcaccaacagcgaggaagcggccgtgggtctgagcgccgtcgtgccattcctgatcgaagacgaattcatccgcttgggcggccactaccagaagggcccggactggcaggcgcacgtcgtcaccgatggccgcctggtcaccgggcagaacccaggcagttccgagggcgtggcccaggcgctgttgtccctgctggcgcgggacgtagaagcgtcatga

SEQ ID NO: 502144 - DNA, 639 bp, Stenotrophomonas maltophilia
atgcacctgaccaagaaagccgaagcgacacgccagcacatcctcgatacggggcaccggctcgtgctgcacaaagggttttccgcgttggggctgctcgaaatcctcaaggcctgcggcgtgcccaagggctcgttctatcactacttcccgtcgaaggaagccttcgggtgcgagctgctgcaacagtacgtcgatggctacgcgcgcaagctcgatggcctgctttcggtgcccggcaacggcaacgagcgcctgatgcagtattgggatgcctggatcgcagatcccgccgatccggcacagggatgggccgacgaatgcctggtggtgaagctggcggcggaagtggccgacctttccgaagacatgcgccgggtactcgatgccggtgtgcaacggcttctggcaaggatcgcggcactgatcgacgaagcccgcgcggacggctccttgcctgctggctcaccatcgccggcattggcccgggtgctttaccagatgtggctgggcgcggcgctgctggcgaagttgagccaggacaagacgcctttgacgcaggcgcgcgacgccacggggcagttgctggcctgcggcacggcacggcacatcgcggccgaccaagcactttcccgataa

SEQ ID NO: 502145 - DNA, 903 bp, Stenotrophomonas maltophilia
atgaacctatctcccatcgccgatggcccgccgctggaaacggtactgctgcgcaccttcctcgaaatcgtggacagcggcagcttcgccaccgccgccgagcggctggcgctgacgccttctgccgtcagcgggcacatgcggcggctggaacagatcgccggtgccagcctgctggcgcgcaccacgcgccggctggagctgacccaggcgggcgataccctgtacgcctacggccgcaacatcctcgatctggagcgcgaggcccgcgccaagctgcggggcaccccgctgcgcgggcgtctgcgcatcggcgccttggaagactttgccggtgcctggctgccccaggtgctgcaacgctttgcccagtggcatcccgaagccacggtggaattgaaagtcggcatcaccgccgacctgctgcgccagcaggaacgtggccgcctggatctggtgttcggcaagcaatgcagccgggtcgaaggtagcggcacgctgctgtgggaagaaccgctggtgtgggcgtttgccgccgatcacccgttgccggcgcaagcaccgttgccgctggcggtctttcccgaaccgtgcgtctaccgggagtcggcggtcacggcgctgggccagacggatcgcacctggcgcatcgtcttcgagagcagcagcatggcaggctgcctgtcggcggcgcgggcaggtttcgccgccacggtcatcgccgacagccagcgcggcgaaggcttgcgcgtgctgggcggtgaggatggcctgcccgaactgccggcggcgcgcttctacgctttcgccggcaaggacagcccggccagcacggcgctgatcgaggcggcccgacgcgccggccaaagccggtttactccgcgagggctgcgggaccgatag

SEQ ID NO: 502146 - DNA, 891 bp, Stenotrophomonas maltophilia
atgcaggactatcaagtcgccacgaccgaacggctcgacatcgcctatctcgaatggaaccggcagggagcgcgaaccgccatcctgctgcacggttggccggacagccccgagtgctggaaggccgtggcgcccatcctggccgacgctggctaccgggtgctggcgccggcgctgcgcggttttgcgccgacccggttccgagaggccggcgcgccacgcagcggccagttgtccgccctgggccgtgacctgctggacttcatcgacgtgctcggcttggcgcagcccgcgctgatcggccatgactggggcgcacgggccgccgccaatgcctgcggcctgcgcgatggcgtggcctcgcacctggcgatgctgtcggtcggctacggcaccaacgacccgaaccagccaatgtccttggcgcaggcgcgcaactactggtatcactggtacatggccacgccgcgcggcgagcgcgtggtgcgggaagaacgcgaggcgttcgcccggcagatgtgggacacctgggcaccggccggctggtacgaccctgccgatttcgacgaggcagcgcgggcattccagggcgaggactgggccgagatcgtgctgcactcctaccgccaccgctggggcttcgcagagggcgacccggcctatgcggaggacgaagcgcgcctgaaccccgcgcccgtcctgtcggttccgaccctggtgctgcacggcggggccgatacctgcaaccaccccgacagttccaaggggcgggaagcgttctttacgggccgctacgagcgacaggtgctcgatggcgtcggccactttccgcagcgggaggcgccgcaggcggtcgccgaggctgtttcgcggttctgcgcatcggcgtga

SEQ ID NO: 502147 - DNA, 324 bp, Stenotrophomonas maltophilia
atgactgaaaaagcccaacccaagagccgcattctggaagcggtgcatgaaggcgcccgcgatctgcaccacctggggtttatcgacaagcgcaagatgcagaagtacgacctgctgtgcctggagccggtgcaggactacgatgccgccaagatcaaggcgctgcgcgagcgcctgcaactgagccaggccgtgctggcctcggtgctcaacaccagcgcgtccaccgtccgtaagtgggaagtgggcgacaagcgccccagcggcccgtcgcagaaactgctggacatcatcgaacgcaagggcctggaagccgtgctctga

SEQ ID NO: 502148 - DNA, 372 bp, Stenotrophomonas maltophilia
atgcacatcttcaaaacccgtcacttccagcggtggatgcgcaagacggcattgggcgattctgatctgcgcaaggctgtccttgaaatgaccgccggactgatcgacgccgatctcggcggtggcgtggtgaagaaacgtatcggattggccgggcgcggcaagcgcggcggagtgagaacgctggtcgccaccaacaagggcaaccgctggttcttcgtcttcgggtttgagaagaacgagcgggacaacatcagcgacgccgaactgcaagccttgcaggactacgccgccgatttgttggagcgcacggccgcgcaactggatgccgccgctgccgacggtactttgctggagatcaccgatgactga

SEQ ID NO: 502149 - DNA, 1290 bp, Stenotrophomonas maltophilia
atggccaagatcaaactcaccaaatccgtggtcgattcggcggaacccgaagcccacgacgttgaactgcgcgacaccctcgtgcccggctttctctgcaaggtcacgccggctggtcgcaaggtgttcatgctccagtaccgtaccaatgccggcgaccgccgcaagccctcgctcggtctgttcggcgaactgaccgtcgagcaggcccgcaccaaggcgcaaaactggctggcggaagtccgccaaggccgcgatcccggcgcggccaaggtcgaggcgcgcaaggtgccgacgatgaaggagctatgcacgcgcttcatggaagatcactcgaagcgccacaacaagaagtcttcgcagaagacctaccagacctacatcgacaaccacatcatcccgaagctcggcaagctcaaagtctctgaggtcaagcgcgccgacattgccgcgatgatgaagaagatggaacacatcccgacctgcggcaatcgcacctactcgttgctgcgggtgatgttcaacctggccgaagtgtggggctaccggcccgaaggctccaatccgtgccggcacatcaaggggcttccggagaaaggcgaatcccggctcatcaccgacgaggaaatgggcaagctgttcgcctacctcgatcaagcggagatcgagcgcaccgtccgccccgaaaccctgctggcgatccgcctgcaattcgagttcgcggcacgcatgtcggaaatcctctctctgcaatgggactggatcgacttcgagaaccgccgcatcaactggcccgatagcaagaccggccccatgtccaagcccatcagcgaggaagcgcagcggttgctgtccaatgccacgaggtatgaagattcgccctacgtcatcacggccgcacgcgaccacaagcggcccatgtccaagggcgtttactaccatgcgtgggtcacgctcgccaagcgcgccggcctggctcatgtcggcacccacggcattcgccaccgctcggccaccgacattgccaattccggcgtgccgatcaaggtgggcatggcactgacggcgcacaagaccgtgggcatgttcatgcgctacgtccacacccaggatcaggaagaacgcgaggccagcgacgtggtggcgaagctgcgcaagttgatcgccagcggccagcaggccgcgcccgcgaaggccgaggaagcgacggaactgccgcaggcgctggccgagctgttcaagctgctcaagcgttcgcccgaactgctggaaaaactggaagccgcgtga

SEQ ID NO: 502150 - DNA, 1872 bp, Stenotrophomonas maltophilia
atggcactctcagacctggccgttcgacaggccaaggcaactggcaaggcatacaccctccctgacttggatggcctctccctggccgtcacggctgctgggggcaggacttggcacttccgctactactgggcgggcaagcagaagcggatgtcgctcggcacctacccggaggtgacgcttcgcgaggcccgcagcctgcgcgacgaagcgcgcgccctgctagccaaaggcaccaatcctcgcgttcaccgcaagcagaagcgcaccgctgtccggctcgccgacgagaacaccttcgatgcggtgtatcgcaagtggctcaagcatcgcgggctcagcctcaaggaaggccggcagacgaccctctcgatacttccgcgcatcttcgacaaggatgtgctgcccgccttgggcaagcggtcggtctatgagatcaagcgtcccgacctgttggaggtgatcgtcaagatcgagaagcgcaaggcgctctccgtcgccgagaaagtcagaacgtggttcaaccaactgttccgctacgcgctggtgatcgtgccgggcctggagcagaaccccgccgccgatctcgatgtggtggcgctgccgctgccacccgtcaaccacaacccgttcctgcgcatggccgagctgccgaagctgttgcagcggctgcgcagctatcgcggcaggcggcagacccagctcgggctgcggctattgctgctgaccggcgtgcgaaccggcgagctgcgacaggcgacgccggatcaattcgatctggaccgtgggctgtggatcatcccgcccgacgtcgtgaagcaactccagttggatatgcgcaagaagcggcagcagccaaaggacatcccgccctacatcgtgccgctgtcgattcaggccatggagatcgtccggcacctgctggatgagttcaagccggcccagcgccacctgttccggcacgacagcgacttgaagaagcgcatcagcgagaacacgctcaatggtgcgctcaagcgcatgggctatcaggaacgcctgaccggacacgggattcgcggcacgatgtccaccgcgctcaacgagatcggctacccgaaggtctgggtggatgcacagctctcgcacgtcgatcccaacaaggtcagcgcgacctacaaccatgccgagtacgtggagcagcgtcgccgcatgatgcaggactgggccgatcggctcgacctcttcgagcagaaccaggtcgaggcggccagcatgccgctcaccgtgcatctggaaggcgtgcccgcgttcccgaatgagcaaaccgcaagcgtaccctccacgccggttgccgcttcgccaatcctgctcgtgacgaagccgggcgacgccatgccgttggtttctgccgccgcacatcggctgccggcggttccgccccctcgatcggccgcgccgctggcgccttcggacattcagcgcgagaggatggaactgttcgatgtcttcgaagcgccgcacaaccttcccgtcgcggcgtttgccaagatggcgggcaagtcccgcaggtggatcagctacgagatcaaggcgggcaacttgctggcgttgaacgtgggcaaccgcggccagcgcgtgccggactggcacctcgatccactcaagcacgagctgatccagtccgtcctgaagctgaccaggggtgcggacccttggcagatctaccatgcactgctgcaaccgcgctcgacgctgcgggggcgttcggcgctggagggcgtgacggccagcaatctcgacaagctcgtcatggccgtgagcacagccgtgaaggaaagcgaatggaccccgccgcgagtcgggggtacgcgtccagccatgtcatcttga

SEQ ID NO: 502151 - DNA, 165 bp, Stenotrophomonas maltophilia
atgagagcggcctggcggcggcactcagacgaggccagggcgcgggccaacggacacgagccctacgcgtacctcaaggacgtgcttgagcggcttcccacccacccggcaagccgcatcgacgaactgctgccgcaccgctggcgccagacgacttcagtctga

SEQ ID NO: 502152 - DNA, 774 bp, Stenotrophomonas maltophilia
gtgccggtggggcggcccctttggatcgaacgctttggcattgccaagagcgtcgaacacggtcacgatttaaaccacgttaaacttaactcattcaacggcttcgagatcagttgccacgagttcaccgcctggggggagctggatgtggaatcgagtgacatcaccgccgaaattcgcatggccgtcctcggcgaatgggtgcctccccagctcgccgacgtgctcgccctgcagcgtgccgaagagccggagactcatgccgtcctggccggctggacagattccggtcgaggcgcggagatgccggacgacggcttcgacttcgccttgtctgcggttgcccggcagtggcctggctgggtatgcgaaccgctgtggcatgacacgctggcggtcgccgtggccaagcgctcccacctgctggcccaccgtgaagtgccgtgcggggaagtgctcaagcagcccttgatctgctcgcagtccacggccgatgaaccatggcgcatgaccgtgcagcgcgtgttcgagaacgcgctgcaggagcgagagcaagcggtggagacattcgatgtggcgatgacgttggttgccgccgggtacgggatcgccattgcgcctgccgcgagactggcgagctacctacgccgaggcatcgccgtgcggccgctggccggcgcaccaacgatcgtgatggcttacctgctccgccgcgatgcttccttgtcggacacccaggcaagattcgcccgccgcgcgcgcttggtgtcctga

SEQ ID NO: 502153 - DNA, 141 bp, Stenotrophomonas maltophilia
atgggcaagatcgagcgcggcgagcatgtccccacgctccccctcatcctcaagatcgcccgtgcgctgaaatgcagttccgcccacttgatgactctgaccgaagccaagctggcagagtcggccccatccgcggattga

SEQ ID NO: 502154 - DNA, 1839 bp, Stenotrophomonas maltophilia
atgctctcgctgttccagcgcaaacgggtgccacccaccgccggcacgccgcccacctccgccatcgaaactccgaaagggtcgatgcggccggagtcggccgcatcgctgctggccacgccgcgccggcagaaactgctggaacacatctggcagcgcacatcgctctcgcgccggcagttcgccacgctctacctcgccccactggagcgctacgccgagctggtccagcagttcccggcctccgagaaccaccaccacgcctatccgggcggcatgctggaccacggcctggagatcgtcgcctatgcgctgaagctgcggcagtcatacctgctgcctgcgggcgtcacgccggaggcacaggcggcccaggccgaagcctggaccgcaggcacggcctacgcggccctgctgcacgacatcggcaagattgcggtcgatctgcacgtcgaacatgccgacggcagcgtctggcatccctggcacggcccgctgcgaaagccctaccgcttccgttaccgaaaggagcgcgagtaccgcctgcacagcgccgccaccgggctgctctacgcgcgccttctcgatcgggacatcttcgactggctcagcggctatcccgacctctgggccgcgctgctgtacgtgctggccggccagtacgagcatgccggcacgctcggcgagctggtcgtgcaggccgaccaggcatcggtcgcccaggaactcggcggcgatcccagcaaggcgctggcggcgcccaagcatgcgctgcaacgcaaattgctcgacggcttgcgctacctgctcaaggaagcgttcaagttgaaccaggccggcccggcggacggttggctgacccaagacgccttgtggctggtgagcaagaccgtctccgacaagctgcgcgcacatctgctgtcacagggcatcgacggcatcccggccagcaatacggcggtgttcaacgtgctgcaggatcacggcatcgtgcaaccgacgccggatggcatggcgatctggaaggctaccgtcaccagcgacgcgggctggtcgcacgcattcaccttcctgaaactctcgccagcgatgatctgggatgccgtcgaccggccggcgccgttcgcaggccgtgtgcaggtcgaagaggaacaggcggagccgccgccgctggcgccggcggtggccgatgggccgcgcgtggaaggcaccgaagctgcacccgcgagcacggcgccgatcgcatccgcagccacggacaccggcgtggccgcgctgctcgacctgctgggcgacactgctccatccacagcgccggagatcgccgaggccgagccggccccttcgaccgtgcccccgccgcagatgagcctcgcgccttcccaggatcgcgcggagccctccggggcgcacttcatggcctggctgcgtcagagcatccagacgcgcaagctcatcatcaacgacgccaaggccctggtgcataccgtcgccggtacgacctatctcgtcagccccggcgtgttccagcgctacgcgcaggagtaccttcaagtcgccgcgctggccaagcaggagaagctggaggggtggcagtgggtacagaagcgcttcgagaagctgggacagcaccgcaagcagccgagcgggctgaacatctggacctgcgaagtcacggggccgcgcaagtcgcgccggctgcacggctatctgctcgccagcccggaggcgctgttccgggagacgccgccagacaacccatacctgcggctcctcaacgaggccgcaaagcgcgaagattcagcccttgggggcgaggacaacgacgatcaggggtag

SEQ ID NO: 502155 - DNA, 921 bp, Stenotrophomonas maltophilia
atggataagacctacgcggacaccgttcgcctgctgctggccgtcgcgcccgacgtgttcgccaacgacatcttcgccatgaagggcggcacggccatcaacctcttcgtgcgggacatgccgcgcctttcggtggacatcgacgtggtgtacctcccgtggcagacgccgcgcgacgaagcgctgcaagccatcaaccaggagctggccgccatcgccgcgcgccttgcaccgctgggcgtgcaaacacgcctggttcgcgccaaggacctgggggacaccaagctgatcgtcgagaacgacgccagccaggtgaagatcgaggtcaacgtcgtgttccgaggcagcgtgctgcccgtcgagcggcggccgctgagcgcaaagaccagcgatctgttcggcgtcgagttcgagctgccggttctggcaccggacgagctgtacgccagcaagctggtggccgcgctggatcggcagcacccccgcgacctgttcgacgtgtggcagctctacgaatcgggcgacatcagcgacggcatggtcgagtgcttcgtgatctatctggcgggccacaaccggccgccccacgaagtgctgttcggtaacgacaaggacatcgccggcgagtacgagcgggcctttgtcggcatgaccgaagtgggctgctccctggaaacactgctcgacgctcgcgccagggtgcggcgcgagctgccacagcgactgagcaccgcgcacaagcagtttctgagcgggctggcgcgcgcagaaccggactggtcgctggtgcaatgccagcacgccgcgcaactgccggcactgcgctggaagctcgccaatctcgaaaccttccgcaagcgccgtcccgacgacttcgcagcgcaatccgccgccctcgacaccggcttgggccagagctga

SEQ ID NO: 502156 - DNA, 801 bp, Stenotrophomonas maltophilia
atggctctagtgactgattggattccgtgctatttttacagcatggatggaaattctaggcatcaggtaatcaagcggctgcaggcgggactcccccgcggggcgccgttcgaccttgccaccctgagccagttcggggtgtcgccccagctcgccgcccactatgccgacggcgggtggctcgtgcgcttggcccatggcgtctatgccttcccgaacgatgaattcggggtctacggtgcgctgaagttcctgcaacagcgcgtgcccggcctgcacgtcggcggcaagagcgccctggccctgcagggtgtgcggcacaacctgggcagccgggaggcgctggtgctgtggggcgacggtcgctttgcgttgccggtctggttcacttcgcgctttccggcccgctacgtccacgcccgcctgttcgactggccggacacggcgctggccggcaagaccctgaccacgccgcctggcctgcccgaggatctgcgggtggcagcccccgaacgtgccgtgctggagctgctgtacgaagccggcgtcaagcagagcctcgaagaggcccgcaacctcttcgatggactgcgttccccccgcaaggacttgctcgggcaactgctgtcctgctgcgccagcgtgaaggccgtgcgcctgttcctgacctgggcgcgcgagaccagcctcgtggatgtcgatgccctgctggagcagtacccggttcgcaccggcagcaacacgcgctggatgagccggctcgatgacggcaccttgctgagcctgagacctcatggataa

SEQ ID NO: 502157 - DNA, 369 bp, Stenotrophomonas maltophilia
atgaccaccaacacgcacaacgggcgctggagccaccggctgggccggggggctggccgtgcctggcgtggatacctgcgccgcgagcagcgtgtcgccggctggctggtgacgcgcggggtgcccgcgagcgcggcgacggcggtgctctggatcgtgaagctggccgtgcttggtgtgctgctctactccgcgttctggctggcgctgctgctggcctttgcagggatcgctgcctggatggtacgcaacgtcgatgccgacgaaagcagtgatgatgacgagcctcaatggcgaaacggcctggacggatacggtctctaccggggcgaggtacgcattgacggcggcagcgcggacgacgagtag

SEQ ID NO: 502158 - DNA, 1524 bp, Stenotrophomonas maltophilia
atgacgctctacaccacggactacttggagtattacctgaccctggtggcttgggtggtcaacaacggcatctggagcatcctcgtggccagcggcgtgttcgcgctgccgttcgtggccatcgtgatccaggaatggctcaaggcccgcagcgaaggtgcggacgagggcaacaagggcgtgctgtcgtcgatgcgcatcgagaaccgggtgtgggtggcgatcgtggtcatcatgttcgccggcatcccgttcatcccggtggatctcgccacgatcaggttcgacaccacgcgctccgcgcaatgccaggtcagtgtcccgctgcccaacgacacgggctggtccaacgtctacacggcgctcaacgaccagagcgcgctggtgccggtgtggtggttcttcatgcacgcgctgtcgaaagccgtgacgggctccgcggtggcggcgattccctgcggcacggacctgcgtcagattcgcatggatgtggatgccacgcgcatcgacgatccggtgctggcacaggaggtcgccgacttcacgcacgactgctacgggccgtcgcgcgccaagctgttcatgaaccggccgacgctctccgacgagcaaatgaacgacgtcacctggatcgggtcgagttacttcctcgacacgcccggcttctatgacacctatcgcgccaagaccccacgcacggcctggccctacgacgcgacccgcgatgcagggttggcacaggtggacagcggcggcggctatccgtcctgccggcagtggtgggccgatggcggccagggactgcgcagccggctgctggcacaggtcgacccggacctactgacccgcatcgggcgctgggcgggcttcctgtcgcagagcgaggtcaatgactcggtgatccgcgccgtggtctcaccgcgacagcagaagatgaaccagggcgccgtctacaccgactacggtggccagatcgacaagacgctgccgaacgttgtcacgcgcggcgcaagcgacctggggttgaccgtcggctcgctggccttctttcccgcgatggacgtggtgcgccaggcgctgccgatggtgctgacgatgctcaagatggcgctcgtcatctgcatcccgctggtgctgctgatcggcacctacgacctgaagacggtggtgacggtgagctgcgtccagttcgcgctgttcttcgtggacttctggttccagctcgcgcgctggatcgacagcacgatcctggacgcgctctacggctgggggtttggcgcggacaggccgcacacgaacttcgatccgttgatcggtttgaacaacgcctttggcgacatgctccttaacttcgtcatggcgatgatgttcatcgtgctaccgggtttctgggtagctgcgctcgcgtgggttggtgtccgcgtaggcaacatttcgcagatgctctcagcagccaccgatggcgccaaatctgcgggaggcaaaggcgctgaccttgcaatcaaagcagcgaaggcgaagtag

SEQ ID NO: 502159 - DNA, 354 bp, Stenotrophomonas maltophilia
atgagccggctcgcctggctgcggctgccatggctgttcaaccgccgcgtcggcgtggcgctgctgtggaccttgctggtggtcgccgccgcggtggcggtgaacatcgccggcatccacgtggtcggcggcgtcgagggctggcagcactggctgcaggcgcacgccggccacttcttcgtgtggcgtctgtgcctctacggagcgacggcttacggctggtggtggatgcgtcggcgcctgttgcggcgggagccgtcccgcgagacgcatcagcgcctgctgcgcacggagatcgcggccgtcatcgccgtggtcgcgctggaagccagccagctgctgcggcacggctga

SEQ ID NO: 502160 - DNA, 1407 bp, Stenotrophomonas maltophilia
atgaacgcctccctccctgacttcctgcaccgcgcgaagtcgcccctgcgggccacgctgctcgtggcggccatcacgctggtcgtcggcgtcgcctgggcgcagacccgcatcgaccccaatggcgtgaacgtcagcggcagcgtgatcggcgacgacgtgctctacagcatcggcggcggccgggccgtgtcgatgggtggtgccggcaacatgcagagcatcggcgtcggcgtcggctggaacagcaacctgatctgcggcgacatgagcatcaccacgacgctgcagaaccagctcaacggcatcaccaacggcttccagacgatcatgagcaacgtgatccagaacgccactgccgcggtggcgtcactcccggcgctcatcatccagcgcgccgacccgggcctgtacaacctgctcaccaacggcatcctccaggcgcgcctggatttcgaccgctcgaagatgacctgccgggccatcgccaatcgcatggcggacatggccggcggccaggccggctgggaccagctcgccgaagggatggcgctgcgggatgcggtcagcagcaccgatgccgtctccgccatcgagcaggccgagtccaacaaggggaacaacggcgtgccctgggtcggcggcggcaacgcgggcggctccggccagagttcgatcaaggtggtcggcgacgtgacgcgcgcgggctacaacctgctcaacgggcgcagcgccaccgatacctcgtcgatcgcgcgcagcgcctgcggcaaccgcctgacctgccagacctggtcgtcgcctggcgcggccgcggcctttgcgaaccgcgtgctgggcgaacgcgagcaacgcacctgcgaaaactgcacgaagacccagaccacgcctggcgtcgggctcacgccagtgatccaggaagagtacgagaccaagctgcaggtgttgcaggaactggtgacgggcgcccggccgacgacactggccaatctcgacgcggccggcagcagctcgctgccgatcacccgcggcgtgatcgaggccctgcgtgacgagcccgaccaggacgtgctgggccggcgcctcgcgtccgaggctgcgctgtccagcgtgctggagaaggccctgctgctgcaacgcacgttgctgaccggcaagaaggagccgaacgtcgccgccaacgagctcgccgtgcaggcggtggaacaggagaacagcgcgctggagcaggagatcaacaacctcaagaccgagctggagctgcgccgcacgctggccggcaactcggcgatggcgatcatccagcgccacagtacccgcgctgccggctcgcgcggcgtcttcgagggcgacaccacgcgcgaccgtctgcgggaagtccagaagccgcggagcggtacgccatga

SEQ ID NO: 502161 - DNA, 945 bp, Stenotrophomonas maltophilia
atgagcctcctgctggcatcccggcgcctgcgcgccaccgtcgcctcgctgctgctgagcacggccacgtcgacgttcgccctggacaccgccaccatcgtctcgtcggcgctgtcccccgactgcctcgaataccgcgtggtcggtatctgctactggctgtactgcacgcccttcggctgctcggttcgcacttccgtcaaggtgcgccactacgtccccgatgcggtggtgtcgagctactcgaacaccggagaaaacccgtggcaggaagtcagggcgatgagcatgcccaacccgaccgccaaggctggcggtgacggcacgaccaatcacgacaacgagaacaacctcgccaagttcaagaacgccgatgtcatcggccatccggccgggctggtgttcagccagttcgccagcgcctccggctacacctgcgaaggcgctggcacggccttcatgccgtatctgctgagcacgctcgacacgatcgcctggcgctacaacatcccggaagcgttctaccccgaagcgctcatccccggccggcgcgaaatcggtacgcgcaccggcctgaacctctggggcaacgtgtatccccgcggtggcttcctgcaccagaccgacgaccacaagagcggcgccgtggtcgcgcagcgcgcgggcgacatcgtgacgcgccgcaaccagattcacgtgtatcagcccctgctggccaacgcccgcgacggctactggccggccggcgcgctgatggagaccgacgcctcgacgggcaagtggcaggagctgacgcccacgctctcgaacagttgcgtggtcttcccgcacagccgcacccgcgtgcaggcccagcagggcgactacgcctgggccttgtggcggccgtactcctgctgccggcgccgtggccaggtcttcctcggcagcgtcgatttcatgtga

SEQ ID NO: 502162 - DNA, 444 bp, Stenotrophomonas maltophilia
atgccggcccccgtcttcaaggcttcgccccggctgccgaccatcagcattgcgcccggactgtgggcagtgctgttcatgtttacccagactgcagcagccgacgtgctcgtcgtcaccgacagccgtcatccggtgcaggctccagccggcgtgcggatcatcgagctggaccaggccacgcgcatcgaggtcgaactcgccgcgcacctaccggccgacccgcaacaggctgcagccctggtgcggcagcggttgcatgacggcggcgaggcccttcaacgccgcatcggccacgcctaccaaggtgtcgcggatgcctggggactgggcatcgccaagattcccgccgtggtggtcgatcgacgctacgtggtctacggcgagcccgacgtgccccgcgccgtcgcgcgcatcaacgcctaccggagcacgcagccatga

SEQ ID NO: 502163 - DNA, 519 bp, Stenotrophomonas maltophilia
atgaccgagcgcctgcgggacgggatgcgcattgcgctgaagaactccccgtggaagcagatcatggtgctgcctggcacggaatcgcgatctaaaagcaacgtgatgctgccagacggacgtaccgacatcccgctggcgttcgtcgaaattttcttgcgcacgcaggagcatgatccgcacgcgatcatcgaatgcaaacgaatcgccgggtcggacactcacttgtgtcgagagtacgtcgtcgagggcatggatcgattcatccaggagaagtacggcgagaaccatgctatcggcttcatggtggggtacgttcttgccggcgttccttcggaatccgcggatggcgtcaacgcttacttgagaagagtttcgcgctcggtagatcgcctcgccccgagcgacatcagtgacgggacttggcagagcctacacgcacgctccaagccgtcgatgccgattcgcttacagcatgcgtttcttgggttcgcgggcacctcagcgtcccgcacctga

SEQ ID NO: 502164 - DNA, 2964 bp, Stenotrophomonas maltophilia
gtgaacactgccacgctggaacaggtgctcgccgcaaccggctacctgccggacgggcaacccgcgcccggtcttcggttgggggccgaggcgcagtcctcgcgccacggccgcgtttttgttccggacgcattgtggcgcagcgcgtcgtcgttgaccgtctacttcaagtttgagcaaagcgcgcctgcagacgatctggtcagccagtggcgacgagaggtctggaacgaggggttcgcgccgttgctgtgggtgatctcgccgcagcgtatcgacctgtacaacggtttcggcacacccgcgaaagaaggcgatgcccagagacatttgattcggcgtttcgagaacatcgaagcttcgcttcatgaactggacgagttggccggccgactggcgatcgagacgggccaattctgggcccaggtgccggccatcgatcgcaagaccagcgtcgatcagaagctcctgtctgaccttggatgtctcgaacgcgatttggtcgcaggcaatctcgcgcgcgatgcggcgcaggccttgattgggcgcgtgatcttcacccagtacctgattgaccgcgagatcgtcagtgcggcgcggttgaagcgggtatgcggccgcacggcgttgccggcgatcctgcgcgaccggccagcgaccagcaagctgttcgcatggctggcccaggccttcaacggcgatatgtttccgccctcgtcggtgaaaacgacaccagcagctcaccatttgacgcgggttgcggagttcctggaggctgtcgatcctgaaagcgggcaactcagcttcttcccctaccagttcgacgtgattccggtcgagctcatcagctcgatctacgagcagtttgcacatgctgagccgcagactggaggaaagcgcacagaagcgttgcgaaacggcgtgcactacacgcgactgtccgtcgtctcgctggtcctcgatgaggtcatggatggtctatctggacgggagtcggtgctggatttgacgtgcggctccggtgtcttcctggtcgaagcgctgcggcgcttggttcatcttcgctcgcaaggtcagccgcccacgagggagctgatccgctcgacgctctacgggcaggtgtatggcgtagacattagcgaagccgcgattcgcgtcgctgcgttcagcctgtacctggctgcgcttgagctggaccctgacccgcaaccaccgcagtccctgaagttccagccattgatcggcaggacattgctcgtcggtgacgctcgtactgtcgaacgtgatggagatggcaaggccgtgctggcgacgccgacagggctgaagcagttcgaccttatcgtgggcaatcccccttggagctttagggggcagacaggaaccgaagcgcggcgcaagaccagggttgcgggcgtacctgcgcaaccgcgcggtgaaggcttggatttcgtgttgcgagcggcggagttctcacatgagaagacccgtttcggcatcattcttagcgcgatgccgttcttcagccgcagcggcaccggcatggcagcagctcagcatgtgatgcgagccgtggctccgatcaccttggtaaatctgtccaatttgtgcagttggctcttcgcgacagcggccatgcccgcagtggttctctttgcccgtcatcgaccgaagcagcgaacggatcaggtcacggtcgttcagatcccgtggacgcccagcggtgcaaggactcattcgttcgaggtggcgccgagtgacgtcatcactttgacactcgacgaaatccaagaacagccgttgaagctcaaggcagcagccgttggccggtgccgtgacctcctattgctggatgacttgacttcggcccacagaaatctgggcgagcaactctcattactcgacactaccttccaggttggattgattcgcggggccccagagaatcagacgcgcgatgctcgcccgctaaaaggattggatgtactgcaagtcaaagacatgcagcacttcaacattcccgatgatttgccgactttcagccaatcgaaggcacaatggccacgatcgcgggagatatatcaagccccgcttctcatcgtgaaggaaatgcttctggggagtccacgcgtcttggcggccgtctccgagcgggatctcgtcttcacgaactcatacttcgcagtgtctcttccgagagggcacacgcggacggcacatttgcttgccaccgtgttgagttctgcttttgcgacatggttcttctatctgaccgctgcagagtttggaatctacaagaggaagctgctggctcgcgacctcagcttcctaccggtgcctaatttcacgagcgcagtgaaatctgaggctggccagcgcctgctgcagattgagaagaatctgcgcgccaacggcaccgacgagaggggatgggctgaactggacgaagctgtcttcgatctgtacgaactgaacgatgccgaacgaactgtcattcgagacggcctccttcgcgccgggtggcaatgggaaaccggccgcgaatcatccgtggagccatcggacagtcgtactgaggtcacggcgtatgccaagacgttcctgtccgttatcgaggattggctttccgttcgcaataagcggcacatgcgcgccgaagtgctcgacttgccaagcagttcggccttgcgcgtcgtgcgctttgtcttggaagaggggccgggtaatgcgagcgtgagcgtcgtggcaccacaaggcgaattgggtgaagtactggcacgtatcggcaggcgcctgaaagtcaagattgcgaccgcgctcagtgcagagcgggaattgcgagtacacggacgcaacgaagtcgtgatcatcaagccagcagcgcggcgctactggatgggcatagcggcactggaagatgccgatgcagtggtcgcggagagcttttcagggggcaaagtttga

SEQ ID NO: 502165 - DNA, 477 bp, Stenotrophomonas maltophilia; identical to SEQ ID NO: 329349

SEQ ID NO: 502166 - DNA, 495 bp, Stenotrophomonas maltophilia
atgtctcttgccatcgccgactcccgcccggagtcgctcaccctgatcgccgcccagcacgaagactggatcatccagcaggccatcaccctgctggagaaccgcgtgttcaaggccggtccggcgctgggcagtcccgccgccgtgcgcgactacctgcgcctgaaactggtcgcggagccgaacgaaatcttcgccgtagtgtttctcgacaaccagcaccaggtgctcgcctacgagccgctgttcaagggcacggtcgaccagacttcggtgtatccgagggtggtggtccagcgtgcgctggcgctcaacgcttcggcgctgatcctggcgcatcagcatccctcggggaacaccgagccctcggccgctgatcgtgtgatcaccgagcggctgaagagcgccctggccaccgtcgatgtccgggtgctggatcacttcatcgtcggcaagggcagcccgtactcgttcgccgaagccggcttgttgtag

SEQ ID NO: 502167 - DNA, 744 bp, Stenotrophomonas maltophilia
atgcgcctgccttcattcgcccgccgtcatccccggaccggtctgctgatcgtggcgacgattgtggtggcctcgtggatgctgctgcgcgcgccgcatcctgcaaccgagcccatgtccctggccgccgccgggtccgaagcgtcgaaaccggccggcccgccctggctgtatggccgtgccgatgcgcgcttcacggtggtcgggtacgccgacctggagtgtccgtattgccgggcctacttccccgcgctcaagcgctggatcgacgcctatcccgaggtgaactggcagtggcaccacctgccgctgtccatgcacgagccggccgcgaccgccggggcacgcctggccgagtgcgcgggcgagacgggcggacatgccacgttctggcaggccgtggcgtggctctatgcgcacacgcgcggcgacggccagggcctgccggacggtctgcgctatcccgacctcacgccagccatgcagggttgtctcgacagcgatcgccccgatgcggtcatccgtgctcaggcggcggaagccgcacagcagggcctcgcggccacgccggccctgcaactgcgcgaccgcgagtccggcaagaccctcctgctgcacggccccgtcgaaggcgacgccttgctgtcggccatcgacctgcttgccgccggcagcacgaccgcggccgaacccgcccattccccagacatgcccgccggcgtcgccggtgacatgcccaggtag

SEQ ID NO: 502168 - DNA, 2889 bp, Stenotrophomonas maltophilia
atggcctggtcgctgccgtggtcacgcaagcccgacgcatcgcctgctgacgccgcggatgcggccgatgatgcctgggcacagcacgtaacggcgctggcggcacagggtgtcgccgagccgggcagcgcgctcggccggggccggcgcaggccggccacccaggccgaccacgatgcgctctatggcgtcgcgccgtcgttcgcggacttgctgccctgggtcgagtacctgcccgacacgaagtgcatgttgctggaagacggccagtcggtggcggccttcttcgagctggcgccggtcggtaccgagggccgcgagatggcctggctatggcaggcgcgcgatgcgctggagaacgccctgcaggactccttcgacgagttggacgacaacccctgggtggtgcagctctatgcccaggacgaggccgactgggacaactatctgcgctccctggcgaactatctgcagccgcgtgcgcagggcagcgcgttcagcgacttctacctgcgcttctttgcccatcacctgcgcgccatcgccaagccggggggcttcttcgaggacaccacggtgacgcgcctgccgtggcgcggccaggtccggcgcgtgcgcatggtcgtctaccgccgcacgcccgcgaccccgaccctgcggcgcggccagtcgcccgagcaggcgctgaccacgatctgtgaccgcctcgccggcgggctgggaaatgcgggcgtgaaagcgcggcgtctcggcgcggcggacatccacgcctggctgctgcgctggttcaacccgaatccgactttgctcggcgccacggccgaagatcgggaacgcttctacgcgctgacccgctacccggaagagcgggaggagggcgagatcgagctcgccagcggcaccgacttcgcgcagcgcctgttcttcggccagccacgttcggacgtgcccaacgggctgtggttcttcgacggcatgccgcatcgggtgatcgtgatggatcgcctgcgcacgccacccgtgacgggtcatctgacgggcgagacgcgcaaaggcggcgatgccatgaacgcgctgttcgatcagatgcccgaagacacggtgatgtgcctgacgctggtcgccacgccccaggacgtgctggaggcgcacctcaaccacctcgccaggaaggccgtcggcgagaccctggcctcggagcagacccggcaggacgtgcagcaggcgcgcggcctgatcggcagcgcgcacaagctctaccgcggcgcgctggcgttctacctgcgcggccgcgacctggcccagctcgatgcgcgcggcctgcagctcgtcaacgtgatgctcaacgccggcctgcagccggtacgcgaagaggacgaggtggcgccgctgaacagctatctgcgctggctgccgtgcgtgttcgatccggctgccgacaagcgccagtggtacacccagctcatgttcgcgcaacatgcggcgaacctggcgccggtctggggccgcagtcagggcacggggcatccgggcatcacgttcttcaaccgcggcggcggcccgatcaccttcgatccgttgaaccgcctcgaccggcagatgaacgcgcatctgttcctgttcggccctacggggtcgggcaagagcgcgacgctcaacaatatcctgaatcaggtgacggcgatctatcggccgcgcctgttcatcgtcgaggcgggcaacagcttcggcctgttcggcgacttcgcggcacgtttgggcctcaccgtgcatcgcgtgaagctcgcgcccggcgcgggcgtcagtctggcgccgttcgccgacgcctggcgcctggtcgatacgccgagccaggtacagacgctggacgccgatgcgctcgacgaagaccagaccgatgccggcatggccgtggaaggcgacgagcagcgcgacgtcctcggggagctggagatcactgcacgactgatgatcaccggcggcgaggacaaagaagaagcgcgcatgacgcgcgccgaccgcagcctgatccgccagtgcattctcgatgcggcccagcattgcgtggcggacgaacgcacggtgctcacgcgcgatgtgcgcgacgcgctgcgcgagcgcgcccgcgacgccacgctgccggagatgcggcgcgcacggctgctggagatggccgacgccatggatatgttctgccagggcgtggacggcgagatgttcgaccggtccggcacgccgtggcccgaggcggacatcaccatcgtggacctggccaccttcgcgcgcgagggctacaacgcccaactctcgattgcctacatctcgctcatcaacaccgtcaacaacatcgccgagcgcgaccagttcctgggccgcccgatcatcaacgtgacggacgaaggccacatcatcacgaagaacccactgctcgcgccctacgtggtcaagatcaccaagatgtggcgcaagctcggcgcctggttctggctcgccacgcagaacctggacgacctgccgaaagcggccgagcccatgctcaacatgatcgagtggtggatctgcctgtcgatgccgcccgatgaagtcgagaagatcgcgcgcttccgcgaactcaacgcttcgcagaaggcgctgatgctttcggcccgcaaggaggccggcaagttctccgaaggcgtcatcctgtccaagtcgatggaagtgctgttccgcgccgtgccgcccagcctttacctggcgatggcgatgaccgagcccgaggagaaggccgaacgcttccagctgatgcagcagcacggcatcagcgaactcgatgccgccttccgcgtggccgagaaggtcgaccgtgcgcggggcatcgaacccctggcgctggacacgctggcctga

SEQ ID NO: 502169 - DNA, 435 bp, Stenotrophomonas maltophilia
atgcctcggatctggattgacgcggccgccgtgctgctggcggccaccctgctcggcggctgcgccaccagcaaggagaagctgctgccgcacggcgacagcaccatgctcgacatctggaatcaggagaccggcggcggcgcgggcggcggccaggccgcgcggcaactgctcgacgcgcgccagggcctgcgccggccgctgaccgaggccgatgtgcaggcggcgcccggcgtgcaggcgcgctacacccgtaccgcgcagaacgagatctaccgccagttccaccgcctgccgaaccccgacctggtgatgtacgtgttcccgcacctggcgggcaccgacccggtgccggtgcccggctacagcacggtgttcccgctctaccagcgcgtgcagtacgcgatgccgggcgagcgcgtggaggactactga

SEQ ID NO: 502170 - DNA, 1434 bp, Stenotrophomonas maltophilia
atgaaaagtaatccgctgctcaagtggctgctgatcccgatggcgctgctgctggtgttcgtcggcgtcaaactgttctccggcgcccccggcggccagcccgcccccaagggcgcggccagtacgctcacgcccgaggagatgaaagccctgggcatcgcaggcgacacgccgcgcgataccgtcgccacgctggtggcccaggtgaagcagttgcgcaccgagctgcagagcgcgctcggcgacaacaagcagcacaaggccgagaacgagcgcctgcgtgcccgggaaagcgcgatcgaccaacgcatccagagcgcgctggaaggcgaacgcagccgcctggagcaggagcgcaatcaggtggccagcgacaggcagcagacccaggggctgctgcaggatctgcagcggcaactggacggcctttccggcaagggtggccggtccgatctgcccgtcgggctggggctggaagagggtgacggccagcgcttcaaccgcggcgtcggtggcacgcagtgggtcgagcccgacgatgccaaggtcgacgccaagaacgccagcaaggagccgagctttcccctgagcttcgggccggcccagaaaagcctgtcggccgcagtggaatccgtcgccgacgtcggcagccgcgcggtgggcgcatccacgaaggcggtctacaccgtgccgtcgaactcaacgctcatggggtcggttgccatgacggcgctgatcgggcgcgtgccgatcgatggaaccgtcaacgacccgtacccgttcaaggtgctgatcggcccggacaacctcacggccaacggcatcgacattcctgacgtggccggtgccgtggtcagcggcacggcctcgggcgactggacgctctcgtgcgtgcgcgggcaaatccgctcggtcacgttcgtgttccatgacggcaccatccgcacggtgcctgaggacagtagcaagggtggcagcagcggcggcaactcggggcacaacggcgccagcatccagggcggcctgggctggatcagcgacccttacggcattccctgcgtcagcggcgagcggcgcagtaacgcccagcaatacctgggcagccaggcactcatcaccgcagccggcgccggcgcggcctcgctcatcaagtccgacaacggcagcgtggccgtggtcgccaacagcaacggttcgctgggcaccgtcggcatcagcggaaacgaagcgatgggccgcatcctcgcgggcggcgtgcgcgacatggccgattgggtcaacaagctctacggccaggccttcgcggcggtctacgtgcagcccggcgccaaggtggccgtgcatctggagcaaccgctcgacatcgactacgacgccaaggggcgtcgggtccaccaccgcaccggagaagcccatgcctcggatctggattga

SEQ ID NO: 502171 - DNA, 915 bp, Stenotrophomonas maltophilia
atgaagcccattgccttgtcggccctggccggcgtcctgctgatcctcggtttcgtgccggccagccacgccgtggaaatcctgcgctgggagcggctgcccctgccggtgccgctggtggtcggccaggagcgcgtggtcttcatcgaccgcaatgtgcgcgtcggcgtaccggccagcgtcggcgaccacctgcgcgtgcagagtgcgggcggtgcgatctacctgcgggcgagcgagccgattccgcccacgcggctgcaactgcaggacgtggaatccggcgcgctgatcctgctcgacatcgccgccgagccggcgaaggacggcctggcgccactggagccggtgcgcatcgtggaagcggaagcccccgcgaagcgctacggcggcggtgcagcaagcggtgcggacgagcaggccgatgcgcccgcagacaaatccgttccccggcgcgaaacgccggtaccggtcgtgctgacgcgccatgccgcacagaacctgtacgcgccgctgcgcaccgtcgagccggtcgccggcatcgggcgcgtgaacctgcgccgtggcctcgcactggacaccttgctgccgacgctgccggtgcaggcgcgggcactggccgcgtggcgcctggaagaccagtgggtgacggccgtgcgactcaccaacacctcggcgcgctggctcgatctcgacccgcgcgccctgcaggggaacttcgtggcggcgaccttccagcatcccaacctggggccggccggcaccgcgtccgacaccacggtgctctacctggtcacgcgcgggcacggcctggccgagtcgctgctgccggcgctgagcccgattgacgccaccgtgaacctggcgccggccgccgcggccggctcgaccggaggagcgcgcgatgaaaagtaa

SEQ ID NO: 502172 - DNA, 693 bp, Stenotrophomonas maltophilia
atgagccgtttcaggaacgaggttgcgcacctgcaggcgcacgtgaagacgctgcgtctgggggccggcgcgttgttcgcggtggcgctgctgctcggcttcggctggtggagtgcgccgaagagtctgaccatccatgtgccgccggacttgcgctcgggcagcacgcgcaagtggtgggacgtgccgcccgagagcgtgtatgccttctcgttctatatctggcagcaggtacagcgctggcccacgaacggcgaagaagactatccgcgcaacctgcgcgcgctgtcggcctacctcacgccgagctgccgggccttcctgcaacaggactacgagtaccggcgtgccagtggcgagctgcgtcagcgcgtgcgcggcatctacgagattcccggccgcggctacggcgacgatccggccacgcgcgtcaaggtggtctccgaccgcgattggatcgtcacgctcgacgtgagtgcagacgaatactacggctccgagcaggtcaagcgcgccctggtgcgctaccccatcaaggtcgtccggctggacatcgaccccgagcgcaacccctttggcctggcgctggactgctacgccagcgcaccccagcgcatcgaaacgccgccgacgccgacccaggccggagcgcccaccaacgcctccggccacctgcagggagactccccatga

SEQ ID NO: 502173 - DNA, 411 bp, Stenotrophomonas maltophilia
atggccgtcccctcggagaccccgcaagacacgctggtgagcttcctgccgcaccggctgaatcgccagccggtggtcgtgcgcgggctgaccgccgacgagttgtggatctgcgccggcctgtcggccgcagccggattcgcactcggcctgccgctggcctggctcacgcacagcatcgccatggtgccgacgctgatcgtcgccggcatcgcgctgggcgtcttcgtcggcggtggttttctgcgcgcacagaagcgcggccggcccgacacctggctctaccgacagctccagtggcggctggcattgcggcacccggcgctggcagcgctcctgggcgggcagcgcctcatcacccgctcgggctactggacgacccggcgcaacgccaatcgaggtgcgccatga

SEQ ID NO: 502174 - DNA, 369 bp, Stenotrophomonas maltophilia
atgaacacgtcatcgacatcccatcgcattccgtcccgcatcgccgcaccgctgctgccgctggcgctcgcgggcctgccgctgtcggccttcgcgcagggcctgccgaccatggaggacccttcgcgcggccagggcagcggcatcctgcagaccttgcagaactacggctacgacatcgtgctgctgatcgcgctgctggtggtcgcctcgatgttcgtcggtgtctgctatcacgcctacacgcgctactcggagatccacaccggccgcgccacctggggccagttcggcctgacggtcgccgtgggcgcgatcctgctggtggtcggcatctggctgctcaccaaggccaccggcgtgctgtga

SEQ ID NO: 502175 - DNA, 240 bp, Stenotrophomonas maltophilia
atgacgccctctgccgatcaggtcgccgccttccaggccaacggcggcttcgcgccttcggccgtctctgccgtggtgctcgctttcgtgttcgccgtgttgctgctgtggggcgtgtgggccatgcgcaccgcctacgtcggctgggccgagcaccgcatcaccgagcgtcagtttctcgccgtcgtcgtgcgcttcgtggcgatgtacctggtactgaccttcttcctcctctcctga

SEQ ID NO: 502176 - DNA, 372 bp, Stenotrophomonas maltophilia
atgggacagaccaaccgccgcacatccgcatggcctgcgcttgccgtggtgttggctgtgtcgttctcggcgctgcagcctgccgccgctgccgacagcctcgcctcggagcgtgagcagctcgccgcgcttgcccgccaactcgacctgatcgaccgcctcgccgagcacgccgccaataccgctccgcaggagcgcgcccgctaccacttcgactacgcccaactgcgtgccgacctgaagcgcgttcgcgccggcctggaggactacctcgtgccccagcgcgcccagccgcgcgatcccgtcccgctggccggcgattacgtccgccgtgaccgcgccgacgacgacgacgaggagccatcgccatga

SEQ ID NO: 502177 - DNA, 201 bp, Stenotrophomonas maltophilia
atgagtgaagtcgagagcgagatcctcacgctggaggaagtcgcggcctacctcaaagccggcaaacggacggtctatcgccttgcccagaaaggagagattccagcgttcaagcttgggggaacctggcgctttcgccgctcggagctggatcggtggatcgccgaaagcatcaacaagaagaagccggaggccgagtga

SEQ ID NO: 502178 - DNA, 2880 bp, Stenotrophomonas maltophilia
ttgacgacacagcagcttctgacgccgcaccagagccagtactttgcttggctgctgaccaggcgtgcagcaggcgactccgtggagtcgctggcttcgactttggtcgattcgcaggtcgatctgaatccccatcaggtcgaggccgcgctcttcgcttgccgcaaccccctctcacgcggcgtgatcctcgccgacgaggttggtctaggcaagaccatcgaagccggcttggtcatctcccaacgctgggcggaacggcggcggaaggtgctcatcatcgttccagcgaacctgcgcaagcaatggcaccaagagctgcaggacaagttcggcctgcaagggctgatcctcgaagccaaaagctacaacgcgatccgcaaacaggagcagcggaacccgttcctgttcgcctccggtccgatcatctgttcctaccagttcgcgaaggccaaggctgacgatgtcaagggcatcgattgggacttggtcgtcctcgacgaagcgcatcgcctgcgcaacgtctacaaaaccagcaacgtcatcgccaagaccctcaaggaggcgttgtcgcgcgttcactccaaggtgcttctgaccgcgacgccgttgcagaactcgctgctcgaactctatgggctggtcagcttcatcgatgaccgcgtgttcggagaccttgatagcttccgctcgcaattcactggcagagagcaatccttcagcagcctgcgtgaccggctggcccccatctgcaagcgcaccctgcgcaaacaggttcagccctacgtgtcgtacacagcgcgcaaggccatcgtcgaggagttcacgccgtcgagcgaagagcaggaactttccaggctcgtcgccgattacctgcgccgccccaacctcaaggccctgcccgaggggcagcgccaactgatttcactcgtgctgtggaagctgcttgcctccagcacgcacgcgattgcgggtgcgctggagacaatggccaagcgcctccagggtgtgctcgacaaaaccaccgaggttcccgatctggccgaggaactcgatgaggactacgagtcgctcgacgaaaccgccgatgagtggaacgaccaaggctcagacgtcgcagcaccgagccgcttggaacgcgatgccatcgcggaggagatcgacgagcttcgccacttcaaaacgctggcaaccaacatccgggacaacgcgaagggcaaggcactgttcaccgcgctggatcgagccttcgccgaactggatcggctaggcgcgcccaggaaggccatcatcttcaccgagtccaagcgcacgcaggaatacctcctcaacttgctggccgacacgccatacggcgacggcatcgtgctcttcaacggcaccaatagcgaccagcgtgcgcaggcgatctacaaggactggctgaagcgtcacgaaggcaccgaccgcatcaccggctccaagaccgccgacacccgtgcggcactggtcgagcacttcaaggagcgtggcaaggtcatgattgccaccgaggccggagccgaaggcatcaacctccagttctgctcgctcgtcatcaactacgacctgccgtggaacccgcagcgcatcgagcagcgcatcgggcgctgccaccgctacggtcagaagcacgacgtggtggtggtcaacttcgtcgaccgcagcaatgaggccgatgcacgggtgtacgagctgctgtcgcagaagttccagctcttcgagggcgtgtttggggctagcgacgaagtgctgggtgccatcggctccggtgtcgatttcgagcggcgtatcgccgagatctaccagaactgccgagagcccgaggaaatcaagtccagcttcgagcaactccagctcgacctctccggcgaaatcaacgaggcgatggtcaagacgcgccaggtactgcttgagaacttcgatgaggaggtgcaggagaagctgcgcatgcgggccgacgacagccgcaacgcgcgcaaccgcttcgagcgcatgctgatggacttgacccgcgccgaactggtccattgcgccgcgttcgatgacgacggcttcgatctccgccacataccgactggagtcgagcacggcggcctcgcgggcatcgagctggggcgctacgaattgccccgccgctccggcgacgcgcatctataccgcatcaatcatccgctggcgcgatggggcatcgagcaggccaaggctcgcgcactcaacggggctcgtcttgtgttcgactacaacgcccacggtgcaaagatcagcacgcttgaagcctggcgcggcaaggccggatggctcaccgtgaagctaatctcggtcgagacactcggcaaccaggagcaacatctgctggttgcggcgggcacgaccgacggcgtcgtgctcgcggaagaagacccggaaaaactgctgcgcctgcccgcgaccacgcaggcggccagtctgttcaacgcccctgatgccaccctgctggccgacgtggaagcccgcaagaccgcactcctgcgcgacgtcaacgagcgcaacctcggctacttcgagcaggaagtccagaagctggatgcctgggcggacgacctgaagctcggtctggagcaggagatcaaggagatcgaccgcgagatcaaggaggtgcgccgaaccgccgcgacctcgccgacgctggaagaaaagttgtcatggcagaagaagcagcgcgaactggagagtaagcgcagcaagctgcgccgcgagttgtttgcccggcaggacgaagtcgaagcgcagcgcaatgacttgatcagccagcttgaagtgcaactccaacagcaggtcgaggagcgcacgctgttcactgtcgagtgggagctggtgtaa

SEQ ID NO: 502179 - DNA, 987 bp, Stenotrophomonas maltophilia
atggctagcggaaaattactgcggcaactcatcaaatcgggaacgcaaggcgatgcttcgggctttcgcgcggcgtccgaggcagtgatcaaagaggagcgcgagaagaaccatcatctgctcgcaaatgaccttgagcgcttgctttacggcgatcaggcaaacttcgggaagaatgcgcggaagctgcaaagtttgcccagcgtgccgacaaataaagacaacgggcttgcgctactagaagagcgtgccgtgattcgagaggagaaagacatcattctctcggatgcttcgcagtcggcactcgatgaaatcctgatggagcacaaccgggcggacgtgctccgatcctatggcctgcaacccgcgcagaagctgttgttttgcgggcctcccggctgcggcaagacgctggccgccgaagtcatcgcgcattccctgtccatgccactcgtcctcgttcggctggactcgatcatatcgtcgtttctgggggagacggctgccaatttgcgaaaagtgttcgattacgtcgcaacgcatcccgtggtcgcattgttcgatgaattcgacgccctgaccaaggatcgtggcgacagcgccgatcatggtgagctcaaacgctccgtaaatgccgtcttgcagatgatggacggttatcgaggcgagagcatcctgatcgccaccaccaactacgaaaccctattggacaaggcggtttggcgacgcttcgatgaggttgtgcgcttcgagatgccgaatctggagcagatcaaacgcttgttagctctgaaactctccggtgtccgccgcaatttcgagcccgacgatggccaggtggcatccgtgttcaaggggatgtcgcacgccgatatcgagcgtgtactgcggcgggccgttaaggaaatgatcctgtctgggcgggagtttttggagaagagtcatatcgataacgcacttgccagagagtatcgctacaagagttaa

SEQ ID NO: 502180 - DNA, 2358 bp, Stenotrophomonas maltophilia
atggcctatgagcacctgcgtctagatcgtgaagaaccgatcaatcttcgccacccgcggaggggcgggggcggttttacaccacaagacccacgtgcttacggcgcggcgcttggcacaaaattccaggctgcaagggggcgtatcactgacccggatcaggccgacattggcggctacgatgatcgcaagctgataaagattcagctgcgtcatggagaaagcctacctccggactctttccaggctattcccggtgtggaaatcgtcagccaggaagaaaaaactgttgttttggccttcgccactgatgaaggtttggacgaattcgaacggcgtttggcaacgttggcgcgtgacggtaacgttacacgtaaggatctgctgtatgccatcgaggacttcgatcactggacaccggaagatcgcactggcaacgctctccgtgaacagggcttccccgaagaaacgccattcacgctcgatgtcgaactatggccccaggagcgacaggacaagcgccaggccatggtccgtgccttcgtagacctgttgcaggaactcggcatcaagaagttggacgagctcaagctgccatccttggtaaagctgcgcgtgcgctgcgatcagaatcaagcagatcagcttttgcgccatcgggacgtccgcacggtggatcttccacctcggctgggcgtttccgttcagctgttgatgacagacatcaaccagtttccggtagttgatccaccgcctgccgatgcgcctgcgattgctgttctcgactccggcttgacctcgggccaccctctgcttgccgcagcggccggcgatgctcaaggttatctgaagcctcatcgcagcgccaatgatgccgagccgtggcatggcaccttcgtcggtgggcttgcgttgtacggcgatgtccataacgccatccagcagcgccaattcgtcccgcagctccgcttgttctccggcaaagtattcgaacacgacggacaggatcagaccgagtttgtcgagaaggcggtcgaggaagccgtgcgcgacctgcacgggcagtacggttgcaaggtgttcaatctcagctatggcgacctgaataaggtgtacgacggtcggcatgtccgcgggctggcctataccctggatcgtcttacgcgcgagctgggcgtgttgttcgtggtgccggcgggcaacttgcagctcaaccagctcccccaagatgcccgtgggcaatacccccactatttgttcgaggagcacgcccggctgctggacccggccacggcgctcaacgccctcacggtcggcggtatcagcctgttcgaggccacgcgcgacgcgcaaaaccatcccaacaccattgaagatcacatcctggcgcgggcgaaccagcccttcccgttgacgcgacgcgggccatccatcaacggcgccatcaagccggatgtggtggaacatgcggggaacatcgccctgatgcttacaggcggccgccctcgccatacggggctgggtgtcgtgtcgctcaacggcggatttgccacccacggattcgcgttcaaggaggacatcggcaccagctatgccgcgccgctggtggcccacaaagccgcgcggctactggccgaagtgcccgacgcttcgcccagcctgctgcgcgcactgatcggcgcccatgcccgctggccgcaagcctgcgaagcgctgttgaaccccggcaacaatgctgaaggccgcgacaaactcctgcgcctcgtcgggtatgggcgcgtggacgatgcggcgctgttccgctcgcttgatcacaccgtcaccctgctggccgaagagcgcgtcggaaacgaccagcaccacttcttcgaactgcctgtgccggacagcttctgggccaacgggcgccgtacgcgcgaaattacggtggcgttggcctacagccccgaggtacgcacgacccgcctggactatcgccgcacgaaactctggttcaacctcgtggtagccgacagcctggatgacgtgactcgtgccttccagcgcaaccgggaagaaggtatgggggagcacagcaatggccgctggctgcccaacgacacccgcaagaacggcacgttgcaggtctctcgatggcgcttcaaacaggcgctggccaacggtcacaaggtgttcgtcgtagtgacccgacaagatagtccttggtccgatgggcgcgatggggacgagccctatgccgtcgccgtggtactggcggatcgggagcaggccaacgctcagctctatgcccaagtgcgggcggcgctgcaagcccgtgcccaggcacgtgcgcgtgctcggattggcgggaggggctga

SEQ ID NO: 502181 - DNA, 138 bp, Stenotrophomonas maltophilia
atggctgcgctcgaacctcagtacatgaccattctggagacggtgcaggccaagcgatttgtgcctttgcgctcgcaccaaaatttcagatcccaatcattgggctatccggggaagcaggtgcgtcatcatggataa

SEQ ID NO: 502182 - DNA, 600 bp, Stenotrophomonas maltophilia
atggataacacccgcgacccgtcacttcggcttcgtccatgggcatcgctggtgctctttctgagcgcctattcgccccttatgctgattctgatcatcaaggattacgatgcaaccagccccggtctgcttccccagaatccggtattcagcggcatcctgttgctgatcgcagtgttcagcagtttggctgtgcttcgttccgtcagagaaatcgatggcgggctgacggtgacggtcaccaaggcgtccaacaaatcgggcgacatgttcggctacaccatcccctacatgctttcgttcatgaaggtggacctgggagactggcaggtcattgtgagcctcgccctttttctagccattcttttcatcatggcctaccgcacccagacggttttcgtgaacccgattctcgctcttgcgggttacatgctgatcgattgcaccttcaaacgcggtgacaaggaaattcaggcgatggtcgtgacacggcaaccgctggccgtgggtgacacttgccgcatggagcggatgtcgcactatctgtatgtggccgtcaaagacaacgccaatctggataaaaagggcacagaaaaatga

SEQ ID NO: 502183 - DNA, 939 bp, Stenotrophomonas maltophilia
atgagcaacaaggcgcacaaggccaccttgaaggcgatcaaagcgatcgatctaaaaaaatgggtggtcactttctggcttgtcaagcgctacatggcaaatcacgcggcacattactcagtactgcgcgtcaacaccgatgccaagctccagaagcggttgaagggctatgtagtcaatcagttgcagggcaaggactttcacttggccgaatacgatttcaataatgccgatggtgatgacacgctgttcacgattacggcagacgccaccgatttccctaaagtcgaagtggcgataaacgctggctttgacaatgccatcgccaaggaataccaagacctgctcaattcgtgggcgtatgtcgtccagcttgaacacggcaatgatcgactctacgcctggcgcaagatcagcacactcacccagccaaagaaagttcaatcgcgccaggcgacgttctttgtcgaacacaaattggtggacgtagaagacaaggaagtctttctgatcgatccgcgcttcgacttcttcgtgcatggcggcatgatcttcattgccaacaagaaggagttcgaaatttccatgaacttccgcgagggcatgaaggccaaggctgccgaggtcatccagaacttcaatgagagtggccgtttcaagaatgtcgacctcattcagaagcacgtgggcgacaacctgcaccacttgcgcaagatggcatcgatcctcaaggccggttactaccaacagcccgactatatccagcgcatgattgaagtcagcaaggaagaaggctgggagctgaaagtcgaggatgggcaagtcgtggtcgaggcggaaacgatcgacgtgttgttgaagctgctcaacaacgaccgcctgcgctcgccgatcaacaacgaaattttcgacgcggccgccaaggcacctgtgaaatag

SEQ ID NO: 502184 - DNA, 1701 bp, Stenotrophomonas maltophilia
atgagcaagcaaaaacttgaactgacttggatcggcaaggagaagcggcccaagctggagccgcgcatcctgctggaagatccggaaaagtcatatcacgcgaagcatcgcgtgacggacaacgacatctttgacaaccggctgatcttcggtgacaacctgcttgcgctgaaagcattggagcaagagttctccggcaaggtgaagtgcgtgttcatcgacccaccatataacaccggcagcgccttcacgcactacgatgacgggctagagcactcgatctggcttggcttgatgcgcgaccgactggagcttattaagcggttgctggcggaagatgggtcgctgtggataaccatcgatgacaacgaggcacactatttgaaggtgctgtgcgatgaggtgtttgggcgggcgaattttgttgcgaacattgtttggcagtcgaaggatacgccaggcaacaacgcatccacgattgcgcagacacacaacatgcttctggtgttcaagaagtcggacttgtggaagccaaacctagtccctcgaagtgaaaagcagatagcaaattacaaaaatcctgataacgatccgcgcggcccttggctcggcactccgctgacgcgtgcagagttccgtgagcgcgactactacgcactcaccaacgatgccggacgacaagtattacctccaaaaagcagttcttggcggcgtcctccggacgaaatcaagaagctccaaaaggagaagcgcatctattggggaaaagatggcaacgccgaattccctgtcgagaagaagtttctgtcggaagtgaaaggcggcgtggtgcctcaaacttggtggccatacgactttgcaggcagcactcgaaatgccagtgcagagatgaagggcatatttgctggtgaaaaggcttttgatacgcccaagcccgagaaaatcatccaacgtgtgcttgagattgcgacgattgaaagtgatctggtactcgattccttcgccggatccggcactaccggtgcggttgcgcacaaaatgggtcgccgctggatcatggtggagctgggcgatcactgccacacccacatcattccgcgcattaagaaggtaattgatggcgaggaccagggcggtatcagcaaagcggtgaactggaaaggtggcggtggcttccgctattaccgtcttgcccccagcctgatcgtcaatgaccgctggggcaatccggtcatcaatccagaatacaacgctgcgcagctggccgaggcgctggccaagctggaaggctttgcctacgctccgtcggaaacgcactggtggcagcacggccattccagcgagcgcgatttcatctatgtcaccacgcagaacctttccgcagagcaactgcaagccctgtccggtgaagtcggccctgagcggagcctgctggtgtgctgcgccgctttccacggagtcacggcggccaaagcggcggagcgctggccgaacctgacgttgaagaagattccgaagatggtgctggcccgctgccattggggccgtgacgactacagcctgaatgtgaccaacctgccgatggcggagattgagaaggctgagcctgcggccacgttcgataacagcaagaagatcaagaacaagaacgcggccctcgccaacgcgggacagggcggcctgtttggggagaacgaataa

SEQ ID NO: 502185 - DNA, 2736 bp, Stenotrophomonas maltophilia
atgaacgcccgcgtcctgcacgccgtcaccggccgtctgtctcttcgtccgccccaggcggaatcgctcatcaagctggttcgcgcgctcgatgccgcgcccgaactcttgggccacgagcgcgatgtctcggcgattctttccacgctgaaggctgagttcagcacgctggaggacttcgagcgcgagtttccgtcactgtgctttgcgctggcaacaggcgtgggcaagacgcgcctgatgggcgcgttcattgcctacctgcatctggcgcacggcatcaacaacttctttgtgctggcgcccaacctgacgatctacaacaagctgatcacggatttcacgcgcaatacgcctaagtacgtgttcaaggggatcgccgaattcgcgcagcaaccgccgctgatcatcacgggcgacaactacgaccagaccggcgcggcagtggacgatcagtccatgggctttgcccacgacgtgcgcatcaacatcttcaatatctccaagatcaactccgaggtgcgcggcggcaaggagcctcgcatcaagcgaatgcgcgaggtgctgggcgacagctacttcaaccacctggcgaacctgcccgatcttgtgctgctgatggacgaatcgcaccgctaccgcgccagcgcgggcgtgcgcgccatcaatgacctgaaaccgctgttcggactggaagtgacggcgacgcccttcgtggagtcgagccgagggccggtgccgttcaaaaacgtggtgatggactacccgctggcgcgggcgatggaggacggcttcgtcaaagagcctgccgtggtcacccagcgcaacttcgatgccaaggcgcatacgcccgaggagatcgagaagacaaagctggaagacggtgtgcgcctgcacgagacgaccaaagtcgagttgctcacctatgcccgcgagaacggcgtcaagccggtcaagcccttcatgctcgtcatcgctcgcgataccacgcacgcggggcaactcttggcgcttctggagtcggaagccttctatgagggccgctaccatggcaaggtgattcaggtcgattccagccgtaccggcgcggaagaagaagagatgatcacccgcctgttggccgtggagagcgtggacgagccgaccgagatcgtgattcacgtcaacatgctcaaagaaggttgggacgtgaccaacctctacaccatcgtgccgctgcgcgccgccaatgcccgcacgctgatcgaacagtccatcgggcgtggcctgagattgccctacggcaagcgcacgggcgtcgcggcggtggatcgcttgaacatcgtcgcgcacgacaagttccaggagatcatcgacgaggccaaccgcggcgactcgccgattcgcctgaagcaggtcatcctcgatgcgccgagcgccgacgacaagaaggtcagcgtgcaggtcgagtccggggcggcggcgcgtctcggtttgacggacgcaccggtcgtgatcacaggggcttcagccactgaaagtggagcggaagtccccgcgcccaagccggtgttcaccacggaggcggagaagcaggccgcgcgtgtggtcatggacgtcatcggcaagtacgaggtcaagcgcgatctagtgcccaccagcagcgcgctgctgagacccgaagtgcagaaggaaatcctcgcggaggtggcggagcggttgaagccgctgcaaggcgaattgctcgcgggcgtggatgaatcagtccctgcacttgacttgtccgccgtggtggcgaagaccaccgaaatcgtggtgcagcagaccatcgacatcccgcgcatcgcagtggtgccgactggcgaggtcacgaccggcttccacgccttcaagctggatgtgagccagctccatctccagccgggtgagcgcgagatcgtcatccataacctgcgcaccaacgagcaggataccctggccgccgaagttgggctcaaggagctgcgcccggaggactacatcgtccacgcgctggtggacttcgacgacatcgactacttcacccacgccgatctgctctacgacctcgcgggccagatggtgcaacacctgcgcggctacctgtccgaggacgaagccatcagcgtcctcgatcgtgaccgccgcctgatcgcgcgcgaaatccacgcgcagatgatggcccacttctgggaagaggcgaccgagtacgaggtgcaggtcagtcgcggcttcaccgaactcaagccttgcaactacaccgccacggcaggccagacggcccaccacttccgggagaccgtgaccgagacgagccgcatcaagcagatgctgttcggcggattcgcgcgctgcttgtatccgctgcagaagttcgactcggataccgagcggcgcttcgccatcattctggagcgcgatgccctgaagtggttcaagcctgcgaaggggcagtttcagatctactacaagctcggcaccgagcagccggaatacatccccgacttcgtggccgagacggacgcgaccatcttcatggtggagacaaaggcacgcgccgacatcaacacgcaggaggtgcaggccaaggccgcagccgccatgcgctggtgcaagcacgcttccgatcatgcggcgagcgtaggcaccaagccctggaagtacctgctggtgccccatgacgaagtcagcgagtcgaaacggctcccggattacctgcgctttgaggtcaaggcgtaa

SEQ ID NO: 502186 - DNA, 750 bp, Stenotrophomonas maltophilia
atgagcgatccggccgtcgcggcacagcgccagcagcaacgacagcaaggcctgatcgccagcctggtcacgctgccgttccgcttcttcggcgtgctgtgcggcgcgctgctgctgtgcatcctgatcgaatgcgtcggcatgcacttcttctggcccgagcagggctggcgccacgcgcagggcatgctgcactacgagctggatcagctttccacgcatttcacccgcagcgcgctggtgcaggagccggggcgcaccgcgcaccggctggtcgagcagggctacgactggctgttcgtgaaaagcggtctgctggactggatacgcgacgcctcggcgcaggccagcgccggcagccatcgtccgaccaaggatttccgctactacatcggcttggtctatgtgaacgtggagagctacctgatcgcggcggcctacacgacgctggtcttcctcgtgcggctgctggtgctgtgcctgaccctgccgctgttcctgatggccgccttcgtcggattggtcgacggcctggtacgccgggacatccgccgcttcggcgcgggacgcgagtcggggttcatctatcaccgcgccagggccagcctgaccccgctggccgtgctgccgtgggtgacttacctggcactgccggtcagcgtgaacccgctgctgatcctgctgcccagtgccgcattgctcggcgtggcggtgtgcattgcggcggcgacgttcaagaagtatctgtag

SEQ ID NO: 502187 - DNA, 2157 bp, Stenotrophomonas maltophilia
atggcccaaccgcatgcggtcgaggtcttgctgcggccagcggtggagctttataccgtggcggtctgcaccggcgccgcgattctgtgcctggtggcaccgtggtcgctcgcgctgaacccgctgctcggcctgggctcggcgctggccttcctgaccttcggcgcgattcgcctgcgcgatgcctgggcgatcctgcgctatcgccgcaacatccgccgcctgccgcgctacgtgatgaccagccgcgacgtgccggtgagtcagcaacggctgttcgtcggccagggctttcgctgggagcagcggcacacgcaccggctgatgcagacctaccggccggagttccgccgctacgtcgagccgacggcgatctaccgggccgcccggcggctggaggagcggcttgagttcgcgccgtttcccgtctcgacactggcgcgcgcgctggcctgggacagcccgctcaacccggcgcgaccgctgccgccggtcggcggactgccacgcctgcatggcatcgagccgcacgaggtcgacgtcacgctgccgctgggcgagcgcgtcggccactccctggtgctgggcaccacgcgcgtgggcaagacgcggctggccgagctgttcatcacgcaagacatccgccgcaaggtccgcggcgagcacgaggtagtgatcgtcttcgaccccaagggcgatgcggacctgttgaagcgcatgtacgtcgaggccaagcgcgccgggcgcgaaggcgagttctacgtgttccatctgggctggccggacatctcggcgcgctacaacgccgtgggccggttcggacggatctccgaggtggccacgcgcatcgccgggcagctctccggcgaaggcaacagcgccgcgttccgcgaattcgcctggcgcttcgtcaacatcatcgcgcgcgccctggtggaactgggacagcggccggactacctgctgatccagcgccacgtcatcaacatcgacgcgctgttcatcgagtacgcccagcactacttcgccaagaacgagccgaaggcctgggaggtcatcgtccagctcgaagcgaagctgaacgagaagaacatcccgcgcaacatgatcgggcgcgagaagcgcgtggtggccctcgaacagtacctgtcccaagtgcgcatctatgacccggtgctcgacggcctgcgcagcgccgtgcgctacgaccggacctacttcgacaagatcgtcgcttcgctgctgccgctgctggagaagctcaccaccggcaagatcgcgcaactgctcgcaccgaactattccgacctgtccgacccgcggccgatcttcgactggatgcaggtcatccgcaaacgcgcggtggtctacgtggggctggatgcgctgtccgacgccgaagtcgcggcggcggtgggcaactcgatgttcagcgatctggtctcggtcgccggccacatctacaagttcggcgtcgacgacgggctgcccggcgccgcggcgggcgccaagattccgatcaacgtccacgccgacgaattcaacgaactcatgggcgacgagttcattccgatggtcaacaagggcggcggtgccggcgtgcaggtgacggcctacacgcagaccttgagcgacatcgaggcccgcatcggcaatcgtgccaaggccggccaggtggtcggcaacttcaacaacctgttcatgctgcgcgtgcgcgagaccgccaccgccgagctgctgacgcgacaactgcccaaggtcgaggtgtacgccacggcgctgatgagcggcgccaccgacagctccgacccgcacggcaataccgcgttcacgtccaacacgcaggaccgcatcagcacgaccagcgtgccgttgatcgagcccgcgcatgtggtggcgctaccgaaggggcagtgcttcgcgctgatcgagggcggcaacctctggaaagtccgcatgccgctgcctgcgcccgaccccgacgaagccatgccgaaggatctgcaggagctggccggctacatgcggcagcactacgtcgaggcaggagactggtgggagaaccaaggcatccccggcctgcaggacaaggcgctgcccgacgacctgctggacgacttcaagcagatggccgcggctgaagaggccgaagcatga

SEQ ID NO: 502188 - DNA, 534 bp, Stenotrophomonas maltophilia
atgaaccacatcgtcctcatcgccgccatcgggctgctgtccacgaccaccgtcttcgcccagaccgcctccgcgcccctgatcgtcgtcgaagaccgcggcggcacctccgcgctgccgtactaccggtccctgaatccccagccggatcaggccacgccgccggccccgatgccggccccgcgcgtgcgcaatgcggccgacgccgaagccgccatgctgccggtgcgctcgacgcaactgtcgccgggcgaggtgcagcgccgcgtcatccgggcgccgggcctgacggcactgttcctgatcggcgacgacgagcgttcgcgcgcctggctgcggcagcggcaggccgcgctgcgcgagctgggggccgtgggcctggtggtcaacgtggagtcgatggccgcactgacggcgctgcgcaggctggctcccggcctgaccctctcgccggcctccggcgacgacctggcccagcgcctgggcctgcgccactacccggtgctcatcacgtccaccggtgtcgagcagtag

SEQ ID NO: 502189 - DNA, 621 bp, Stenotrophomonas maltophilia
atggcagcggcaataggcactacgggccgggagcgtcggccatcccgcgtcaccatccgctgcgcctgcgccgtgctgctgctcgccaccggcaccgcgaccttcgcaacgccggcgcgggaagtgccgccgccggcctatcaactggcggcgcatcgtgcagacgtgccggcggcggtgctgtacgcggtggccttgcaggagagcggcgccatgctgcgcgggcgcctgatcccctggccgtggacgctcaacgtcgccggctcgccgcagcgctatgccacccgcgccgcggcctgcgcggggctgcaccgtgcgctcgcccacacgccggccaatcgcatcgacgccggcctcggccaggtcaatctcggctaccacacgcatcgctacacgcagccctgcgagctgctggacccgtaccgcaacctcgccattgctgcggaaatcctgcgcgaacagcacacgccgggcgaggactggctgcttgccatcggccgctaccaccggcccgccggcggggcacccgcggcgcgctaccggcgcagcgtgcatcggcacctgacccgcgtgctcgaccccgacgttcccgttccaaccctccaggctaccacgccatga

SEQ ID NO: 502190 - DNA, 720 bp, Stenotrophomonas maltophilia
atgatcctgcggtcgttgctcgctgccgtcgtcctgttcgccgctttcggcgcatccgcccagccggccccggtgacgaactcgcgcatggtgcccgcccaggtgcagccgggcactgatgccgcgctcgacgagaggcaggcgcgggaatgggggcttcagcccgaggagtgggcgcgttaccggcaactgatgcaggggccgctcggggtctattcgcccctgctcgatccgctcacggcgctgggcatcgaggcccgcagcgaggaggagcgcaggcgctacgccgagttgcaggtgcaggccgaggcccggcgcgtcggcaagacgctggcctaccagcgggcctacgacgcggcgtggcagcgcctgtttcccggccagccgcgcgtgagcctgcccggcgccaaggcgcagggtgccggcaacaccggctccgggcgcctggcggtcttcgtcaaggccgactgcgcaccgtgcgcgcagcgcgtgcggcagttgcaggcggccggcacggccttcgatctctacatggtcggcagccgtcaggacgacgcgcgcatccggcagtgggccacccaggcgggcatcgacccggccagggtgcgcgcccgcaccatcacgctcaaccacgatgccgggcgctggctgtcgctcggcctgcccggcgagctgccggccgtggtgcgcgaggtgaacggccaatggcagcggcaatag

SEQ ID NO: 502191 - DNA, 648 bp, Stenotrophomonas maltophilia
atgacctttccccaagcgccatccgagcgcaattcccgcacgcgctggctcaaggtcgccgcggccttctggctgctgctcatcagtgccgtggcactcatcaacagcgtcggcctgtcgcggctcaccgaacagacccagagcagcgcacaggatgcgcaggtcaacgcgctgggcctgcgcgtggccgatctcgaacgacaggccgatgcggacaagcgccggccggtgccgatcagccaggcagaattcgccaccgcgcggcaggcgctggacgagcggatggcgcgcctcgaagaggccgacgagacgagggccctggccgtcgacctgcagacgctgcaggcgcgcgtgaacggaatcgagacccgcctggagaggacccggcaggtggcatccgccgctcgcccgcgcgctccggttgcgacgaagcccaaggtgccggagccgccgttccgggtgctcggcgtggagctgcgtggaggcgagcgctttctgtcgatcacctccaccgccgcggcctcgcttgcgggcgcccggctgctgcgcgagggcgatgccgagggcggctggcaactgcagtccatcgaggcgcaggcgggcgtgttccaggtgaacggccagacgcagcgcgtcgcggtgccgtag

SEQ ID NO: 502192 - DNA, 570 bp, Stenotrophomonas maltophilia
atgcaaccatccatccgcgctgttcaccgcctggccctcgccgctggcttgctggccggcagcctgttcgccgtcggctgcgccacgaccgccgcgccgtctgcgccagcggtgccggccgcatcgccaaccgccgtcgcgccggagccgggtttcgttccggtggcccgctacggccgctacaccctggtcgagctggtgccggaacctgcgcagcgtgatctcttgcaacaggcggtggaggtctcgattccgcccatgctcgatgccagcgtgggcgatgccatgcgccatgtgctcctgcgctcgggctaccggctctgcgatgcgcccgaggccgccgcgctctacgcgctgctgctgcccgccgcacacctgcgcctgggcccgctgatgctgcgcgatgccttgctgacccttgccggccccgcctgggagctctcggtcgatgacttgacccgccaggtctgcttcagccggcacggtgctcccaccttcctttccgccaacccgcccggcaccgccacgcccgtgccggacgccgaccggcccgaggagctgcagccatga

SEQ ID NO: 502193 - DNA, 2262 bp, Stenotrophomonas maltophilia
atgtccctcgatctcgaaaccgctgtgcagggcgacctgctcgaagcggccgcttcacccctcacgctcagcctgcaggacttcgtgtccgagttcggcgacgagctgctcgactcgctcaaccgcgccaatcctccggtctacaccggccaagtgcgggggcatcggcaactgatcctcgccgcgctcaagcgcaagctgttccccgcgcaagccgatgtggtccacgccgtcaccgagctgttggtcgatcgcggcgaacgcgccgcgatcgtcaatggcgagatgggctgcggcaagacgaccgtcggcatcgccacggccgccgtgctcaacgccgaaggctaccgccgcaccctggtgctctcgccaccccacctggtctacaagtggcggcgcgaaatccaggagacggtggccggtgccaaggtctgggtgctcaatggcccggacacgctggtcaagctgctgaaactgcgcgagcagttgggcgcgccggcgcagggccaggagttcttcgtcctgggccgcgtgcggatgcggatggggttccactggaaacctgtcttcgttcggcggcgcgcgcctcacggcgacgtgggggcctgcccggattgcgggcatgtcatcaccgacctcgacggcgagccgatcaacccggtcgaactcgaagccgaggagtcccgccgcaaatgcagccactgccgtgcaccgctgtggtcgttgatccgtcccagaggcctgtccgccagcgaccagtcctcgaccgtgctcaaggcactgaagcgtattccaaccatcggggaagtcaccgcgcagaagctgatacaaaagttcggtgacgccttcctcgcgtcgatgctcggggacaacatccacgagttcatcaacctgatggatggcaacggcgagctggtcttctcggaccggcaagcccatcgcatggaacgtgcgatggccaacatggagttcggcttcggcgagggcggctaccagccgtccgagttcatcaagaggcagcttccccaaggcacgttcgacctgctcatcgccgacgaggcgcatgagtacaagaacggcggttccgcacagggccaggccatgggggtgttgtcggccaaggcgcgcaagacgctgctgctcaccggcacgctgatgggcggctacggcgacgacctgttccacctgctgttccgagccctgccggggcggatgatcgaagacggctaccggccgacgaagagcggcagcatgacgtcggccgcgatggcgttcatgcgcgatcacggtgtcttgaaggacatctattccgagagcactggcacggcgcacaagacggccaagggcaccaaggtatcggtgcgcacggtcaaggcgccgggcttcggtccgaagggcgtgctgcgttgcgtcctgccgttcacggtcttcctcaagttgaaggacatcggtggcaacgtgctgccgccctacgacgaggagttccgcgaagtcgcgatggacacggcgcaggccgcggcctaccgcgatctggcgggtcggctgacccaggagctgaagcaggccctggcgaagcgcgacacgacgctgcttggtgtagtcctcaacgtgctgctggcctggccggactgctgcttccggtcggaaaccgtggtgcatccgcgcacgcgcaacaccttggcgttcgttccggctcagttcaacgagctggaggtgatgcccaaggaacgcgagctgatcgagatctgcaagcaggagaaggcagaagggcgcaagaccctggtctattcggtctacaccggcacgcgcgacaccacgtcgcgtttgaaggtgctgctggagcaggaaggcttcaaggtggcggtactgcgcgcgagcgtggatgcctcccgccgcgaagactggatcgccgagcagttggaccgcggcatcgacgtgctcatcaccaatcccgagctggtgaaaaccggcctggacttgctggagttcccgaccatcgtgttcctccagtccggctacaacgtgtattcgttgcagcaggccgcccggcgctcatggcgcatcggccagaagcagccggtgcgcgtgatctacctcggctacgccaactcctcgcagatgacctgcctggggttgatggcccggaagatcatggtgtcgcagagcacgtcgggcgacgtgcccgagtccggactcgatgtcctgaaccaggacggcgactcggtggaggtggcactggcacggcagcttgtcacggtctga

SEQ ID NO: 502194 - DNA, 306 bp, Stenotrophomonas maltophilia
atggcactcgcagtcctcaacctcgcgtcccaagcacgcttttcgcccgggcaggtggtcatgaccgccggcgtcgacgagctggtccgacaaggccggctcaaccccacgccgtacctgcgccgccatcttcatggcgaatggggcgacctgagcgacagcgatcggcggcagaacgacgccgcgctgaagtccggcgaggatcgtctgttctcgtcctaccaggtcacgcgcgacctgaagctctggatcatcactgaatgggatcgcagcgtcaccacgctgctgttgcccagcgaatactga

SEQ ID NO: 502195 - DNA, 1110 bp, Stenotrophomonas maltophilia
atggcactcatgtttccgcgcctggcgcgcaatttcatccgtaacggctacttccccaccgacgagccgacgctggagcgggccttgtccgcactggcgccgtctcccggctccatgtccatcctcgatccctgcgccggcgaaggcgtggcgattgccgaagcggcccacgccctcgggcgcgagcaggtccaggccttcgccgtcgagtacgacgccgagcgggcccgccacgcacggcaactggtcgatcgctgcatccacggcgacttgatggacatgctgatctcgcgccagtccttcgggctgttgtggctgaacccgccgtatggcgacctgagcaaggacgtgaacggcaacatcggctatcagggccaaggccgtgcgcggctggaaaagctgttctatcagcgcgcgctgccgctgctgcagtacggcggcgtgctgatcttcgtcgtgccgtcctacgtgctcgacgccgagctggtcggatggctgacgcgccactttgccgacctacgcatctaccgtgcggtggaaacgcagttcaagcaggtggtgatcttcggtcgcaggattcgtcaacgcgaccaggcatcggattcggtcaaggccacccgcggtctgctgctgcagatcggacagggcgacgccgaagccgaggaactgccgctcgaatggccgttcctgccgtacaccgtccctgccagcccggccgagcctgagcacttctatcgcgtgacgatggagcccgagcagttcgccgatgaagtcggccggctgcaaggactctggccggcgctcgatacccacctgggcgccgcgcagcaatcgctgcgtccgcccgcgcgggccttgtcgcactggcatctcgccctggccttggccgcaggcgcgatctccggcgtggtgacgtccaagagcgggcgcgtgctcgtcgtcaaaggtgatacccacaaggagaagaccctccagacggagtacaccgagcgcgacgacggctccgtggccgagacgcgcatcctcaccgacaagttcgtgccggtcattcgtgcatgggacttgacgctgggctcgcccacgtggggcgaagtgctgactatccgctga

SEQ ID NO: 502196 - DNA, 651 bp, Stenotrophomonas maltophilia
atgcctgcaccttcttccgcgaaaccgctgtaccgcatcgacgaatgccccgacctcatggccgacggttgcgtcggtgacgagcagggcaatctcgtctttctctcgatctgggcgcgcgacaccgccgttcaggagttcctcgcccgcctgaccctcggccgggatgaacagggactggatcagttccacgtcatcaccgagcagggcgcatccatctcggtcttcgtcggcaacgtcgagaacctggaaaagcgcatcacccgcgcctatcggcgaacgctgttcggttcgctgacgaacgtgtggctgttcgatcgtcgctgcgtgaagccagacaaggccaacgccagcgcgctggcgcttctgcccagggattccgctcaccggctcgaccggctgtggacgctggtgcaggacacctgcccgctgccactgctcgaccactggcgcgacaccgtgctggagctgttgcagacacggcggatgctgaccggtcttcccttggccctcgggccgctggaaggccatcggctggccctcgatgtcccggcgctgacgaaggcgttgggcgagctgatccgcaacggcacccttggcgccacgcagtacgaactggccgcgaacgcaccgcttcggcgtgtggcgtga

SEQ ID NO: 502197 - DNA, 366 bp, Stenotrophomonas maltophilia
atgggctggaccttcgttcgtcagacgcgcgatcagttgatccgcgagctgatcgctccgcaggcgtccgaacacgcttgctgcgaagtcatcgaccacacgctggacggcgacgttctgtggaccgtggttcgcgtcaccgccaggcaggcgggcgtcatgggcctcgtggccggtgagtccgtctgctacatcggctgccatctgctggaaagctcgggcggcgattggggctacaagtccctcgatgagtccgtgcatccgtactactactcgtgcccgctgcgctatctcgacatggcgccggtgcaaagccccgagtggcgcgagcgggttcaccgcttccacgcggggcgcgctgtctag

SEQ ID NO: 502198 - DNA, 612 bp, Stenotrophomonas maltophilia
atgatcaccatccccggccaactggccatcaagaccatccacggcaggaacggcgacttcaacgtcggccgcctggcgacctcgatcggcgagttcgtcgtgaagaacgccgaactcgatcagtaccgcgagggcaagtacgacggtgatttcgtcatcgtcgagattcgcccctccacgtacaacgccaacggccgcatggtcatcgagatccgcgcccatctgggcgggatgacactgtccaacatcgacgccctgagccgcgacgaagcccgccggctgagtccgcaggaagtcgatccggtcgacgaggaggcgcaggcgcccgtgccggcaacgcccccggccaagccgaaggcgaagccgcgcagtccgcgtgatcccctggtcgataccacgccgttcggcagcgaaccggctcccgtgtccgctgcggcctcggccgaggcagacgacgcggcgctgttcggtgccttgtggcccctgggcgagaccgtgaagctcgatgcgaccgtggatcgtcgtgtgctgcgtcagcagcgcgaccgtctcgacaagctgggctacgagttcgctccgttgtcccaggactggcacctcaaagctgcctga

SEQ ID NO: 502199 - DNA, 279 bp, Stenotrophomonas maltophilia
atgcccaggcagccacgatcttcaaggctgcgatgcggttccgaccgcgttgtcaaggcccgcctgctgttcgtcagttggatcaaggtcgacggcaagctcgtctacaaggccgaacccaagccgaccgagaccgacgagcgcgacccggaagtccctgtgacgtccgacgcgcccgccgcgcagcaagcctcggcaccggagccttccaagcccgacgccgatgctgccgacgacgctgccgatgcccccgcattggccgttgccgagtcgttctga

SEQ ID NO: 502200 - DNA, 366 bp, Stenotrophomonas maltophilia
atgactgttcgattcaaaggcacggagctgcggcccgtgctcgccgaagcggtggcgaatcaatgccgcgtcatcctggtcaaggatcagggcgtgtacttcctggccgagcgcggcgagcgccgacccgatggtcgccagaagaccatcgcctatgccgctggctgcaacccggatgtcgatgcgttcgatgactggtgggagctggcgcgcgccgagttcggcggcgatgactttggcgagttcttcgatccgaaggagggcgtgtttgcgtgcatcctgcacagcgaggacgatctcgacgtgtccgccaccgcgacacacctgtcgctgcaggcggttccttccgcgcccagcggtaactga

SEQ ID NO: 502201 - DNA, 801 bp, Stenotrophomonas maltophilia
atggatacccaagccatccgcgcacagatgccgacgctcgttgtcggtcatgtgccttccaacgtccgttcgttcaagttcaacatcttcgacggccagcccaaggtttcgacgctgggctttcacattgacccgaagcctttcgagggcaaggtcatcgccaccaccgacgaggccatcgtcgtcaagacgggacgagccgagttcgcggtgctcgatcgaacgctcgtgaccgaggtgcccgacgagggcgccaaggtgcaggtcgaaccctatgtcagacgccgcttcgacggtcagcgggcggacacgcccgaggagcagaccgagttcaccgccgacggccagccctacacggtgaagcggttcgtgctcggttccgcaccggcgaagctgccgatccccgagccgcgctgccccgagctgcaggaactgatcgaccaactggagcagttgcccgctcccgacggcttccggcgcatcacccacatgctggtggatgccggtgcgcgggacatcacctgggtcgatccgctgcccgccgacatcatccgcacgccgccggccatcggcttcaccgtcgccacgatgaagttccagggttgcgtcaccgtgctgtatgagcgtggcctcgacctctacgcggtggagctgcgccgcgacggcgagctgattgaacgggtcgatgaggtgttcttcgacaccctcggcgagacgctggaacggctgatcgacgacgggagctggcgccgcatccgagtgcagtgcctgttgtcgggtcgcaaggctgtccggcactga

SEQ ID NO: 502202 - DNA, 717 bp, Stenotrophomonas maltophilia
atgtcccattccaacaaccccttcgtccgcggctacgatggcctgtccgtgcaacggctgctggcgattgcctacgacgacgactgcccgctgagctatctgccgctgcacgtctcgcagtcgcacctgccggacagccaggtcgagcgccatgcctgcgtcttctgcgacgacttcgcgctgatcacggaaggccagaacgtgccgcccgagctggacgcgcaatgccgcagccacggcatcgcccgaaacctcgtctacgccgtcatggccgaagaagccggcaagccgctgcacgtcggcgacacctactccgaggaagccgcgggagaggtggtacgccgcctgcgcttcgagaccgggttctacagccgtgcctgggaaatcagttcggcgcacatcaccgaggaggccggccgctatctggccaacctggccgacatcgccacgccaacccgtttcctgttcgttgccttccgcatcccgtacagccccgcgatcggcgtgaagctgatcgccacgccctggacggatgcgaacgtgcagcaggtcgagggcatcaccgccgaagaactgcggcaggagcaccgggccaagggcatgccggagtccctcgtggaagtgttgcacctggctgcgctcgccgacgttcgcatgttggtgttcgatgccggcgcgcccgtgctggacggactgacgctctacgacgacgagtaa

SEQ ID NO: 502203 - DNA, 393 bp, Stenotrophomonas maltophilia
atgaatctgtctttacccgaagacgtgctcgatcagatggcgctggaacaggcgcacttcgacgctgcaccgcaggccttcttcgaggcctggaagcgcggcgcgcagatcgccggccacgagtggttcggcgacggcacacacgaaggtctgcagcgtgccaccaccaagtgggacctgcggcccaacatgctgatgctcaacgacgccctgggcgtgctgagcagcggtcaacgcatgttcctgtccgcgatggtgagcttttacaactcccgcgagggcggtgcgatgctcaagcgttgcggcttcgaggggctgtcggacttcggcggtctcgacctggagcgtcgcaaggtcatcgccgacctcacgctgcactacaacggctggtga

SEQ ID NO: 502204 - DNA, 237 bp, Stenotrophomonas maltophilia
atgtctgaaccttccgcatcttcctctgcaaccgcagtacgcagtagtgcgctggcgctggcctggaccggcaagcgtttgccgctacaggtgctgcgcagcgcggccggccactacatcggcacgcaagacgacgaaggcccggtatcgcgggagtccgtcgagtatttcccgacccacctcgcagcacagcgcgctctggatacccatgcctggacacagcgcgctcacccctga

SEQ ID NO: 502205 - DNA, 783 bp, Stenotrophomonas maltophilia
atgccgctgacgactgtcagcaacgcatggcgtgaggatgggcgcgaggcatggctgccgtcgcagggaaaaccgaatcgcggacggcccgctttagggcaggcccgcgtcacgggacaaggcaaggaccagggcgccgaaggccatgcgggccttcggctggagaggaaggaaaaccacctgtgggctgcgtcagcgcgggccatcgtcaaagccgttcgctgcgtcagcaatcgcacccggcccgtttcgtggctggggccggaaacctctggcgtgcatccacacacaaagggagcccgatgtttcgccggcgggcaccggcacggaataccctcggcccaaggggcctcctcacggctcgcgcggcggcaaggcgtcaggaagcccctcgtgaccgaggcaaggcacaccgatcaagggaatggcggcgggcgcgattcgtggagcaatgaccttctcgccccgtcgcccgacggcgggcagacggggcgcgcacaccgttgcagaaggagacgcgcgctttggagtcccgcgcggtgcgggacgtttgcctcgccgccagtgaagtggccggcgcggcagggggaagcgaggatcaggacgccttggaggcagcgcgccgcttgcgcggtgcgctgcgccggcccgtcggggactcgatcggcaacgtgcccttgcagtccgggtagcgcgaacaggaccagaacgcgccgctcttgcccgtgcgctgctgcatcggtgcgccgcactgcgggcaggccggcgccggcggcagcttga

SEQ ID NO: 502206 - DNA, 2016 bp, Stenotrophomonas maltophilia
atgcgcgtgttcctgtgcgagaagccgtcccagggcaaggacatcgcccgtgtgctgggtgccggtcaacgcggcaacggctgctacagcggcgcgggtgtcgtcgtgacctggtgcatcggtcatctggtggaggcggttccgcccgaaggctacggcgaacaatacaagcgctgggccatcgagcaactgcccattcttcctgagcgttggcgtgtcgagcccaaggcggcgaccgcggcgcaattcaaggtcgtgcagcagctcgtcgccaaggcgggcgagctggtgatagcgaccgacgccgaccgcgagggcgagatgatcgcccgcgagatcatcgagctatgcggctaccgcgggccgattcagcgcctgtggctgtcggcgctcaacgacgcgtcgatccgcaaagcgctgggtgcgctcaagccgtccgccgagacgctgccgctgtatttctccgcactcgcccgatcgcgcgccgactggctgatcgggatgaacctgagccgcttgttcacactgctggggcggcaggccggctataccggcgtgctgtcggtggggcgcgtgcagacgccgacgctgaagttggtcgtcgatcgtgatcgcgagatcgcgcgcttcgtctgcgtaccgttctgggccatcgagattgcgctttcgcatgcaggccagtccttcgtcgcaagctggacgccgccgcaaggcagcgccgacgatgcgggccgctgcctgcaacagccggtggcgcagcaggccgccgagcgcttgcgcacggccggctccgcccaggtgctgtcggtagaaaccgagcgcgttcgcgaagggccgccgctgccgttcgacctgggcacgttgcaggaggtgtgctccaagcagttgggcctcgacgtgcaggagacgctggacattgcccaggcgctgtacgagacgcacaaggcgacaacgtatccgcgctcggattcgggctacctgcccgagagcatgctggccgaggtaccgaccgtactcgacagcctggtcaagaccgaccccagcctgcggccgctgatcgagcgcctggatcgccaacagcgctcgcgtgcatggaacgacggcaaggtgtcggctcaccacggcatcatcccgacgctggagcccgccaacctgtcggccatgaacgagaaggaactggccgtctaccggctgatccgcgcccattacctcgcgcagttcctcccgcaccatgagttcgaccggacggtggcgcagttctcgtgcggcagtcagtcgctggcggccatgggcaagcagatcgccgtcaccggctggcgcgaggtgctggcgacgccggggccggacgatgccgatggcgaggattcgcagcgcagccaggtgctgcccgccctgcatgcgggcctgtcctgcccggtcgggaaggtggatctcaaggcgttgaagacgctgccgcccaagccctacacgcagggcgagctgatcaaggccatgaagactgtcgccaagttcgtgaccgacccgcggctgaaacagaagctgcgagataccacaggcatcggcaccgaggcgacacgcgccaacatcatcaacggtctgatcggtcgcggctacctggtcaagaaaggccgcgccgtccgcgcttccgacgcggcattcacgctcatcgacgcggtgccctcggccatcgccgaccccggcaccacggcggtgtgggagcaggcgctggacatgatcgaggccggccagatggcgctggacaccttcatcgagaagcagtccgtgtgggtcggccagctcgtgcagcagtaccgcggcgcaacgctctcgctcaagctgccgccggcgccggcctgcccgcagtgcggcgcaccgatgcagcagcgcacgggcaagagcggcgcgttctggtcctgttcgcgctacccggactgcaagggcacgttgccgatcgagtccccgacgggccggcgcagcgcaccgcgcaagcggcgcgctgcctccaaggcgtcctga

SEQ ID NO: 502207 - DNA, 384 bp, Stenotrophomonas maltophilia
atgagcacgcacttcgtcggcgagggcaacatcggttctgcgccggactaccgcgaatttccgaacggcaacgacgagccgcgccggctgcttcgcctgaacgtctacttcgacaacccgatcccgaagaaggacggcgagtacgaagatcgcggcggcttctgggcgcccgtggagctgtggcaccgcgacgccgagcactggaagacgctgtaccagaaaggtatgcgggtgctggtcgagggccgcaccgtgcgcgacgaatgggaggacgccgacgagaacgagcgcgtgacgttcaaggtcgaggcgcggcgcgtgggcatcctgccgtaccgcatcgagtcggtggcgctcagcaccaagccggtcggcggacagtaa

SEQ ID NO: 502208 - DNA, 537 bp, Stenotrophomonas maltophilia
atgacagcatcgccccctatcagccactccacgcgcttcgtggcgctggaacaggcggacttccagcggctggaacacgcaggctacctaaaaggccttttacagccttttaagggtaaggggagtctggagacctgggccagccagtgcgcagcgctgcgcgacgacgtgattggcctggcgcagcggcgcgtgctgccccaggcgcgcgcctatccattcagtctgctcgacgtgcaactggcccagcaggccaccggcgcagggacgaccttcctgcgctggcgcaacctcgaccgttcctccatgggcgtggcgttgtgggaggccctgctggccaaccccgcgacgccggcctcgctgatcgacgagctgtacgcgatcgaactgcagcgcatcgtgctgaacatgcagatcagtctgacccacagcatcgctcgccaagccctgggatgcgccaacaaggccgcccaggccgaagcggcttacctgcggcgcgtccacgggcataccgcgtccgttccacccaccacctag

SEQ ID NO: 502209 - DNA, 789 bp, Stenotrophomonas maltophilia
atggccaacgaacgcacagaacccctgcaactgaatctcggatcgctgcgcagcgcgatgtcgctgacgctgcacacgcaccacgcatcgcgcatctggcacggccgcgcgccgaccgaggggcgcccaggcatcatcggtctcaacggcttcatcggcgccatgaacaaaatgaagcgcggcgccgagcaggacgacccgtactcggactggtggatgctgcggatcgaggacaagctcgccgacaccaagacccgtctgcagaccctgcgcgaacaggtggatcaggccttggccgacgtgccagcggcgctgtccctgggcgagaacatgaacgtgcagccggtgaagctgccgctgttcgtgaacgcccagctcggcttcatggcggtgtatctgctggccgactacgacgacctggcacgcaaactcatcctggcgcaccacacggcgctgatcgaccgcagcaccttggagcgctggctcaatgatggtgcgcacgcgctgcgcagcctgttctcgctggcccagcagtaccgctactcgggcacgacgcgcgacgacttcgcggcgaagaacgcggcggcgcgagcggcgctggagaagttcggcgagttgccgcaggacgtgctggaaggcacgcgccgctcgcgcttcgcgccacccatcgcgcggcggtcgaacaagcccggcacgccgcctgctgcgcctgccatcgtgcccgatgcgccggctcccacgggtggcgcagccgatggtgccgcgggcgatgagggtgcgggcgcatga

SEQ ID NO: 502210 - DNA, 753 bp, Stenotrophomonas maltophilia
atgaaagccatcgtggcccaccacgagatttcaggcccggcgcattcgctggaggcccttcgcgcagcgcggattgaagatgccgcgaccaagaccctgggcacgttgatcggacaactgtttggttcgtatgtcgtcaccgatggaaatggcggcgaggaacgcgacgacgatcttcccggtgacgtgatttcctttcgcacgcgcgtgcaactgagcctgtctgcgcaggactacgccaagacccaggccgacctcaaagacctggtatcgctgcgcaacacactggtgcaccacttcatcgaccagcacgatctatggaccgtggacgggtgccgcgctgcacaggacgaactcggttccgcctacacgcgcatcgatcaacacttcgagcagttgcgcggctgggccgagcacatggatcaggcgcggcgcctggcagcggaattcgtccagtcggatgtgttccacgacctggtggtcaatggcatcgcgccggacggcacggtggactggccggccgccggcatcgttcgtgcgctgcgcgaggccgccgcgcagttggccgtcgagggctggacacccatcgccgccgctggccgctggatcgcggaccggcatcccgagcagcttccagccaagtacggctgcagcagttggcggcaggtggtgcacgagtgccgcctgttcgagcttcgctaccgtgaggtggaggggcaacgggccgcctggtacagacctcgcgaggcatag

SEQ ID NO: 502211 - DNA, 1194 bp, Stenotrophomonas maltophilia
atgacgacgggcgacgctccacggcgtgatggcccggttgcgctgtcggcgttgttcgacgaggcgctgcggcaccttgagccgaaggaaccggcgcagggcacggcgccgagccaggacggctttctctacagcggcaaccggcacgagagcgtgccgcgcgcgttgttcttcgaccggcgcctgacgccgctggagcgcaatgcctggcaggtgttccgcctgcagctcaacgacgacggcgtgaccgcctttcccacctacgaccagctccgcccatatctggcgtccatgccctgtgcggcgcaagcctcgcacgagaccgtggcgcgtgccctgacgctgttgcggctgacgcgctggctgagcttggtgcgccgacggcgcgacccgaagaccggccgcatccagggaaacctctacgtgctgcacgacgagccgctgtcgcccttcgaggcgatgcagctcgatgccgactacctcggcctggtcagccaggcgctgacccatgccgccaaggcggtacagatcgtgggcatgaacacgctcaaggagattgccgaagacccgctgctcagcggccgcacgttgccgacccgcttgcaggtgctggcgcagcgcatggcgctgcatggctggacgacgccaggttatccacaggagggtgcggaccacgaatccgaagaaggccaggaagcccttcttcggaatgctgcgcgcccgtcttcggaatccgaagcaggaccgaaacccgcgccggacggctctcttcggattccgaaggaggaccgtacagtacgtaatgatcgtataaatgaagtacgtacagtaccgcgcgcgagggccttgcagaacctgcggctgcccgagcgtttcctgcgcttgaaggacgagcagcaggccggcgcgctggtggcgctgcagcaggtggacgaggcgcagaggcaggccgttctcgacgagtgggaggcacgctgccacaacagcgcggtacgcaacccggccggctacctgtttggcatcatccagaaggcgatccgcggggagttcaaggcctgggccggagaaagtgcatcggcaccgccagcgcccccgccacctgcgccatcgtcaccgccggcatcccgtgcggctgaccccgaggtggcacgtgcctacctggcacagctccgagaagccttgcgtgatcgctga

SEQ ID NO: 502212 - DNA, 561 bp, Stenotrophomonas maltophilia
atgtcggcaccgcacccgctcaaccaggccgtgatcgcccaggccctgcatgacctgcgcaacggccagttgcgccgctgcaaggccatgggcttcggtgaggaggagctggatgcgctgaagcacccagaactcgtgagcatgctggtgaatgccacggtgtcgtggtgttcggtgtcggtgaaccgggaagtgttgaagcggctgctgagccaggtgcacgacgtggagcgggagatcgccacggtggaccgcatgctgcgcctgggggcgagcacggagatggtcagcaagttctacggcctcacgcatcaggaagtggcgctgcgccgcgacatcctcgggctgcccaagcgcaagggccggcatccggtgctcgatgaggcgcaggacgtggccttgtgggagcgctggaaggccggcgtcaccgagcgccatatcgccctgtccgacgacatggcgatgctggcgctgaccatggacctggccgaggcgctgagcctgccgatgtcggtggtgtgggcggcaatacgcaactggatcgaccaggggctggtgtag

SEQ ID NO: 502213 - DNA, 1644 bp, Stenotrophomonas maltophilia
gtggctgagctgacgccgcaggacatggctgccaagctgctggccaccggcttcgagcgcagcggcccttcggccgcgaccttgagcgaccccatcgccgacacgccgatggtggtgacgctggaccagttgcggccctacgaccacgacccacgcgtgacgcgcaacccggcctatgcggagatcaaggcgtccatccgcgaacgtgggctggacgcgccccccgcgatcacgcgcaggccgggcgaggcgcactacattattcgcaacggcggcaacacgcggctggcgatcctgtgcgagttgtggagcgagaccaaggaggaacgcttcttccgcattgcgtgcctgttccgcccgtggccggcgcgcggcgaaatcgtggcgctgaccgggcatctggccgagaacgagctgcgcggcggcctgaccttcatcgagcgggccttgggcatcgagaaggcgcgcgagttctacgagcaggaaagcggccaggcgctgtcgcaaagcgaactcgcgcggcgactgacggccgacggctatccggtgccgcagtcacacatcagccgcatgaacgatgcggtgcgctatctgctgccggcgatcccgacgctgttgtacggcggattgggccggcatcaggtggaccggctcgcagtgctgcgcaaggcgtgcgagcgcacctgggagcggcgtgcgctgggccggccgctgaccgtggacttcgcttcgctgtttcaggatgtgctgtcgcagttcgacacgcagccggagggcttctcgccccagcgcgtgcaggacgaactggtgggtcagatggccgagctgctggaagcggactacgacacgctggcattggaggtcgatgacagcgaaagccgtcagcgagtattgaccagcgagccggccgcgccgaacccggcaacgcctgtcgcacctgcggcgccagccatcacgccgcaactgtcgcccgcggcgccaacgccacgggacacctcgcccgtcgcgccaccggcagagacaccctcggcaccacctgccgctgcaccaaacgcccgggacgggcagcgcgacgagcgcctgcaggggcacatcgtgacgccggccccaaccaccgagcgcctgcagtccatccagcggatggtcgcggatcagctcggcgacaagctacccgacttcgaggcagatgcgctgcgtgcgatcccggtgcaggttggcgggctctttcccatctcggatgtctggtacatcgagccgggcctggacgtgccggatcgcctgcgcgtgcatatctcgcagttcgctcgcgagatcgcgggggaagcggcggtgggcgaccacatcgaagccagcgatggcggcatcggcttcgtctgcgtgacgccggccgtgggccaggcgaaggcgctcccggcgttcgcgcgtgcgatgctgaccctgctgcacgcgctgagcaccgcgccggcacccgcgaccgggctggacagcgcgcggctggccgatgaccttgggccgctgctgcatggtcacggcggcttggtcacgcgcctgagcgatgccgggctggtaaagctgttccgtctgctgcgcctggcgcgtcggctgctggatctggaagccggcgtagcgagccaggattcctga

SEQ ID NO: 502214 - DNA, 237 bp, Stenotrophomonas maltophilia; identical to SEQ ID NO: 330459

SEQ ID NO: 502215 - DNA, 867 bp, Stenotrophomonas maltophilia
atgcaggtggtgtccatcatttcgaccaagggcggcgtcggcaagaccacgacggcggccaacctgggcggcttcgcagccgacaccgggctgcgcgtgctgctgctggacctggacgtgcagcccacgctgtcgagctacttcacgctggccgagcgcgcgccggccggcatctacgagatgctggcctacaacgagcagcgcgccgagcaactggtgtcgcgcaccgcgatcgagcggcttgacctggtgctctcgaacgacgaccgcggcgagctgaacacgctgctgctgcacgcgcccgatggcagattgcggctgcgccacctgctgcccacgctggcgccgcactacgacctgctgctgatcgacacccagggcgcgcgcagcgtgctgctggagatggcggtgctggcctcgaacttggcgctttcgccggtgacgccggaaatcctcgcggcgcgcgagctgcggcgcggcacgctgcaactcatcgaggacatcgcgccgtaccgccacctcggcatcgagccgccgccgctgcacctgctcatcaaccgcgtgcatccggtgtcgtcgaatgcgcggctgatccagcaggcgctgcgtcaggtattccaggagcagcctggcgtgcgcgtgctggacaccgacgtgccggcgattgaagcctatccgcgcgccgcgacgcgcggactgccggtgcatcgggtggaataccgccagccggcgggccgcacggcacctgccgcattggagaccatgcgcgcgctggccggcgagctgttcccggcgtggcaggagcgctttgcgctcgtcaccggccgaggcgacgcgggaggggccggccatggccagcgcacatga

SEQ ID NO: 502216 - DNA, 219 bp, Stenotrophomonas maltophilia
atgtcttcgcagaccaccgcgccggcagtgccggccgagcaccgcatcctgcgtcgcgccgaagtcgaggccaaaaccggcttcaagcgcgcgcacatctacagcctgatgaaagaaggcaagttccccaaggcgctgcgcttgggcgtgcgcgccgtgggctgggactcggcggaggtcgagcaatggatcgccgatcgcctcgatgagcgcgcctga

SEQ ID NO: 502217 - DNA, 759 bp, Stenotrophomonas maltophilia
atgccgaaatcgagcagccacgcctttggcgcaaagacgtactaccgaccgatcgaggcggccgtccgctggtgcggtctcctgcgcttcgagcagcgtattctggaagcgctggagcagcgtgccatgccggagcccggcgaattcccgcgctggccgctgctgcgcctgtatgccgagcgcatcttcgacgcgctgacgcatggcgaattgcccggtggcaaggccggcatcgtgctggactcgcagcggccggcgctcgacgaccccgagttgaccgtgcgccacgtggacttgaaagcgtggatgtcgcagttctaccccggcgatcggccggggtttttgtttgacggcatcgaacgcgcggtgcatccggcggtgagcgtggacacgctcaacattctgctggccgatcgcgaagcagcgaagtcgcaacttgccgaacttgccctggtgcatgaaacgctgcgcaccgcgcacgaagcactggcgaaggaacatgccacgcgcgcggccaacgacgaacaggcgcgcgagcctggcctgcgcagcgagacgacttacctcaacatcatcggcggactgctgacgctgctgctgggcaattcgccgtcaggcgcggcctattcgtcgttccgcagcatggatgccgtggtcagcgcgctgatcgcacaccatgaggggcggccgggtctcagcgagcggacgctgtggagcaagctcgcgcaggcgcggcgccacctggaggcgtcgcgctga

SEQ ID NO: 502218 - DNA, 909 bp, Stenotrophomonas maltophilia
atgaacttacgccatcttcgctgcttcatcgccgtagccgaggaactgcacttcggccgggctgctcgacggctgcacatcgaacagtctccactgtcgcgcacgatccgccagatggaggcggatttaggggtgccgctgctcaaccgcttgccacgcagtgttcgtctcacaccggcgggacaggtcttcctcgaagaagcccggcgcgtactgctggccttcgagcaagcgcagaccaaggcacgcgccgcagcgaaccagcggaacacgctgcgcatcgcactatctggtgacatggggcaggcccgcttgtcggcgttgcttgcgctttgccgcgaggaggcaccacaggtcggcattcggatatttgaaacgccactggcgcagttggtgactggactgcgcaacgacttgtatgacgcaggttttgcattggctggtgaaatggacgccggcatcgtcgccatgccggtgtggcgagacccgctggtggtggctttgcccgccaggcatccgctgctggctttcaaggaagtgccgctggaggaagtggcgagctatccgctggtgctgtgcgatccccaggtctgcgaaggttgcagccggcagcgcgaacggctgctccgcacggtggatgcgcagccgacggtagccgagtacgtcaagacccattccctgatgctggccctcgtggccgccggctacggcgtgggcttttcgagcgcggcgcatctggcgggttgccatcaggccgatgtcgtcgtgcggccgctggccgacgagaccgcttcgctgacgacctatctactgcgacccgaaggcgaaatcatggagccgctgcggcagttcatcgaccgcgtggagcgtgtcagacgcccgcaaggcaccgatcaacgcccgatgtga

SEQ ID NO: 502219 - DNA, 153 bp, Stenotrophomonas maltophilia; identical to SEQ ID NO: 324480

SEQ ID NO: 502220 - DNA, 177 bp, Stenotrophomonas maltophilia; identical to SEQ ID NO: 324481

SEQ ID NO: 502221 - DNA, 378 bp, Stenotrophomonas maltophilia; identical to SEQ ID NO: 250933

SEQ ID NO: 502222 - DNA, 570 bp, Stenotrophomonas maltophilia
atggacattgatttcaagaaattggctccctggaactggttcaagaaggagcaggaagaacaacagagcactgcctcgctcccggtgcagcgcaatgacctgccggtggcgggtgggcccgttagtcccatcctgcaattgcatcgcgagatcgaccgcctgttcgacgacgcgtttcgaggcttcggtttcccgacgctggccatgccacgctggccgtcggactggccgggcatgctgaagccggcgctggacatccaggagaccgacaagcagtacaagatcgccctggaagtacccggcatcgaggaaaaagacatccagatcacgctcgacaacgacgtgctgctggtgcgcggtgaaaagcgtcaggagcaggaaacgaaagacggcggtttccaccgggtggagcgctcctacggcagctttcagcgcgctctgaacctgccggccgatgccaaccaggacacgatcaaggccgctttcaagaacggcgtgctcacgatcacgatggaaaagcgcgaggccagtgcccccaagcaggggcgctcgatcccgatcaacggctga

SEQ ID NO: 502223 - DNA, 771 bp, Stenotrophomonas maltophilia
atggaagacgatgatctcgtcgatgcggttgaggaactcgggccggaagtggccgcgcagcacgtccatcacctcgcccttggtcttttcgtactcctcgccggccgcaccacgcgccttgagacgacgctggatgatgtccgagcccagattcgaggtggcgatgatgatggtgttggtgaaatccaccacccggcccttgccgtcggtgagccggccgtcgtcgaacacctgcagcaggatgttgtagacgtcggggtgcgccttctcgatctcgtcgagcagcagcacgctgtagggcttgcggcgcaccttctcggtgagctggccgccctcgtcgtagcccacataacccggaggcgcgcccaccaggcgtgccacggtatggcgttccccgtactcggacatgtcgatgcgcagcagcgcaccctcatcgccatagacggactcggccagtgccttggcgagttcggtcttgcccacacccgtcggcccgaggaacaggaaggtggccactggcttgctgccttcgcgcaggcccgcgcgcgacagccgtacggcatcggccaccgcgcgcactgcttcgtcctgtcccaccaggcgctcatgcagccgctgttccagatgcagcagcttctcgcgttcttccaccgtcagctcgttgaccggaatgccggtcaggcgcgagacgatctgcgccacgtgctctgccttgacctcggcgctgcccgaggcgcgctcgcgctcccaatcctcgacgagcttctttag

SEQ ID NO: 502224 - DNA, 933 bp, Stenotrophomonas maltophilia
atgaagcctgtgtcgggtctgcgaagggcagtgcagaggggactgctgagcctggtgatgatcctgctggccgggacggtgcatgcagcaccggatccggtgctggtgctgggccggatcagtgatgatccgcaggcgcattacgagcagctgcagcccttgctggactatgtggtggcacgcatgcatgacgtcggcatcaccgaagggcggatcctgatggcacgcgatccacagcagatggccagctatctgcggcggggccgggtcgactgggtcacggaaacgtcgggcacggcagtggcgctgggccagcgcagtggcgcacggccgctgctgctgaccgagcgcaatggcgtgcgccagtaccagacggtgttcttcgtgcgccgcgacagtccgatccagcagctccaggggctgcgcgggcatcgcctggcgttgcagaacacatcgtcgaccagcgcctacctggtgccggtgatgacgctgctgcagcaggggctggcgccgcagatcctggccggcgtgtgggacgtgccgggccgggacagtgtggggtacgtgttcgcgcggagcgagttgaacatcgccacgttcgtgcacaagggcatggtcgaggcaggggcggtgagcagcgtggactggaacgacgagcgacgggtgccagcggcattccggcgcgacttccgcgagctgctgcgcaccgaaccctacccacgggcggtggagatggtccgcgccgacctggatccggcggtgcgtgagcggctgcgggatgtcctgctgcaggcggccagcgacccgcaggcgcagggggcgttgcatcggtttttcggcacttcgggtttccaccgcgtcgatgcgcatgcgcagcagcggctggatgaattgaaacaaggattgacgcgcgtgcggatggaagtggaatga

SEQ ID NO: 502225 - DNA, 612 bp, Stenotrophomonas maltophilia
gtgggtgagatttttagtgggttagatagggctctagcctcgcaatgggccatgatgataggcgctgtgacttatttcgcgctggttttctcggccactgtagtgacggcgcgtcgaagaagagagcgtcagacaagactgaagagggccgtgtccattgggttggtcaatggacaaatcactggggtcgacgatctggtgaacatctaccgcggtgttaccaatgccagcgacgacgacatatcgtacaagctgggtgtaaccaaaattctgcgaagtctgctggtgacgcttgctagcaactccgaagctggacgtcccgagactgagctccgcgccaagataaagaggttgttggcggaaattcagcagcagactccgtttgctgatgtgcctgctgcagaaagaaacctgattttggatgctcgcgagttcattgagcgaaatgaactcaatgcggccaagcaaaagattggagacctggcaggactgattgaagctagaaatgaggcttacactaagctgcaatcagcaaataagtggtcagtgccgctcgcgatagttggactgatcttgacagtggtttttggggtcgcctcgatcatcggctga

SEQ ID NO: 502226 - DNA, 552 bp, Stenotrophomonas maltophilia
atggatgggaagaggatcttgcttgccgttgttcttggcctgatcgcaggtaatacggcacaagcgggtactgtgacgaagtaccagggtgagcatattcgtgacacgggctacaactggggatggggtaaggtgagatctcccctgtttgacacattcgacgaggcgctcgaatggacgcatgcgcaggccgcaatcaagcataacggagagaactatctctcgaaatacgaggactttcggttctatttcagccggcttgagaacggccgactggcgagctactacggcgacaaagtctggttcacccaagatctggatccgtcagaggacgagcctcggtactgttacgactggtccacggggatgacggggactactatcaacgggaacggtcactttatcttcgcgagttccgctgatcttctggagttggctgcgagcggcagatggctggcatggctcaataattgccctgcaaatgttggtttcgcaatcgtctctctcccgctcgtggcggttcgcgaagtcgatatcgacacggccgactga

SEQ ID NO: 502227 - DNA, 1719 bp, Stenotrophomonas maltophilia
atggacgaagccgaacgactgctcgaaatcgaccgcctcaacctgctcgatacgccgccggaaccggtgttcgatgccattgtcgccgccgcgcgcgccgccaccggcatgaccatgggcctgatcacggtcgtggccgaggaccgacaatggttcaaggccaacgtcgggttggaaggcgtcagcgagacggcccgggagatctcgttctgcgcccatgcgatccgccaggacgggctgttcgagattcccgacgcgcgccaggccccccgcttctccaccaatcccctggtgaccggtggccctcgcatccgccactacgccggcatcccgctgggctcggcgcagggcgcgcgcatcggcacgctgtgcctgctcgatgccatgcccggcgtgctgtcgccgtcgcagcgtgagctgatggtgcatctggcgcgggtcaccacgcaggtgctcgagcagcgcagcacgctgatggcccaggtcggccaggccaaggcgctgcatcgcgagctcaagcgcagcgaggatttcctggagcgcaccaaccgcgccgcgcgggtgggcggctgggaaatggacctggtcagcaacgaggtgcgctggacccgcgagaccaagcagatccacggcgtgcgggccaactaccagcccacgcttgataccgcgctgtcgttctatcgcgaagacagccgcgccatcatccgcactgcggtgcagcgctgcatcgatgaagggacctcctgggaagtgcagctgcctatgaccactgccgacgggcgcgcgatctggacccgggtggtcgggggacgtcagcaggtcgatggacgcccgcggctggtcggggccatccaggacatcaccgaagagcgcgccgcactggacgcgctggaggccagcgagacacgctaccgccggctgttccactacagcctgggcctgatctgcacccacacgctggagggcgtgctgacctcggtcaatccggccgccgtgcagtcgctggggttcgaagagagccagatgatcgggcgcagcctgtgtgacctgatgccgccggaaaagcgcgagggcttcaaggcctacctcaagcggatacaggccaaccacaccgacgccggcgtgatcgaattgatcgccgccgatggaacccgccattactgggcgtaccacaacgtgctcgataccgaggccgatccgccgtatgtgcttggacacgcgcaggacgtcaccgccctgcggatgcaggaacaacagctgcgcgagatgtccttcaaggatccactcacccaatgctacaaccgccgcttcctgcaccgcctggatgaactggtcgacgagcgctgggcctgcgtgatgttcgatctggatcatttcaagcgcatcaacgacacccagggccatcgccgtggcgatgccgtgctggtcgagttcgcggccttcctgcgctccgccctcggcaaggatgaaaccgtggtgcggctgggcggcgacgagttcatggtggtgctggtcgcacccgcgcacggccgtctgagcgagcttgaacactggtaccgggaccatgcagcgctgtcacccaccgcgttctcgatgggcgcggcgatcaatacacccggcgagccagtggccgacaccatccagaaggccgacagccgcctgtaccgtacccgcgagcgggtgcgccgcgagcggcgcgaggaccccgccgcgcgctga

SEQ ID NO: 502228 - DNA, 585 bp, Stenotrophomonas maltophilia
atggccgccgtgctcgcccgtacctgcctgctcacgctgtgctgcctagccctgcccgccctcgcccagggtgcctcgttcggcatcggccaacagaccatccgtaccaaccagaccacccaatcgagcagcaccgagacccagaacaatggctcgatgaccacgcagaccaccaccagtggcagctcgcaatccgagtcgcgcagcgaaaacaaaggcatcgacgtgggcttcggcttccacgacaacaacgacgactggggccatgaccaccggcgcgatgaccgcgatatacgcgacagcgatctgttcggcaactggacgctgggccaggagaacggcagcgcgtgcaccatcgaactgaagagcatcgagtggttcggtggctacagcgcctacgtacccgccggctgcccggacggcttcttctcggccaaccgctgggtgctgtcgggcaaccagctgctgctcaccgataccagcaacacggtattcgggcgcttccgcgcgtcgggcggcgggcgctggtcggggttccgtgaatccgacggtgcgcggttgtatctcaaccccaaggggcgctga

SEQ ID NO: 502229 - DNA, 1305 bp, Stenotrophomonas maltophilia
atgaggcaccggcccttcgttcttgccgcgctggcgttgcttgtccccgggcctgccgcggccgccagcccagagctctctgatgacgcagccaaggcgatcttcgatcaggcgaatgcgctgtgccggaaagacaacggagacctgtggggggcctcgctgtgtggaccgatgatgctggttgaccgcgccactcgacgggtcgttgcctcccaggcggatccacatggcctcctgagggcgcgtggcgaagtcttcgtcggccagcttccatcggatgcgatcatcgccaacacggccgtcgactggtctggaatgcgctggacgcaactactgtggcccctgcctgagaacgacgcgcgccgcagcacgctgctggctcacgaaatgttccatcgggtgcagcccacgctgtcgatcgccccgcctgccgaaggcggcaatgagcaccttgataccctcgaaggtcgctactggttgcagatggagtggcgggcccttgctgcggcactcgcagtccccgacaccggcgcgcagcgcagcgcggcgatcgacgcgctcaccttccgcgcggagcgccaccgccgattccctgcagccgcgatggaggaagccgcattggagttgaacgagggcctggccgagtacaccggcgtcttcgttggcaacgcagggcccgctgcccgtatcgaggcggcgctgcatgacctccgcgcccacgttgacgacccgagcttcgtccgatccttcgcctatgcgacctgccctgcctatggactgatgctggatcaggtcttgccgggatggcgccgcgacctggccagccacccgaaaggtctcggttcgctcctggccgaggcggttcacacggatccatcattggacgcgcgcgcactgcgcgccgccgtcgcgcgctacgggggggaggcgctgcgcgacaccgaagtcctgcgcgagcaacagcgccttgcgcagctcgagcacaaccgcgcccgctttgtgacagggcctgtgctgcgactggaactgcgcgacatgcgcatccagttcgatcccaacagcgtgcagcccttgccgggcagtggaatggtgtatccaacgatgcagctgaccgatgtgtggggcagcctcaacgtcaccgatggagcattgctgcagagcgactggaaggcggtgttcgtgcaggcgcccgcaagcactgagccgccgctacaggggccgggatggtcgctgaacctgaaaccggattggtcgctggtgccgggaacacgcaatggcgactacatgttgaaggcgaacccctga

SEQ ID NO: 502230 - DNA, 456 bp, Stenotrophomonas maltophilia
atgcattcgccctccagccctcccgatttcatgacggcttgccggccctccggctgggtgcagagcggtgaccgctgggacctgtggtggaacggccgctgcgtggccaacatcgtgccgcatgccgtgctcggtgtccgcctgtttctcgacgcgcggaaaatgtcacagaccaaggtggtggctgccgcgaatgcgcggcaggccaagcgctacgctgaacgctggtgcgccgcccggctctgcccgcagttgcctctgcgcgatgcggtggcgcggctggtggatgccggtactccaccgcccccggcgcccacgcgggagcagcggcagcaggcccgccgcctggccgaggccgggtcgcgcgagatgggccggatcaaggaggcgctggcgcagagacggacccctgcgatgtcgcgcgcgcaggggcaggcacgcacgctgcccagatag

SEQ ID NO: 502231 - DNA, 408 bp, Stenotrophomonas maltophilia
gtgcagacgtttcacgccagactcgccctgatgtatgccaagggtatccgcgtacagaaggatgaggaccgatccgccgacctctatcgcaagatggccatggcgggctacgcgcctgcgcaggccgagctgggatacctgtactccatcgggcgtgggttgcccaaagaccaggatgagtatatctactggacctgtgaggctgcagcgcagggaaaccgcagggcgatccgcaatctggccatcaagcagacctacgatttgttcgatccgaaggagtgccccgagcgacgcgcgcgcaagcgcggggtgccgatgcgtccggcacccgtgcagaagtccggacgcagatctcttccagcggttacgctgaaagttcctcgcgcacgatcctcgccccttcgctga

SEQ ID NO: 502232 - DNA, 1161 bp, Stenotrophomonas maltophilia
atgagccgcacgttggcgaagctccggtccagggcgatgttcaccttcgtgggcggcgccctggtcatcaacccggcctttgcgcaggacgctgcaccgacaaccggccagccgccgcagagcccgtcgcagcccacccagctcgatgccgtgcaggtcacgggcatacgcaacagcctgagccaggccatggacatcaagcgcgactcggccggcgtggtcgacgcgatcagtgccgaagacatcggcaagttccccgacaccaatcttgcggagtcgctgcagcgcatcaccggcatctccatcgagcgccgtgatggcgagggcgcacaggtcaccgcgcgtggctttggtccccagttcaacatggtcacgctcaatggccggcagatgccgggtgccgatgccttcggtgcgtccgggcaggtggccatcggcggtgtggacggcggtacccgcgccttcaatttcgcgcagctggccgccgaagcgatcaatggcatcgaggtgtacaagaccagccaggcacaggtgcccagcggcggcatcggcgcgacgatcaacatcctgaccgcccgtccgctcgatcacgctggcatcgtggccaatgccggcgcgaagctggtgtccgaccgcagccagccgttcgacaatgacctgaccccggagctgtcgggcatcttcagttacagcaacccggaaaagaccttcggcgtcagcctcagtgccagccagcagaagcgcaagggcggttcggtgcaggccacggagaactactggaacgtgcaaccgtggacggggacgatgcctggcaacccggccgtggtgaatgcgccggccatcggccagctctacgcacgtcccaacgacctgcgttatgcgttctccgagttcgagcgcgaacgcgtcaatggccaggcggtgctgcagttcgcaccgacagacagcctgaccctgaccatggactacacctactcgaccaacgagatcaccgagaatcgtggcgagcagggcatgtggctgcagaacagcaactacaccaatgtccagttcgacacctccggcgcggtcgccaccccggtctacatccgcgagatcgccggcaccaaggacttcgggctggaacagcagcgcagcatgcaggagtacaagctgggctag

SEQ ID NO: 502233 - DNA, 471 bp, Stenotrophomonas maltophilia
atgtcacgccgcatcgagggtctccaggccgttgagcgcccggcgggcatgccgccctcgctgcaggcgcatgcgcgccatgacggcatggccgcccgaattgcccgccacgactggtcaggcacgccgctgggggcgatcgagcaatggccgccgcacctgcgcgccaccgtcgacctgatgctggcccacggcttcccgatgatcgtgctgtggggcgagcagctggtgcagctctacaacgatggctatgccgagatcctcgccgacaagcatccgggcgggcttggccagcccacgcgcgagtgctggcccgaggtctggcacatcaacggcccgatctaccagcgggtgtggcagggcgagaccatcacctatgaggacaagctctatccgctggcgcggcggggacggctggaggatgtctggttcaccatcacctacagccccatccgcggtgaggaagggtga

SEQ ID NO: 502234 - DNA, 345 bp, Stenotrophomonas maltophilia
atgcctacgacatccccggcgcagccgctggaacaggcggtcgagtgcttcagcgtcaccagcgggtggtcggtgatgtacccgggcgaccttaccgccgggcgcagcagctatccgctgcacgccaacctgccgccgctgccggcactgcggaggctgctgcaggactccggtatcgaggccgaggtgatcggcgagcagcgtgtggtgctgcgtcggggcacgccccattacttcaaggattcgaacatgagcaacggtacggctggcgcagttgacctgattgaccacctggtgggtgcctacgacgagctgaagcgccggcacggcgatgcgcccgtctag

SEQ ID NO: 502235 - DNA, 1218 bp, Stenotrophomonas maltophilia
atgaaatggaaggttctaggatgctccgcagcacttcttgtatccacctgtgctttggcgcaggtgcctgacgctgacacgcaagaaggcaaggagatgcagattcagattcacagctatatgagtgaacaccccgcggtctcgatagacgaagcagtcacgcgcctagctgtacaaggtgaggtgatgtcggatattgaagcgttgcgtatcgagttcgcagatcgtctgacggaactgtcgataaaagacgcgccagatcaacacatcctggttcaactcaaggggccagacccagtcgcggatcgaacgattaccaccgagagcgggacgacccgtgtggtgttcgaggttggtcacaagtacacccaggacgaattttacgcgctccttgctcagcacagacctcttcttcacagcgccataccaggcatcacggggacgactgggttcccaggcgaagaacgggtgctgattgacataaacggcgacagccgccaagcagaagagttgaaggatacaatcaagaagcttgaaagagtcaccggtctcaagattgaagtccgccccaacatgccgaagtcagtcaacgcggagtatgttgttggcggcgcccccctccaatccaacaatagctactgcacctcaggatttccggttattcataaggccactggacgaaggggtatcaccactgcggcgcattgccccgacaatctaatctatggcaactacgcaaccggcgcagggaagtacaccgtgccgctgacgttcgtggaccagatcaatgatgcgagccacgacgttcagtggcatacggtggggtcacacacaccgctacgggaggtgtatgccacctccacttcggattacagtaggcgccgcatcatgtacatgtggaccaacgctactcaaggccagagcatgtgcttcaggggcgtcaccagccaatacacctgcggaacagtcgtgagcatcaagcacaggcccgagctcgcatgcggtccaaccggaaaccttccctgcgcggacgcgtggatacgcatcgaaggatcgtcgttggcgtgcggatttggagatagcggtgccgctatcttcttcggagacaatggatacggcattgtcgctaaggcaagcctgaaagacggaagttgcaagggagtctccgcaatgccttggggcgcagtcagcgcattagggctggaggcaggcggttag

SEQ ID NO: 502236 - DNA, 246 bp, Stenotrophomonas maltophilia
atgaagcgctggcgccgcttttcacccagcccactggcattgccgatgaaccgcagcagcgaagccgtgcgtgcgcgccggcacctgcagcggcgcaggtggccacgcctgcagatggcgctgatcgtggctctggccggttcggaaaacgcccatggccctcttcgcggttttcgttcctccccggccctgcgctatgatcggcgcaggggccccgcaacgtggcccggcttcaaccaaccctga

SEQ ID NO: 502237 - DNA, 408 bp, Stenotrophomonas maltophilia
atgtgtcgggagtaccagcaacgcctgaactacaaatgcaacgacggcggcaagccatgccaccaggacgccgaggcagccatcgccggagcagcggctaccaaaccacgaaccccaaccggcgaggccaagcattggaacgaacatcacgagggcggtggagcgggtgaactgggagacgtgcatgccgtagagcatactttttcgtggcggaaagtcatgatccagccgccggcgcgcggttacgaggcaggcgccagtccgatccgtgggtgttggacccgcagtaccatcgcgctagactccgcccatcaccacctacgcgtgcccggcaaggatgtccgcatgcagtatcacgttcccgacgttcctggccgcaatgcctcccgccccctggcggctgcatga

SEQ ID NO: 502238 - DNA, 2604 bp, Stenotrophomonas maltophilia
atgagtgccagcatgcatatcgtctgcccacactgccaatccatcaatcgcgtgccagccaacaagttggcagagaagcccaattgcgggcggtgccagtacccgctgttcgccggagaacccatcgagctgaccacagcgacggtagaggacatcaccgatctcaaaaggatcgagcaggcgctgaactctatgcgcctacagcgagaagagttggccagccacgttcccggtatgctttaccaataccgtcttcgtccggacggcagctcgcacttcccttatgccagcgcgaagatgcgggaaatatacggggttgcaccggaggatgttgttgaagatgccactcctgcgttcgcggcgctccatcctgaagaccgtgaccgtgtgcatgaaaccatacaggcgtcggggcagtcactcgcgctttggcatgacgagtaccgagtgcagtttccagacggtcgggtgatctgggtcgaaggcgaggggtcgcctgaagccatgcctgatgggagcattctctggcacggctatatccatgatgtcacctcacgcaaaagatccgcggaagagattcgccttgcggctaaagtttttgcgcacgcaggagagggcatcctcgttaccgacgctcaggcccacattgtcaacgtcaaccgggcgtttaccgtgatcactggttatgcgcgggaggaagtattgggccagacaccccgtctactccagtccgatcactatgacgatgagttctatcagaccgtttggcaggctgtgcgtgagcacgactattggcacggagagctctggtgccggcgcaagaacggcagtcagcttgccgcgctactgacgatcagtgcagtcccggatatgcagggccatatcgagcattacgcagccatgttctccgacatcacggcgctgaaggagaaccagcaacagcttgaacgcgttgctcattacgacctgctcaccggcttgcccaatcgactattgcttggagaccgccttaagcaggccattcgtcagacacgtcggcgtggcatgcacctggcggttgtcttcatcgatctggatggattcaagaaggtcaacgaccagcacggccacgcagtcggcgacaaattgctttccgtcctgtccaggcgtatggcgcaggtgttgcgcgaaggcgataccttggcccgtcttggtggtgatgagtttgtcgctgttctggtcgacctgccggatgtttccatcagcgtaccaattctcggtcgcctgatcgaggtagcggcacagcccgtaccgattggtgacgcactgtgcgaggtgagcgcgagtatcggtgtgagctactacccgcaaggcgaagatatcgacgccgaccaactgctgcggcaggcagatcaggctatgtatcgtgccaagcaagccggcaagaatcgatatcacgttttcgatacggagaaggatcgtacgctgcgcacccgtcacgaaggatttgacagcataaagaatgcactggccaatgggcagtttctgctttatttccaacctaaggtcaacatgcgcaccggtgaggtgctgggcgccgaagccttgatccgctggcaacatccggcgcgtggcttgttatctcctgcctccttcctacccctcattgagaatcatccgctcgggattgacgtgggggaatggaccatcgaggctgcgctgacccagatcgaagtttggcgcaaggccggccttcatgtcccgatcagcgtgaatatcggtgcgcggcacttgctgcaaccggacttcatcatgcatctacggggtatgttgtcacgacatcccggcgcccagccgcaagaccttgaactggaaatcctcgaaaccagcgccgtggaggacttcgctcaagtgtctcagttgatggcgctgtgcgagaggatgggattgcgttttgccctcgacgatttcggcagcggctattcatcgttgacctatctgaagcgcctgcccgcgcacctgctcaagatcgaccaaggttttatacgcgacatgctcgaggatccggacgataccgccatcctggatgcgctactggcactggcaaggtcgtttggcaggaactgcatcgcggagggagtcgaatccattcagcatggtgaaatgctgctgcgtatgggatgcgagtggggccagggttatgccatcgggcatccgatgccggcgcatgaattcgagcaatggctacacacctggcaggtacccttatcctggaagggattcaaacctgacagtcgctacgcgctgcccgtgccgttcacatacgtcgaccaccgggtctggatttcccagatgatcgactatctgtcaggtaagacccaagtgccgcctcaacccgaagcactccaatactggcgggatcaaagtggccgccctacgtccttcggcaaggatcctgatgatcaggtcgatgtcctgcatcagagtattcagcagatggctcacgccctgagtgaaatgaaaaaagccggccgtgtcgaggcattgagggctggcatcgacaagttgcaacatttgcaggcggatctgctgggattgctgccgccagaccagaagccggattga

SEQ ID NO: 502239 - DNA, 471 bp, Stenotrophomonas maltophilia
atgcataaagaatctggccacacggcccttgacgagatgcgctcccagtggcggttgatgacggtttacgagcgcttcgagcagttcgttgccatcacgctttcgggcgtcatcgcgttggtaattgtgatttcgctgattcagttgattcggctggtgttcacactgctcgtcatggatgcgctgaatccactggatcataaggttttccagctggtgttcggtgccaccatgacgctgctgatcgccatggaattcaagcattcgatcgtcaaagtggctctgcgcaaggaaagcatcatccaggtcaagaccgtcattctgatcgcgatcctggcactggcccgcaagttcatcatcctagaacccgacgttgatcctgccaaagtggccgccctggcggggacggtactggccttgggtctgacctattggctcatgcgtgaacgcgatgaccgcaagagcgagtaa

SEQ ID NO: 502240 - DNA, 966 bp, Stenotrophomonas maltophilia
atgaccccctatggtctagtcggccgacacgatgccaggtcgaggcaccgctggctcaatcgctttcaaaccgcgctgctggttttgaccctggtggggatcgcagctgccgctggcagtctgctgttcggcgagattggcctttggctggcactggcaacatgcgcattgaccctgctgatcgaacctgtcgccgcctccgcgatgaccttgcgtctgtatggcgcccgtcccttgcgccctgatgaagcccccgcaatctggtcgctgttgcgggagttggccgcgcgcgccggattgccgaatacgccggttccccactatgtgcccagcggcatcgtcaacgcttttgctactggttcgcgacgccatgcctccattgccctcactgatggcctgctccgcagcctgagtatccgggaactgcaagccgtgctggcgcatgaagtcgcgcacatcgctcaagaagatctgcgtgtcatgggcttggccgattcgatcagccggctcacgaacctgctggcgttgttgggtcaggtcgcgctcctgatcagcatgccagccttgctggtcggtgcagcagaaattaactggattggcttactgttgttggccgcttcgccgcaacttgcactgctcgcacagttgggtctgtcacgtgtgcgagagttcgatgccgaccggatggcagtagagctgacgggagatccgcacgggctcgcctcggcgctggcgaagatcgagcgggtgagccgctcgtggcgagcctggttgttgcccggctgggggaatcccgaaccgtcctggttgcgcacgcatccggcgacagaggatcgtatcgcgcgcctgatggcgttggcgcctcagccatcgcaggccctgccgttccaaacggaatatctcgcgccaaggtcgttcgccccgatgcgcccgccacgccggggcctgagcggcctttggcgctaa

SEQ ID NO: 502241 - DNA, 1155 bp, Stenotrophomonas maltophilia
atggcttaccacgatccttacccacaacgcccagctccggatcatttcgtccggcggtggctcttcatcactgcgtgcgttgccgcactcatgcagttctggcagttcctgcccgccatcgaggcctggttcagcccgcgccaagccgctgagcgcaccgtcacgccgcgtggcgatctggccgctgatgaaaaggccaccatcgaactgttcgagaaatcccgagcatcggtggtctacatcacgacgtcccaactggtacgagatgtctggacgcgcaacgtcttttccgtgccgcgcgggacgggttcgggtttcatctgggatgacgccggtcatgtcgttaccaactttcatgtgattcagggggcgtcggaggccacggtcaaactggccgacggccgcgattaccaagccgcgctggtcggcgtgagtccggctcacgatatcgcggtgctcaaaatcggcgtcggtttccagcgcccgcccgccgttccggtcggcaccagcgcagacctcaaggtgggacaaaaggtattcgccatcggcaaccccttcggcctggattggacactcaccaccggcatcgtgtccgcgctcgatcgatcgctgcccggggaatctggcggagtgaccatcgaacacctgattcaaaccgatgccgccatcaaccccggcaactcgggtgggccgttgctcgattcggccggccgcctgatcggcatcaacacagcgatctacagcccttccggtgcatcggctggtatcggcttcgccgtgccggtggacacggtcatgcgtgtggtgccacaactcatcaagaccggcaaatacatccgtccggcgcttgggatcgaggtagacgagcagctcaaccgccgattgcaggcactgaccagtacccaaggcgtgtttgtgctccgtgtcgcccctggctcagcggcgcaaaaggcggggctgagcggtatcaccgttggccccgaaggcatcgtgccgggagaccgtatcacaggcatagacggcgctcccgtcgacgatgtcgccaaactgctcgcacggcttgacgaccgaaaggtaggagatgttgtggtcttgtcagttgagcgggccggtaaaccacgggaagtgcgcgtggagttgcaacctggcgcctga

SEQ ID NO: 502242 - DNA, 468 bp, Stenotrophomonas maltophilia
gtgatcgaggtgccgaaggcggccatcgaactggccaagcgctttgagggattcgagcgtaaggtgaagcgcggaatcgagatcactgccgttccctatatctgcccagcagggttctggacgattgggtacggccatctctgcgatcccaagcattcgccgatcacggaggcagaagctgaggtctatctggcgcgcgacctgcaatcggcactcgccgcgacgctgcgctactgcccggtgctggccacagagccagagagcaggctcgctgccatcgtggacttcacgttcaacctcggggcggggcggctgcagacctcgacgctgcgacggcggatcaaccaacgagactggggtgcagccgcaacagagctgcgtcgatgggtctatggtggcggcaaagcgctgccgggactcttcgcgcgacgagaggctgaaatttccttactggacaccaaagtgtag

SEQ ID NO: 502243 - DNA, 477 bp, Stenotrophomonas maltophilia
atgatcgagacactgcttggtggcctcctcggcggggcattccgtcttgcacctgaaatcctcaaatggctcgatcgtaaaggcgaacgtggccacgaactggcgatgcaagacaaggcgctggagttcgagaaactgcgtggcgcgcagcgaatgtcggaaatcggcgcgggtgccgacgcggcatggaacgtcggagccatcgaaaccatgcgcgaagcggttcgcactcagggcgagaaaaccggtgtgcgctgggccgatgcgctgagctccagcgtccgcccggtcatcacctactggttcatggcgctgtactgtgcgaccaaaacagcaacagtcgccgccgctgtgacaggtggcacaggctggggcgttgccatcctgtatgcctggacggaggcagaccaagccctctgggccggggtgctgaacttctggttcctcgggcgcgtatttgaccgggtgcggccgtga

SEQ ID NO: 502244 - DNA, 306 bp, Stenotrophomonas maltophilia
atgaccgaacccgaacaacaacagcctgcgctcgtcgagaacatgctcctcttgcgccgcgaggacttcgacgaactgctggaccgcgccgctgaacgcggagccgagcgtgtcctgacccaccttggcctggaaaacggccacgccgcacgcgacatccgtgagctgcgcgacctgctcgaagcctggcgcgatgcccgccgtactgcgtggcaaaccaccgtcaaggtcatcaccacaggcatcctggccgcactgctagtcggtgccgccatcaagttgaaactgatgggaggcccgcaatga

SEQ ID NO: 502245 - DNA, 351 bp, Stenotrophomonas maltophilia
atgtcatcaatcgacccgaaccttggactcaactatggctggacgcttggcgagagcggctgggacaccggcatggacaccaacctcaagcgcctcggcgcagtggtcgggctgtccgtgaaagaccgcgacctgaccatgccaccggccagtcccgccaacggtgaccgctacctcattcctgccgctgccacgggcgtgtgggcaggcaaaaccaaccagatcgcggtgcgcattgccgatgcctgggagttccactcgcccaagatcggctggctttgctacatcgaggacgaggccaagctctcggcctacaagtccactggctggagcgcaggcatcgccatctga

SEQ ID NO: 502246 - DNA, 597 bp, Stenotrophomonas maltophilia
atggagccgcgcatcgatgttcatctgctcacgctaaacgagcctgccgaatggcgtgaggcctgcatcgccagcctcaaggacgcaccgatccagttgcacgttttgcacggcattcctggccgtattggtgaggcacgcgcggcaggctatgcacaaggcacgctgccgctggtgtcctttgtcgatcccgacgatttgtacgaagccagtgccttcacacaactggccgatgcgctggatgcctgcccgcaagccgtgatggcctacaccgacgaagcactgaccgacgaaagcggccaggacatcgccgtgcggcgtctggcctacagccgttggcaacacgccaacagcgccagccacgtgcacggcctgatcgtgatgcgtcgatccgtcgtcgaagccgtgctcaaggaaaccactgacctcaacaacttcgccgactggttgctgaccctgctcgtagccaagcgtggcggcgtgctgtacctgcccatcgttgggcgtcattggcgacagcacccgcagcaaagccacagaaccggcgatccggaagcagtccggcgcattcgccaagcctcgaatctctggagatag

SEQ ID NO: 502247 - DNA, 2274 bp, Stenotrophomonas maltophilia
atgggtggcagcagcaagaagcaaaccgtcggctaccgctaccggatgggattgcacctggtgctatgccaggggccggtcgatgccgtgcaggagatccagatgggcgaccgcactgcgtggggtgatgccgaccgtgcgccgctgtccagcgggcacggcctgaccactctcagcatcaacaagcccacgctgtttggtggtgacgagcgtgaaggtggcgtagtcggcaacatcgatgtactgcctggtggctctggacagggacgcaacgactatctgatgagccgccttggcagcgccattccagccttccggggcgtgctgtccttggtggcacgcaagatccttttcgcggccaacaacccttacatcaagccatgggcggtacgggtgcgtcgcttcacggcgggttggttcgatgctccgtggatggagtggaacgctgaagtccgcacctgggatgaggacgaaggccatgagatcagcgtcggaatgaacccggcacacatcctggtgcagtgcctcaccgatccgcattggggtatgggctatccgcagagcaccatcggttggagtttctggaacgcagcgtgggccctgtcgagcgagggcttcggcctcaatctgatctggacgcgccagcagcccatcgagagcttcatcggccaggtcatcgaccacattggcggcatcctctacaccgacccggagcaaggcacgtttgagctcaagctgctgcgcgacgactattggatcgacagcctgccgcagttggggcctgacgaaattgtgcggctggaacgcttcgagcgcgcccagtggggcgagctgcccaacgaattaacggtggtctacaccgactggcagaccggcggtgatgctgccgtcacggtcgagaacctggccgccatccagttgcaaggcggcgtgatcaatcaacgccgcgactacccgggcgttaactacgggccactggccgcgcggctggccttgcgtgacctgcgtgccttgggttcaccactggcccggatgagtctgacagtggcacgcgacacgctggaacgtgcgccattgccgggtgacgtgttcctgctgaactggccgcgcttgggtgtggatcagatggtggtgcgcgtcaccggcatcgacaccggcaccttgggcgcggccgagtggcgcatcgaagccatggaagatgtgttcgggatgagcaacaccgtgctgtcgcccccgccaccgcacgtcgaagagccgaccatcgaacctttgccgcccgccgtggtgctggccgtcgaggtgccgtattgggaactggcccggcgcttgtcgcgcgcagatctggcctacctgaccgacacggacacctatctcggtgcgctggccgccgccggtggcagcgggcagttgaattggcaactggctaccggcgcgtccggcggcgacctcactgccgtggtgggcgaagactacgcaccactgctgacgcttgatgcagccttgactgccagcgaggtcgatgccatcggcatgccggtgacggccatcagccagccggagagactggccgagggcgactacgcctatctggtggatgccagtggggcgattgcagaggcagttgccatcctagccttcgatgccgccgacgcgaccatcgatctcgcacgcggtgtgctcgacaccacaccccaagcacatgccttggggagtcggctgatcggtgtcggcgaatggctggcatcggaaggtgccgaacgcgccccgggcgaatcgatgtttgtgggcgcgattcctcgcacatcgaccgatcagggcgatcctgtgttggccgccaatgggcagccgatggtgctggctggtcggcaggctttgccgtatccacccggtcgtatccgcctcaatggccagactgagcctgccgttgtggccggtgatctcaacgtcgcgtgggcacatcgcgaccgcactcagcagaccgcctacctcgtgcagcaagacgagggcgatatcgggccagaactgggcgtgacctacacggtgcacatccgcaatcgcaacaacgtgctggttcgtactgagacggggctgttcggcaccgcctacatctggacggcagcagtggccgcgctggatgccggtgcgctgggcgaccgcatcacggtggagatcagtgccgagcgcgatggtttgagtagctggcagccgcaggtgcgggtcatggatcgcgcgggctacggcctgcgctggggacagtattggggaggtgtgtga

SEQ ID NO: 502248 - DNA, 213 bp, Stenotrophomonas maltophilia
atgagcacggatgtaaccgtcaccatcgacgatgtgcgcgccgttggcctgtgcgtgaacggcacgcgggtctggttcgcgcgccacgacctggacttccgcgcgtttctgcgtgacggctgcgctgccgacaccttgctggacaccggcgacgcgatggccttgcgggtggtcgagcacgcccgtgcgcacacccggcaggagcagcactga

SEQ ID NO: 502249 - DNA, 228 bp, Stenotrophomonas maltophilia
atgtggtacctcgtcgtcatcgtggtggcggcgctggtttcggtcgcgctcgcgccgaaaccgcccgaacccaaaccggcgtccctgtctgacgtcgatgcccccaccgcagaagaaggccgaccgattcccgtcgtgttcggcaccgtgctactgcgtggctccaacgtcgtctggtacggcgatctggaagccgaaccgatccgcaaaaaaggaggcaagaaatga

SEQ ID NO: 502250 - DNA, 789 bp, Stenotrophomonas maltophilia
atgagccagagcccattgctggaagtcgagctatacgccttcgccagcaacagcgcgcagttctatctgacgccgcacgaattcgacgttgatctggatggcaacctctacaagagcctggccttggaacgcaacgaactggcgctgggtgctgaagctgcgaaggctggcttggatctgaaactgccgccgaactgtgatttggtgcgccacctgctcgccaactcgctgaccggcgacaccacctcgatcaccctgcgcatcggacggcgcgacacctggggcgactactggtggatctccggaacgcgctggatgggccgggtgttgggcgtcgaagttgctgacgatgtcgctcgcgttcgctgcgagtcggcgcaagtcagtctcaagcgtatcgggttgcggcggctctacagccgcaagtgttcccacgtgctgtattcggctgcctgtggtgcctccccgatttctgccagcgccttggtgagcaacagcaatggccgcaacgtcgatctcgacggtggcacgcccggcagcgtcagtggtggcttggccggtggctggctgcaaaccccggaaggtgcgcgccacatgatcgtcaatgactacggtggtggtgtggagttgctctatccggtggccattgaagtcggcaccgaggtgctgctgacggtcggctgcgatcacagcacggccacgtgcgagtcgcgcttcggcaacctcgacaactacggcggctttcccgccatcccgagcaaaaacccgttctcgacgggcgtgttctga

SEQ ID NO: 502251 - DNA, 1584 bp, Stenotrophomonas maltophilia
atgacggatcgcgtcatcgctcaagacctcgcggaggtctccagcaggccgacgcccggaagtgaactgccggaattccagggcgaagtgctgtcgcgtgcatcgttcggagcccgtgcggctaccttcacgcccgaaaccgccattgcaccggttccgcccaacttggctgcgacttggcttgctgagtctctggcgcacccgtggccgcccatcgatgccccggtattcctcgtcgaggtgctgcgccgggacaccgcatccagcgccgtcgtcgccactggcatggacgccttcggggatcaaccctggccggatgcgcaacgcggtgtgtttgccttccgccacgactggaccgagcccttggtcgaacggctggagtggcagaccagcgtcacacggctggccagcggcaacgaatcccggcaagcacgccgccgcgttcctcggcgctggctcacctacaaggtgggcaatgcccgcccgaccgacgcactggtcgccgactggctggccgatcatctcggtcaaatggcgctgtggccgctgccgcagtacgcggtgcacctgaccgagccctgcgaacgtggcgcactggcgctcagcgtgacggacgctgacgggcgacagttcgggccactttcggccaatgtgcatctgacctacgacggggtgcaaggctggcaggagacagagagcaatggacgctgggtgctgatcatcgccgccgatggctggcaagtcgcccaacttgagcgtgtggaaagcgatctactctggctgacggagcccttggcacgcgccgcagccgtgggcagcaccatcatgcccttggtgtggggcaaggccatcgatccggtggatctcacgcagtgggtgcctggcatggtcggcggcaacgtccccacacagatccagcctgcgccactacccgaccaggatgtcctcgatgacccatggctcgacgagatcccggtctggccagatggcaactggcgtgacgatccgacagccgccgcgcaagccacgatcacccgccaagacttctcgcctgcagatccgtgggtgcgcagggacgatccgtgggcgacgacgactttgcagcggcgctatctggccagctcactcgatgaaatcgagatctggcgggcgcggttgtggcgcacccaggggcgtctggaagccttctggctgcccgatagcttggccccgatcctgtgggtgaacgtcgaagccgatcccgaagatggcttcctgcgcgtggatggcaaagacatctccgcgcgaatctcggatttttggcatcgccccgccgcctgcttgatcgtgcatccagacggctatcggcagtacgccctgacagcgacatgccatctggatcaaggcagtgtgctggtgctgcgctcaggccacgacgactgggtgcccgcaggcagccgcgtcattcgcctcgtgcgctgccgcctggatcacgatgccatcgatctgtactggcacagcccgacgctgctggagatcactttgacagcacgtcagttgcccgaaccacgcggaaatgatcgtcaaacctacgagggagagtaa

SEQ ID NO: 502252 - DNA, 1059 bp, Stenotrophomonas maltophilia
atggcacttttgttcatcgacggtttcgatcactacgacccgcaggccgtggacagctttggcgatccgtggctcgcgcgtggcaaggcggcgtatctgtcgccgcaggccacccgcatcaatggccgtcgcccgtcctcctatgccctgcgtttgccggaaggctcgggcggtggctacgtcaagaacctcgacgccaccaagaccagcctgatcgtgggggcggccattcgcgtggtgccgtaccagaacacctacaccgagcccttgctgctgggcgtgcgcgatgccaacgcgcaggtcgcccacctcgtcaaaatcggcgaggatgggcggctcaagctctaccgctggcaatacggctacgaccagttgatctcgacctcggtcgccagcgccccggcacgcggctggcactacatcgagctgcaggtcacgcaaggcaccagcaacggcgtgctgtcggtgcgcatcaacggcatcctggccatccagatgaccgcgcagaacaccctccagggtggtggccaactggtcaccgcattcgtgggtgcggttccgggccagtcgtgcccgctgaccatcgacgtcgatgacttctacatcgccgacaccaccggcacgatcaacaacaccttcctgggcgatgtgcgtgtcgatgctttgcaggcacaggccgatggcagcctgaaccagtggaccgccagtccggtcggtactgccgcatgggaagccgtgagcgacgaggacgaggacacggcgatcagcgcgcccagtgcaggactgcgccagtccttcgatgtcgaggtgctgccggtgatggccacgcccgccatctacggcgtgcaactcacgatgctggcgcgcaagaccgatgcggggctgggcaaggtcaaaggcctcgtggtcagtggtgcgcaaactgccaccagcgccgacatcatcctgcaggagcaactggcgtggcagagcacgctgttcgaacgcaacccgaacggcaacgtgcaatggacggaggccgccttcaatgccgctgagttcggcgtggagtcggcatga

SEQ ID NO: 502253 - DNA, 2706 bp, Stenotrophomonas maltophilia
atggcaagcaaccgtgcccaaatcctgatcagtgccgtcgaccagaccaagaccgccttcgactcgatcaaacggggcttgggcggcctcaccgataccgccaagagtgtcaacggcgtgctggccaaccttggcgtgggcgtttcgctggcgggcatcggggccatgatcaagtccagcatcgattcggcggatgcgctggacgagatggcgcagcgtaccggcattgccgtcgaatcgctgtcgctgctggtgccgaccgccgagttgtcagcggtgtccaccgagaagttcgaagccgggctcaagaagctggccaccggcatgctggaggccgcaaccggctcggaggcatcggcacagaacttcgaagcgctgggggtggcggtccagaaccaggacggcaccttgcgcgacagcgaacaggtactgctggatctggccgatcgcttcaaggccatgccggatggcgcggagaaggcggcgctggcggtcgatatcttcggcaaggccggtgccgaaatgatccccttcctcaaccaaggacgggatggcatcggtgcgctgaagcaggaagccgctgaactcgggctgcagttgtctgcggacaccgccgcgcaggcaggcaacttcaacgacgcgctcgacaagctgaaattggcgacccagagcattggcaaccagatcatcgcgtccttgctgcccgccctgaacgacatggccggtggcatggtcgagtcagccaagcaaggcggcacattgcgcacgattctggatggcgtggtgctggtgctcaagaccctggcgctcggtgtcgccacggttggcaaggccttcgtcgccttgggtgaagcgattggtggcggtgtcgctgcggcggtcgaagcgctcaagggcaacaccgacggggccaaggccatcattgccgacctcaaaggcagcctgatccagcggctcgatgagctggcgtccttccgcgacagcctgttcgaccccaaacccatcgaggtcaaggcaccccgaattcaggccgatccggaactgttgcagcggctgaccaaacccaaagcgggcaaggctgcgcaggactccactggcgcgcagaccacgctgatgaaagcgcagctggacgccgagttcgcgctgctcaaggacggactggcgcggcaacaaaccgcgctggatgcagcgcttgaggatcgtctgatctcggtgcgcgactactacacgcagaaaacggccatcgagcagcgcgaggtcgacgccgagatcgcccgcaagcagcaggagctggcccgcagtcagcagatcgccaccaacggcaagtcggaaaacgaccgcctgcgtgccaaggccgaagtggccaaggcggaagcggacctcatcacgctcaataaccggcgcacggacatcgagcaggccaatgcgcgcaaggccgcgcaagccgagcgtgagctggccgatgccttggcgcaggcgcgtgaggaactggcacagatcacaggcacggctacagatgccgaccggcaagctgccatcgagcgcagttaccgggatctgcgggcgcgcctggcggcagaaagcgatgccgacggcgtgtcgctcgttgaccgactgatcaacgtgaaggcggcgcaagcgaacctatccgcactggaaacccaatggcggcaggtcaccgagcgtctgcgcaatgcgcaggaggcccttcagacccagcagcaggccgggctgctaaccgaagcacaggcgcgccaacagatcgtgaccttgcagcagcaatcggccaccgagatggagcgcctgctgccgaccatgcaacaggcggcgcaggccatcgggccggatgctgtgatccgcgtgcaggcgtggcgcaatgaactggagcgcacccggctcacggtcgacgaaatgaccccgctgtggaaccgcatcggcgagagttttggaggcgcgctcaacgggatgatcaccggcgcgcagacctggcgcagcgcgatggccagcctgttccagcaggtggccgacgccttcctgcagcagatcgtgattcagcctttccagcaatggatcgccatgcaggcgcggatgctggcgctcaagctcggtttcatccagcaggagcaaaccgtcgatgcggcggccagcgcggccaaagtcgcgcaaaagaccaccgaaaccaccgccgtggtgtcgatggatgccgccaaggcgggagccggggcggcggcgtcgcaagcctcgattcccatcgttggaccgggactggccattgccgcaatggtggcgatggtcgccgcggtcatggcgctcttgggcggcatcaagaagttcgcgggcggcggtctggtctccgggccgggcagcgctacatcggattcgatcccggcgcgtctctcagcaggcgagtacgtagtgcgtgctgccgccgtgcgccaggtcggtgtggccttcctcgattcgctcaacggcttgtcggcaggcccgcgtttcaagggcggcgaattggccttcgcagcaggtgggctggttccggaagtgaaagtgcctcctgcacagccgcagatgaatcaagcggtgcgcatcgtcaacgcggtcgatccgggtgtgacccacgaccacctgcagtcgcctgccggagagcgggtcatcgtcaacatcatcgggcgcaacgcgcgggccatccgctcggcgctccaaggctga

SEQ ID NO: 502254 - DNA, 642 bp, Stenotrophomonas maltophilia
atgcgcctctcgctcaccaccaccggcttgttggacccgcgccagttggcggcgtggagcacggagcggcgtcgtgctatccacaccgctgtcgcaaagggcatgcaatcgggcgggcgtgaagtgcgtgatgcggcgcgatccgagatgcgcagtgccttcaccgtcaagcgcaacagcttcatctcctcgatgggcgtgaaggtgttcgacaagaagcccgaactgctgcccgccttgctggtgggcagcaagattccttggctcggtctgcatgaaaaaggcggcacggtgagcggcaatctgctgattccgctgctgcccggtcgcatcggccccaaacgcttcaaggcggtcatcgatggcctgatgcgctcgggcaatgccttctttatcgagaagaacggccgcgtgctgctgatggccgagaacatcaaagagaacgccgggcaactgggccgcttcaagcgcgccgagcgtggacgtaccggggccaagcagatcaagcgcggccaggaaattccgattgccgtgctggtcaagcgcgtcgatctcaagcgccgactcaatctggccggtggcgtgcaacgcgcgctgcctgccctggcgcgggcgattcaacaagaactggacaaagtctga

SEQ ID NO: 502255 - DNA, 243 bp, Stenotrophomonas maltophilia
ttgcagttgttcgatgccacgcttctcgccctgggctgccacggcatgaatgccgagcagctgggcaagctgctgccgttcgatctggccgtcggcatccagaaaggcttgcgcctgcgtgagcgtgtaggccatcacgtcgccaaggcggtgcccggcgcggatcaggcgggcgacggcactgtcccagccgaggtcgtcagcgagcgcagcgtcggggcgagtcgttgggccgcgccctga

SEQ ID NO: 502256 - DNA, 402 bp, Stenotrophomonas maltophilia
atggacggcttcaaaaccttcccacccgcaccggtggtcgtgacgctgtccggtgtcgcgctggaactgacgccgatccggctgggcgagttgccacggctgctggccgtggtgcgcccgctggccgaggagatcaccatcgatccggactggatggcgctgctggggcggcacggtgatgccgtgctcgatctgctggcgatcactacccggcgtgagcgcgcgtggatcaacgacttgtcgctggaggacgccgttcttctggccgccgccgtgttcgaggtgaacgcagattttttcgtggcgcacgtcgttccggcgattcagggcgcggcccaacgactcgccccgacgctgcgctcgctgacgacctcggctgggacagtgccgtcgcccgcctga

SEQ ID NO: 502257 - DNA, 753 bp, Stenotrophomonas maltophilia
atggcttacttttccggacaaggccgcgtctacatcggcgcacgtgatgaactcggcaacccggccgggctgaccttcgtcggtaacgtgcccgagctaaaggtgtcgctgtcggtggacaccatcgagcaccaggaagcgcagtcgggtcagcgcctgaccgacctgcaactcatcaagaccaagaagggcgagttcgcctgcacgctggaagagctgatcgccaccaacctggcgctcgcgctctacggcaccacgaccaccatcacccctggcacggtgactggcgagctgctgcccaacccggtcacgccgggcagtctgtatccgttggccatgcaaaacgtgtccgccgtgcagatccaagactcggatgccacgcccaagacgctcccggtcagccagtacagcgtcaatgccaagcacggttcactggtggtgctcgatgtcacgtcgggcggcccgtacaccgagccgttcaccgtcgactacgcctatggcgcggcgcagagcacggcgatgttcacccagcccttgcccgagcgctggattcgcttcgaggggctcaacaccgccgatggcaaccgcgaggtggtgatcgacctctaccgcgtggccatcaacccggccaaggaactgtcgatcatcatcgacgaactgctgaagtttgagctatcgggccaagtgctggcggatctgaccaagccggtcggtggtgatctcggtcaattcggccgtctggtgctgctgtga

SEQ ID NO: 502258 - DNA, 204 bp, Stenotrophomonas maltophilia
atgcacatcgaactactgaaaccccatacccacgcaggcaagcgcctcgccgtgggtgatcgccttgacctgaatgacgccagcgcccgctggttgatcgcgcagggcgtggccaagcccgctactgcgtccgccgcacccatcactgattccaaatccacccgccgtgatgccacgtccggcaccaccatccaaggagactga

SEQ ID NO: 502259 - DNA, 426 bp, Stenotrophomonas maltophilia
atgaactccgtccgcgagcgcgtcttgcgggagatcgtcacgcgcctggcatctgcgattgccccaacaccggtgctgcgcatgcctgccgtgccggtcacccgagaggccagtcccgcgctgctgttgttcgtcgatggcgacagcatcaccgcccacgccaaccacctggtcgaccggctgctgatcgtccggcttgccgtggtggcacggggtgcggatgccttcgacgtcgccgaccaggcgctggtcgcggcccacgcggcaatgctcgccgacccgaatctgggcggtctggccatcgccgtgcgcgagatcgactgcgaatgggagttcgacgacgccgacgccggggccgtcgcgctgcctgcccgctacgaaatccgctaccgcacccacgccattgatctcacccaaacaggatga

SEQ ID NO: 502260 - DNA, 279 bp, Stenotrophomonas maltophilia
atggatgtcgcgacgttgtacgaggcagcccgcagtgcaggactgctgaccgccgtcacggtggcgggcaccacagtccactgcgccttccgtgccccggacgaaaccgtgctggatggttttgcgctgtcgcgggactaccagatcgactacccggcgtcctggctgacgctggcagccggggacacggtcgaggtggcaggcaatacctatcaggtgcgcgacgtgcgcgccatcggcgacggcaccgagcgtcgcgcctcgctctcccaactctga

SEQ ID NO: 502261 - DNA, 1023 bp, Stenotrophomonas maltophilia
atgcagaacccttttgaaaaccccggcttctcgatggccagcctgacggccgccatcaacctcctgcccaaccgctatgggcggctggagcaactcaacctgtttccggccaagccggtgcgcacccggcagatcatcgtcgaggagtacgccggtcgtctgaacctgctgcccacccgggcgcccggttcgcccggcacggtgggtgaacgtggcaagcgcaacctgcgctccttcgtgatcccgcacatcccgcacgacgacgtggtgctgcccgaggaagtgcaaggactgcgcgccttcggttccgaaaccgaaatggaagccatcggcggtgtcatggcccgtcatctggagaccatgcgcaacaagcacgcgatcaccctggagcatctgcgcatgggcgcgctcaagggcaagatcctcgacgccgacggcagtgagctcgtcgatctgttcgacgagttcgacatcactgcgcaatcggtgtcgtttgagttttcgacggcggccgacaacgggcaaatcaagactgcctgcctggagttgctgggcctcatggaagatggactcaccggcgagttctcgaccggtgtgcatgtgctgtgctcgaccgagttcttccgggcactgaccacccacaaagaggtcaagaccgcctaccagaactggcagcagggcgcggttctgatcaacgacatgcgctcgggcttcagctacagcggcatcaccttcgaggaataccgtggccaggcttcctttgtgcaggccgacggcacgctggggtcgcgccgcttcattgccgcaggggaagcccatgccttcccggtcggcacggtggataccttcgcgacctacttcgcgccagcggacttcaacgagaccgtgaacaccatcggccagccgctgtatgccaagcaggagccacgcaagttcgaccggggcactgatctgcacacgcagagcaacccgctgccgatgtgccaccgaccgggtgtgctgatcaagctcgttgctgcctga

SEQ ID NO: 502262 - DNA, 378 bp, Stenotrophomonas maltophilia
atgcccactgtctctcaacccaagaatctcggcgacctgctgaagtacgaagcgccgaacctctactcgcgcgaccaggacaccgtcgctgccgcgcagaacctgttactgggtaccgtggtgggccgcgaaacagccactgccaagctcaaggcaatcgacccgagcgctacggacggtacggaaaccgccattggcgtgctcggcaatgacgtcgatgcgacgctgattgaccgtgaggacgcgatcctgatcgcccgccacgccatcgttgcgcgcggcgcattaatctggccgaccggcatcagcactgcgcacaaagtggctgccatcaagcaactcgcagaacgtggagtcctggcccgcgagagtgcctaa

SEQ ID NO: 502263 - DNA, 1308 bp, Stenotrophomonas maltophilia
atgcaactcgttcatctggcgtcccgcctctacgggacgccgctcctcattgcacgtcccaaactcgacgtgatcctctccgtgctgggttcccgcatcggcttacccgatctggacatggcgatgccgctgcccatgccgcgccaaagcgccacatcgggtcaggcgggcattgccgtcatcccggtggtcggcacgctggtcagacgttcgatgggcatcgaagccgcctctggcctgatgtcctacggcgagatcgaagcccgcctggacgctgcattggccgaccctcaggtggcgggcatcctgctcgatctggattcgcccggcggcgaggcatcgggtgtgttcgagttggccgagcgaatccgcgccgccagcaccatcaagccgatctgggcgcacgccaacgatgccgcgtactcggcggcttttgccatcgcggcagcctgccagcgcctgacactgtcgcagaccgctggcgtcgggtcgattggtgtgatcgcgctgcacgtcgaccagtcggtgaaggacgccaaggacggcttgaactacaccgctgtcttcgcgggcagccacaagaacgatttctccccgcacgagccactcaccccccaggccaccaccgcgttgcagaccgaggtggatcgcctctacgacatcttcgtgaatcaggtcggacagatgcgcggcatcgatccggatgccgtgcgcgccaccgaggcggggctgttctatggcgagcaggcggtggcagcaggcctcgccgacgcggtgatgccgtttgatgcggtgatgaccgagttcaccgacgcgctggcggccaagcagcggctgacgcagcccggcgcggcccgcgcctcgccgcgaagcctacccacgcaagccatctcaaacccgccccaaagcaaacctttcaccctggagaacaccatgaccgaccccaaagacgacctcgaaaacccgaacgatccggctgacaccgccccacaggacgaccagccgcagcttgagagcgattcgcaaccgacgcctgctccccaaacagcactggcgcagtccttcgccagcgggcgcggccaagcgcaggccattgcagagatgtgcctgatcgcgggccagtcgcaacgcacggcggaattcctcgcggcaggcttctcggaagcgcaggtgcgccgcgccttgctcgacgcccgtgccgaccaacccgaaatcgcctcgcgtatcaccgccgaggcaggaaccagccagcgcccggaaaacagcccggtggtcgctgccgtcaagaaactcaccgccaaggagtaa

SEQ ID NO: 502264 - DNA, 1485 bp, Stenotrophomonas maltophilia
atgagcctgcttggcggcacgccgttctatgacggcatcggtggtggccgtcgcgcattggcatggcaggtcggcaatccaggtgcagtcgcagcactggcgttcacccagaacgagttgcgcgccaagagccgcgatctggtacgccgcaatgcctgggcagcggcaggcgtcgaggcctttgtctcgaacgccatcggcaccggcatcaagccgcagagcatgctggccgatcagcccctgcgcgaagcgatccacagcctgtggtgggactggtgcgaggaggccgatgccgccggactgaccgatttctacggactgcaggccttggcctgtcgcgccatgctcgaaggcggggaatgtctggtgcggctgcgctatcgccgcccggaggatgggctgccggtgggcctgcaactgcagctgctcgaacccgaacacctgccagccacgctgaatcaggagttggcttcgggaaatgtgatccgtgcgggcatcgaattcgacaagctcggacggcgggtggcttaccacctgtatcgctcgcacccgggtgatggctcactggccccgatgtcgggcaccggtggcgtggtgggcggtctcgacactgtgcgtgtcccggccagcgaaatcattcacctgtttcgtcccttgcggcccggacagatccggggcgaaccgtggctggcgcgcgcactggtcaagctcaacgaactcgaccagtacgacgacgccgagcttgtgcgcaagaaaaccgccgcgatgttcgcgggcttcatcacgcgcctgtcccccgaggacaacctgatgggtgaaggactgccggatgccagtggtgcagcgttggccgggctggagccgggcacgatgcagatcctggagcccggcgaggacgtgaagttcagtcagcccgccgacgttggcgcgagctacgccgaattcctgcgcatgcagttccgggcggtggcagcagcgatgggcatcacctacgagatgctgaccggcgacctgacgcaagtgaactattcgtcgatccgggctgggctgctggagtttcgccgccgctgtgaggccatccagcacggcgtgatcgtccaccagctgtgccgcccgatctggcgtgcctggatggagcaggcgctacttgaaggcgcgctggcgttgccgcagttcaccgagaagaagcgcgactatttcgcggccaaatggattccacagggttggcagtgggtcgatcccaagaaggaattcgacgcgatgctgaccgccattcgcgccgggctgctgtctcgatcggaagccatctcggccttcggctacgacgccgaggacatcgaccgcgagatcgccgccgacaaccagcgtgccgatgcgctcggactggtcttcgactctgacccgcgccatgacaaggctctgccgagcgcgcccatgaatgtggccgccacggtggccgtgccgcaagaccaacaggacaactga

SEQ ID NO: 502265 - DNA, 222 bp, Stenotrophomonas maltophilia
atggcctacacacaagcacacctcgacgccttggaagcggcgctggtcaagggcgagaaacgcgtgactttcggcgacaagaccgtcgagtaccgcagcgtcgatgaactccaggccgccattgcggcggtcaagcgcgacctcttcgagcaggccgtggacaccgggctgtggcccggcgcaccacgccagatccgggtcaccaccggtaaagggttctga

SEQ ID NO: 502266 - DNA, 393 bp, Stenotrophomonas maltophilia
atgagcctcgcatcgcgcatcagtgcgctggccagtcgtgtcgggctcgaggttaagaccaagatcgacgccacccaccccggcgtggcccgggcgtgggtgtgtttcggctatgtcggcacgcaggtcgtcgtgcgcgcatcgcacaacgtggccagcgtgacccggacggcggcgggtcgctaccgcgtgaccttcgctgttgccatgcccgacgccaactattgctggacggcgcttgcccgcagcagcaccaacagcggcacgcagcgcattgccatcgtgcgatccagcaccgaccagaagaccgctcagtacgtcgacatcagttgcgccaccacatctgcatcgttttccgattcctccgaaatcaacctcacggtgtaccgctga

SEQ ID NO: 502267 - DNA, 492 bp, Stenotrophomonas maltophilia
atgagtcttgctacccgtatcgaaagcctggtcatccgcgtcgcgcaggagttcaacgatgtccgcgccaaggcaggcaacctggccaacctcaccaccaccgacaagtcgaatctggtcgcggccatcaacgaactgaaggccgccgtggtgtcctcggcggtgatcgacgatgcgcacatcgcggccacgaccacgtactcgtccaacaagatcgtctcgctgctcgatgcgctcaagaccgagatcttgggcggtgccgatgccgcctacgacacgctggtggaaatccagcaactgctgcagaacggcactagcggtctggatgcgctgctcgccgccgtcaacaaccgcgtgcgcttcgatgcggcgcagtcgctgaccgtggccgagcaacttcaggcacgcagcaacatcggtgccgtcgcagccaccgatgtcggcaataccgacacagacttcgtcgcggtctttgtgggtgctctggtctga

SEQ ID NO: 502268 - DNA, 1962 bp, Stenotrophomonas maltophilia
atggacatggactacgaaggcgctgccgagattgagcgtgcgtggcgcgaaggactgactcccgacccgctgctcaccgtgtccgaatggtcggatcgccaccggatgctttccagcaaggcctctgccgaaccgggtcgctggcgcaccagccgcacgccatacctgaaagcgatcatggattgcctgtcgccgacctccccggttgagcgcgtggtgttcatgaaggcggcgcagcttggcgcgaccgagatgggctcgaactggatcggctacgtcatccaccacgcgccggggccaatgatggcggtgtggccgacggtagaaatggccaagcgcaactcaaagcaacggatcgatccgctgatcgaggagtcgtccgcactggctgaactgattgcaccggcgcgcagccgggattcaggcaacaccatcctggccaaggagttccggggtggtgtgctggtgatgactggggccaacagcgcggtcggcctgcgttcgatgccggtgcgctacctgttcctcgacgaagtggacggctacccgctggacgtcgagggcgaaggcgacgcgatctcgctggccgaagcgcgcacgcgcaccttcgcgcggcgcaagatcttcatcgtctcgaccccaacgatctcaggggcgtcggctatcgagcgcgagtacgaggccagtgaccaacgtcgctactttgtgccgtgtccgcattgctcccaccgtcagtggctgcgtttcgagcagctgcgttgggacaaagggcaaccggaaaccgctgcctacatctgcgagtcatgtgacaccgcgattgccgagcatcacaagacgtggatgctggagcacggcgagtggcgcgcgatgatcaccgatggcgcgggtaagactgcaggcttccacctgtcgtcgctgtatagcccggtgggctggcgttcgtggcgagagatcgccgctgcgtgggaagccgccgtcagtaaagagtcgggatcggccgccgccatcaagaccttcaagaacaccgagctaggcgaaacctgggtcgaggaaggcgaagccccggactggcaacgactggtcgaacgccgcgaggactaccgcgtcggtacggtgccgcaaggtggtctgctcttggtcggcgcggccgacgtgcagaaagatcgcatcgaggcgtcggtctgggcctttgggcgcggcaaggagtcctggctggttgagcaccgcgtgctgatgggtgacaccgcccgcgacgcggtgtggaagagcctcgctgaaatgctggccgaaacatggacacatgcctcgggcgcggcgatgccgctggtgcgctttgccttggataccgggtttgccacgcaggaggcctacgcctttgtgagggcctgccgcgattcgcgtgtgatggcggtcaagggggtgcctcgcggggcagccttgatcggcacgccgaccgccatcgatgtctcgcaaggtggcaagaagctgcgccggggcatcaaggtgtacagggtggcggtcagcattgccaagctcgagttctacaacaacctgcgcaagagcgcagatgttggggaggacggattgaccacggtgttcccggccgggttcgtccatctgcccaagatcgacgccgagttcatccagcaactctgcgcggagcaactgatcacccgccgcgaccgcaacggcttcccggtgcgtgagtggcaaaagatgcgcgagcgcaatgaagcgctcgactgctacgtctacgcccgcgcggctgcatcggcggcgggtctggatcgcttcgaggaacgtcactggcgggagctggagcgacaactggggctggccattccgccagcccttgaaacacctactgaatcgatcaacgaggccacccaacgcggtggcctcgctgtttctggcaaccgtaacaccggtcggcgcgtgatcaaaagccgctggctgtcctga

SEQ ID NO: 502269 - DNA, 549 bp, Stenotrophomonas maltophilia
atgggtatttcgattcgtgcctacgcacgccaccgaggggtgtccgatgcagcggtgcgcaaggccatcgctgctgggcggatcacgccggaggcagacggaacgattgatgccgagcgcgtcgaccgcgagtgggcgcgcaattccgatgcaccgcgcaatggcacggccacccgcgcggtcaaggtcgccgtccaggaatccagcggggccacaggagacgggcaagcagcctcattggcaacatccgcagcaggtggcacgtccttgttgcaagcgcggacggtcaacgaagtggtcaaggcgcaaaccaacaaggtgcgtctcgcccgcctcaagggcgagctggtagatcggccacaggccatcgcccatgttttcaagctggcgcgctccgaacgagatgcctggctcaactggcccgcgcgcatctcggcacaaatggcagccaagctcggcgtcgatccgcacacgatgcacatcgccctggaggcagccgtgcgtgagcacctgcaggaactgggcgagatgcgcccgagggtggattga

SEQ ID NO: 502270 - DNA, 198 bp, Stenotrophomonas maltophilia
atgagcaagctcgaacaactcctgacccagatcgcgcaaaacaagctgggcatcgaaaccctggaaacccgccgctcggacagcctcgatttccacgatgtagcggtctggtgcctacgcgatgcgcttgaagccgccttcaacgcgggtcttgagcaggggcgcaatgccaacccgtcagacaaggccaacacctga

SEQ ID NO: 502271 - DNA, 564 bp, Stenotrophomonas maltophilia
atgaccaccactcaactgacccctgcccagcaagcgatcctggcccacgcggttgaacacaccagcggcaagatcgactggttccccgacaacatcaaaggcggcgcacgcaagaaggtgctcgacggacttttcaaccgcgcactgatcaccaccgatggcaccgactggcttgtcgctgcggagggctacgacgccctgggcattccgcgtcccgacgtgaacaggaagggcatcggtcagttcgaagccaatctcgaccggatcatcgccaacgctgaaggcgcgcctgcggccgcgagcgatcccgaactggaagcggccgtaaccgccgccgaagccacgtgggtcacgccacgcacacgcgagaacagcaagcaggccgaagtgatccggatgctgcaacgccccgagggcgcaaccatcgaccagatctgcaccgccaccggttggcaggcgcacacggtgcgcggcaccttcgccggagccttcaagaaaaaacttgggctgaccatcgtgtcggacaaaccgcagggcggcgagcgggtgtaccgcatcgcctga

SEQ ID NO: 502272 - DNA, 360 bp, Stenotrophomonas maltophilia
atgagcaccatgaccatcaccatcgaacgcaccccacgcactctgcagttcgcaggccaaagcctccaggtcgaagagttgagcatccgcctgccgtttgcacgcaaacctgccgacctcggcgaactgggcgggagcgaccagcacaaggtctacgtcaccgagaccaaggagctcacccctgccgaattcgacgcctttgggcgcagcctgctggtgtcacgcgactggctgcgtggcaagggtggcggcactggcgacggctacctctgcgtcgaggtcactgctcccggacgtccttacctctacgtcaatcccgagggcggtgattacgcccgctacgtagcccgtctcgggtaa

SEQ ID NO: 502273 - DNA, 366 bp, Stenotrophomonas maltophilia
atgaccaccaaccagatccccaccacccagaacgaagcctggggtttttggggcacgatgaacgaacacgccagcgccgcatggcccctggccatgaacgccatttcggacgccacccaccagcccctcgaatcggtgcggaccttcctcgacagtcgccacggacgccactttgccgacgacgtccagaacgggctttacgagggcaaggccctgtcggacgcgatcaacgccgccacccagcgttggatgggctggacgattggccgccagaccagcaagcagtacggcatcccgcgcggcctgccttacctgacgggctttgtgattcactgcgagatcgtcgaagaatcgctggccgcctga

SEQ ID NO: 502274 - DNA, 1263 bp, Stenotrophomonas maltophilia
atgaactggctggccgacaagatcgagcagtggccgacagccaaactgctgccctatgcccgcaatgcgcggacgcactcggatgatcaggtggcgcagatcgccgcatcgattgccgagtttggcttcaccaatccgatccttgcaggcagtgacggcatcatcgtcgctgggcatggccgcttggccgctgcgcagaaactcgggctggaaatcgtgcccgtggtcgtactggatcacctgagcccgacccagcgacgcgccttggtcatcgcagacaaccgcatcgcggagaacgctggctgggatgacgcgatgttgcggatcgaacttgaggctttgcagctggaaggtttcgatctggacatcaccggcttcgacgccgacgcgctggccgaactgatcgcgggcgacgagccgcacaacgagggccagaccgatgaggacgcggtaccggaggttggcgaaattccaatatcgcgcccgggcgatgtctggatcatgggccagcaccgactgctgtgcggcgactcgaccgtggcagagagctatgcccggctgatgcaaggcgacatggcagacatggtcttcaccgacccgccgtacaacgtgaactacgccaacagcgccaaagacaagatgcgcggcaaggatcgcgcgatcctcaacgacaacctgggtgacggcttctacgatttcctgctggcggcactgacgcccaccgtggcgcattgccggggcgggatctacgtggcaatgtcctccagcgagctggatgtgctgcaggccgccttccgctccgccggaggcaaatggtcgaccttcatcatctgggccaagaacaccttcaccctggggcgcgccgactaccagcgccagtacgagccgatcctctacgggtggcccgaaggcgcacagcgccactggtgtggtgaccgcgaccagggcgacgtgtggaacatcaagaagccccagaagaacgacctgcacccgacgatgaagccggtggagttggtcgagcgcgcgattcgcaattcgagccgccctggcaacgtggttctcgacccgttcggtggctctggaacgacgctgatcgccgccgagaaggcaggccgcattgcgcggctgatcgaactcgaccccaagtacgtcgacgtgatcgtgcgccggtgggaggagttcaccggcaagcaggccacccgcgaggcggatggcgcggcgcttgatcaggcggccagcgattcttcgacgatctcgcagtga

SEQ ID NO: 502275 - DNA, 1413 bp, Stenotrophomonas maltophilia
ttgaatacgctcaacgtcgagtaccgcaaggtcgaggcgctgattccctacgcccgcaacccgcgcacacattccgaggcgcaagtcaccaagatcgccgccagcatcgtcgaatatggctggacgaacccggtcctggttgatggcgacaacggcatcatcgcgggccatggtcgtttggctgctgcacgcaagctggggctggatcaggtgccggtgatcgaactggcccatctcaccaccgcgcaaaagcgcgccttggtcatcgccgacaaccggctggcgcttgacgctggctgggatgaggagatgttggcgctcgaactggcggagctttccgaagctggttttgaactggcgctgaccggcttcgagaacatcgagatcgatgcgctgctggcagatgccacgcccaccgaagcagaacctgcggcgcaagatgatgcagatgccgacgaacccgatacgactgatgacgtacctgacaaaccagtggtggcggtgtcgcgcgagggcgatgtctgggccatcggctcgcaccggttgatctgtggcgacgccacagacccagccgtggtcgccacgctgatgcagggtgacaccgcgcagctttgcttcacctcgccgccgtatggcaaccagcgcgactacacctccggcggcattgccgattgggatgcactgatgcgcggtgtgttcgcacatctgccgatggcgggcgacggacaagtgctggtcaatcttgggctgatccaccgcgacaacgaagtcatcccctattgggacggctggctgtcctggatgcgtcagcaagggtggcggcgcttcgcgtggtacgtctgggatcaggggccaggcatgcccggcgactggcagggccgattggctcccagcttcgagtttgttttccacttcaatcgcagcacccgcaaacccaacaagatcgtgccttgcaagcacgcaggccaggaatcgcacctgcgcgctgacgggtcgtccacggcgatgcgcggtaaggatggcgaggtcggcggctggacgcacaagggtcaaccgacgcaggacacccgaatccccgactcagtgattcgcgtgatgcgccacaagggcaagatcggtcaggacattgatcaccccgccgtcttcccggtggcgttgccggagttcgccatcgagtcctacacagacgccggagacatcgtgttcgagccgttcggcggcagtggcacgacgatgctggccgcgcagcgcactggccgcatttgtcgcagcgtcgagattgcgccggagtacgtggacgtggccattaagcgttttcagcaaaaccaccccggcgtgccggtcactctcatcgccactggccaatctttcgacgagatcgccactgaacgcgaaatggaggtggcggcatga

SEQ ID NO: 502276 - DNA, 405 bp, Stenotrophomonas maltophilia
atggctgagtggacgatcgaaaccgtggccgaccggttcatcgaggccgcacgaactgcccaccgccttcctccggttcgcgtgcagggctacttcaactgctggccggcgatcaaacgcatgccatgggaaaacctcggcgcagagccaccggtctaccgctttccgcccgaccctgcggccatcgaccggatgctggagaccatgcggtgggtccagtggcttgaggaggaacagcgacacctcgtctggatgcgggcacagcggtacccgtggaaagatatctgttgccgcttcgcctgtgaccggaccactgcctggcgtcgttggcaggcagcactggcgatcgtggtcgagcagctgcaaggggcgaagagacatggagcggtagccaatgcgcgctga

SEQ ID NO: 502277 - DNA, 213 bp, Stenotrophomonas maltophilia
atgaaggttccgactcacgcctaccgctgtgccctggctcgactgcagcccgatccgcgccccgatccggagcagatcaagcgcgaaggatggcgcgaccagcagatcctggtgatctcgcccgacgacacgcgactcgattgggtcgaacgcgaactgctgcgccggatcggcgatcggctgtacgggtcgaaggagcgtcgacatggctga

SEQ ID NO: 502278 - DNA, 780 bp, Stenotrophomonas maltophilia
atgaacattgcccaatcggcagttggtagcgccgttgccaactgcacccatttccttgccaactacccgcagttggcaaacccctgccaactggaagtccaggtaaatcagggtattgcgggaaattacccgcagttggcagttggcaacgattccaacttgccaactggcgcaaacccgcgtggttgctggactttctcccattctccagttggcgaaaactccccctcctactacgtaggagagggaccagatggtccctccactctacgtagggggcttgccggccacccgggatcagatcatcggcggccatcccggtcctcgatcctggcattggatctcggcacccagacaggctgggcactgcgcgaccgcgatggcgcagtgaccagtggatcggaatccttcaagccgcagcgcttcgagggtggcggcatgcgctacctgcgattcaaacgctggctcaccgagatcaagcagtcctgcgacggcatcgacgccgtgtacttcgaggaggtgcgccgccacgccggggtcgatgcggcacacgcctacggcggcttcatggcccacctcaccgcatggtgcgagcaccaccagatcccgtaccagggcgttccggtgggcacgatcaagaagcacgccaccggcaagggcaacgcgaacaaggatcagatgatcagcgccgcccggttgcgtggccacgcaccggctgacgacaacgaagccgatgccattgcgctgttgcactgggccgtcgagacacaggaggtgtga

SEQ ID NO: 502279 - DNA, 2190 bp, Stenotrophomonas maltophilia
atgatggccgacaacatcatctggctcgacttcaatgacgcgcccgagcagcgcgacgaactgacctctgacaccgatgccttgcgcgctggcttgctggatcgacttgaggcggtcctccactacctgtttccgcaggggcgcatccggggtggcaagttctacgtcggtgatgtcgatggcaacccgggcaagagtctggtggttgagctggacggaccacggcacggcctgtggaaagacttctccaccgatgagggaggcgacatcatcgatctgtgggcgcgctcgcaaggtcgatccgcccgcagcgacttcccacgtatcgccgcagagatccggcagtggctcggcattgctaccccggttggcacgccgatgcgccgtgatgttcgcagcgtgccgatggatgacctcggcgcctacaccggcaaatgggattacctgactcccgatggcgagctgatcgcctgcgtctaccggtatgacccgccgacaggcaaagagtaccgcccatgggatgtgcgagcccgcatgtggcgcgcccccgaccccaggccactctacaaccagccggccatcgggaaagcgcgagaggtcgtcctggtcgaaggcgagaaatgtgcggctgcgttgattgcctgcggcattgcggccaccaccgcgatgaacggcgccaaggcaccagtcgacaagaccgactggcgtccattagccgggaaatccgtggtcatctggccggaccgggatgcccctggctgggactacgccgagagcgcagcacgcgcttgcgtgatggcgggcagcgcatccgtggccattttggtgccgccgaccgacaagccggccaagtgggatgcagcagacgctgtcgacgagggcttcgactgtgcggcattcatcgcccagggtgaccgacggatcgtaaaggcagcggctccctctctgcccaccttcacgctcggcgaactgctcgatgacaactcgccgctgcccccggatctgatcgctccgcgcgtgctgacaccggctggcatgttggtgttcggtggcgcaccgaaagtcggcaagagcgacttcctgctgtcttggctggcgcacatggctgcaggcgctgtattcctcggcatgcagccaccccgtccgctgcgcgtgttctacctgcaggccgaggtccagtaccactacctgcgcgagcgcgtgaaggatgtgcgcctgccatcacaccggcttttggatgcccgcgccaacttcgtcgccacaccgcagttgcggctggtgctcgatgacgcagggctggcgcaggtgatcccggcgatcgcgcaggctttcggcggcgagcctcccgacatcatcgccatcgatccgatccgcaacgttttcgacggcggtgacgccggtggcgagaacgacaacggcgcgatgctgttcttcctgtcccagcgggtggagcgcattcgccaggcagtgaatccggacgccggcgtcatcctcgcccaccacaccaagaagctcggcaagaagcagttcgaggaggacccgttccaggcactggccggcgcgggaagtctgcgcggctactactcgaccgggatgttgttgttcaggcccgacgagaccagaacgacccgccagctgatctttgagctgcgcaacggcgcgggtatcccgcaacggcatgtcgacaagatcaacggcgagtggcgcgaggtcgatgccaacgagcggctggtgatgaaggactacggcgagcgcttggatgccgagcgccgccgcaagcgcgacgcgatcctccagatcttgttcgaggaggccggcaacgggcgctgctacaccgccaaccagttcgcggagtccttcgagggcaaggctggcctggggggcgagcgcaccatccgcgaacgcgtctccgcgctctcgacgcagggctacatcaagtatttccgcaacgcggctgactacggtctgccctccagcggccgcaccaagttcggctatctctgcgtagaaggcatggtgctgcgcttgccagctggcgatgtcgacaccgccaccggcgagctgccgatgcgcgagcacacggtgctccccacccactacaagtgcccgcattccggcgcctcgatgcctgtcgagaacccagatgtgtgggtctatcacgacgaactgaacgacccggaggcctcatga

SEQ ID NO: 502280 - DNA, 756 bp, Stenotrophomonas maltophilia
atgctggacttcaatcaccgccccaagatccacgagcagatcggcgcgctcatcgacgccgcacttagcgccgaacgcgacaaccaaccccgtcgcaactatctcggtgcgtctcggttgggcgttgcctgcgagcgggcgttgcagtacgagtatctccaaacccctgtcgatgctggaagggaaatcccgggtcgcgtgttgcgcatcttcgaggtgggacacgctctcgaagagctggccattcgttggctgcgcatggccggattcgatctgtacacccaaaaggccagcggcggtcagttcggcttttccgttgcaggcggccgtattcaagggcacgtcgatggcgtcctgaacggcggccccgcagagctacgaatgagctatccggccctgtgggagtgcaagaccatgaacgacaagtcctggcgggatacggtcaagcacggcgtcagcaaatccaaaccggtctatgccgcgcagatggccatctatcaggcctacatggaagccagcatcccgggcatttccacgaacccagcgttgttcactgcgatcaacaaggactccgaggagatctggttcgagttggtgccgtttgacggcggcctggcacagcgcatgtccgatcgcgcggttcgggtcatcacggcaacggacagccaggaactgctgccgcgccatgcaaccaccccaacgcatgtcgagtgcaagttctgcccctggcaggaccgctgttggagttcgacatga

SEQ ID NO: 502281 - DNA, 264 bp, Stenotrophomonas maltophilia
atgatcgatcccagtgatatggagctcgccgccatggcgtcctgcctggcgccgcttggagagtatgtcggcgccatcggcatgcagcgcccgctggcggactacagcaaagacgaagtgctgatgctgatcgacgtggtggtgaccgcctaccaggaacacatgctcgtcgagcacgagcggatggcggagaaggaccgcgcttttcttgaggagcgactcgcccgccaaggcaagtccgcttcgacgggagtgccgttctga

SEQ ID NO: 502282 - DNA, 1677 bp, Stenotrophomonas maltophilia
atgatgctccgcccccgccaagccctgctggtcgagcgctctttggcggcgctcgcccaacacggcaacaccctatctgttggccccaccgggtcgggcaagaccatcatgctgtcggcggtagccggcagcttgttggccgagccagatgtcaaggcctgcatcctcgctcatcgcgatgaactgaccggccaaaacctgaccaagtttgcacgggtgaatccgggcgtcagcacctccgtgttcgatgccaaggacaaatcctggtccgggcgcgccacattcgcgatggtgcaaacgctgtcgcgcgacaaccatctcgccgcgataccaacactcgatctgctggtgatcgatgaggcgcaccacgccgcctcgacgtcttaccgccgtgtgatcgaccgggtgctggacaagaacccgcacgctcagattttcggggtgacggcgacacctgcccgcagtgacggtaagggactgcgagaggtcttcagtaacgtcgcggatcaaatcaccctcggcgaattgatcgcctccggccacctcgtaccgccccgcacctttgtcatcgatgtcggcgcccaggagcagttgacgcgagttcgtcgcacggccaccgactttgacatgacggaagtcgaggcgattctgaacaagacgcccatcaccgatgcggtgatccgtcattggcgggagaaggccggcgagcgcaagacgatcgtgttctgctcgaccgtcgcccatgccgagtgcgtgcgccgggcctttcaggatgccggtgtgtctgccgtgatcgtgcatggcgagctcccagacgcagagcgaaaggcacgactggccgactacgaatccggcaccgcgcaagtcgtggtcaacgtggctgtgctgaccgaaggctacgacttcacgcccacgtcgtgtgtcgttctgctgcgacccagctcgcacaagtccacgctgacccagatgatcgggcgcggcctgcgcaccatcgacccagcggagcatccgggagtcatcaagaccgattgcgtggtcctggacttcggcaccgcaaccttgatgcacggttccctggaacaggacgtcaacctcgacgggcaccagcatcacggggaagcgccgaccaaagactgcccgtcctgtgaagccaccgtcccgctcggttgccgcgaatgcccgctatgcggattcgtctgggagaacgagaccacagaggaaggtgatgcgctggccgatttcgtgatgaccgagatcgacctgctcaagcgctccaacttccgctggtgcgacctgttcggttgcgacgacgcactgatggccaccggcttcaacgcctggggtggcgtgttcttcctgaatgggcgctggcacgccgtgggcggaggtaaggatctgcagccgcgcttgttggccgttggcgatcgcaccgtctgcatggcgaaggccgatgactggctgaatgaccgcgagtcggcagactccgcgcacaagacccggcgctggttgaacgaaccgccgaccgcgaagcaactgcagtatctgccgcaggcgctgcgcgccgactttggcatgacgcgctatcaggcctcggcgctgctgtcgttccagttcaacaagtcgtcgattcagcgcctcgtggtggctgccaacgatgcccaccgggaggccgcgtga

SEQ ID NO: 502283 - DNA, 606 bp, Stenotrophomonas maltophilia
atgacctatttcgattttaattccgcttccgaacagacctcattcgacctgattcccaagggcacgctggtgcgcgtccgcatgaccatcaagccgggtggcttcgatgatccgtcgcagggatggaccggcggctacgccacccgcaacgacaacaccggctcggtgtacctgaactgcgagttcgtcgtgatggagggtgagttcgcccgtcgcaagatgtggtcgctgatcggcctgcacagcccgaaaggccctgagtgggccaacatgggccgcaccttcgtcaaggcgatcctcaactcagcgcgcggcgttcaccccggcgacaacagtcctgctgcgcaaaacgcgcgccgcatcagcgggtttgccgatcttgatggcatcgagtttctcggcaaggtcgactgggacaaagaccagaacggccaggacaagagcgtgatcaaggctgcgatcacgcccgaccacaaggactacgccgccctcatgggtggcgcgcagggagcagcgaaagcgccagcacccgcaaacgggtcgaatgcgtatgcacaggccacgggccgtgcctccgtgccgggtcgcccgagctgggcacagtaa

SEQ ID NO: 502284 - DNA, 876 bp, Stenotrophomonas maltophilia
atgagcctccccatcattactgcagaccagcgcctggccgagcgccgtggtgtgaaaggcgtgctcgtcggcaagagcggcatcggcaagacgtctcagctctggacgctgaaacccacggccacgctgttcttcgatctcgaggctggggatctggccgtcgagggctgggcgggcgacaccatccgtccgcgaacctggcaagagtgtcgtgacttcgcggtgtacatcggcgggccgaacccggcactgcgcgacgaccagccgttcagccaagcccacttcgatgccgtgtgcgcgcgcttcggcgatccggccgtgctggagaagtacgacaccgtgttcgtcgactccatcaccgtggccggtcgcctgtgcctgcaatggtgcaaaggccagccccaggcctactccgagaaaaccggcaaacccgacagccggggtgcgtatgggctgatgggccaggaaatgattggctggctgacccacctgcagcacacgcgcggcaagaacgtgtggttcgtcggcatcctcgacgagcggctggacgatttcaatcgccgcgtgttctcgctgcagatcgacggctccaagaccggtctggaactgcccggcatcgtcgatgaggtcgtcaccctggccgagctgaaggccgatgacggcgccagttaccgcgccttcgtctgccacacgctgaacgcatggggctaccccgccaaggaccgctctggccgactcgatccgatcgaggaaccgcacctcggccgcctgatggaaaagatcggcggccctgccaggcccgccaccgagcgactcgatttcgcgcgccccgcgcccgctgccatccccgaatccacttccactcaggagtcctga

SEQ ID NO: 502285 - DNA, 315 bp, Stenotrophomonas maltophilia
atgaaaaccaaacccacgctgctcgaactgctgcgcaagcagccggaaatgtatctccgtgatctgccggacaacatccgcatcccggcactggacggcaatcgcccggacgaagtcgttcgtcgcctcgaagacgccaccatcgatgacctggccttcgcgatccagggcatggagtcggaatcccgtctgatccatcgccgtctgggcggtctgcgcgacctgtacgaaatggcccgcaagcacggcgcactcggcgtgaccaccgtcgctgacgcgttttccagcatcagcaccgaggaggccggcaaatga

SEQ ID NO: 502286 - DNA, 471 bp, Stenotrophomonas maltophilia
gtgaaccgcatctcccccgacgaggtcctgaccaccccggccggcgaactggctgcgcttgccagcgagtcgctgttccagctcaagaacgacgctgctgatcttctcgccgctgccaaggcgatcgtcgagcacgtcgatcgcgcactggatctcaagtatgccgaacacgcgcaccagctccgcctggcagcaggcaaggacaccggcgtcgtccatttcgacgacgggcatgtccgcatcaccgccgatctgcccaagaaagtcgactgggatcagaagcggctcgccgagatcacccagcgcatcgccgccaacggtgacgacccgtccgagtatgtggagatcagctaccggatctcggaaaccaagttcaacgcgtggcccgagtcgctcaagagcgccttcgccccggcacgcaccctcaagaccggcaagccgggctttcgtctcgctctgcttcaggagtaa

SEQ ID NO: 502287 - DNA, 213 bp, Stenotrophomonas maltophilia
gtgagtgtcaaacatctgaatcaaggccaattggccgaacgttggggagttagcgaagcaacgcttgaacgctggcgctccgaaggtatcggcccggtattcctgaagctgcagggtcgcgtcgcttatcgcatcgaggacatcgaagcctacgagtccgagagcctgcgcaagagcacctctgaacgcgtcaatgcgggaggtgcgctgtga

SEQ ID NO: 502288 - DNA, 1005 bp, Stenotrophomonas maltophilia
atgtcgtcgaagcccctgccgacgcagtcgctgcttgagctgatcgacctgttcgagcagtcgggacagccgattctcgatggagatggacagcggcttcatggcgtcccagggtggagcgctttcgggcgtacctccctgaccgccaagcagttggaacactgggcggattgcgtcggctattccggcagctacccagcgccactcggcgatgaccgcgtgcatgtcgacctggcggaggatgaccagcctgaccgctatcgataccggtgccccgagacttttcgatggaagttcgtcccggccgcagaggtcgcagtcttcagcgtccgaccgccagcaatcctgaacgtcgtctctgatcttctcggtatcgcgcaggccctgcgcaagggaatcgaggcgcccttgctggacgattcactgtggcatcttggcaagaccagagtgggaccagcactgacagacgtctggcttgttcgtgggttggcgcgatccgtcgaacaggtgtttcggcatttcagccaaaccagtctgcctgatcagggcctgatcttgtcgtcaggcggtgtgctgccgcagtttgtccggccgccgcgatgctaccgattcgcatcgctacgagcttcaatcgtcgactacgtcgccacgccgtgcatcgacatggatctcctgcatcgaatactggccgctccgcccgatggcgcgatccgccccgtgttgccggtgcacttcgacgagtacaccaacacgctgaccatccgcaccaagaccaagccctggacgatcaagggcgagcgtcaggctgcggcagtccgctacatgttcgagcaggctatcaacgacaggtggattctcccagccgctgaaattctcgacgcagcctatgcagacaagaagacggcacgcagtcagcgcatgcagaacctgttcagtggcaacaccgactgggaggactacatcgacaaccctgaaaaggggaagtatggcttccgccgagattga

SEQ ID NO: 502289 - DNA, 1230 bp, Stenotrophomonas maltophilia
atgaacgatgcagagaatttgaccaaactcctgggccacctgccgccggcagtgttccgtgaattcatcgtggacgagttcagcctggccatgccggacctggacaccaagaagccgaaaaaggagcagcgtgaacagatggaggccgtgctgtccgcccttggggtgagtgagcggcagcggatcgaggaagtggccgaacgaatcgtgctgttgtcggacggcgccggccaggacgtcatcgacggcttcaaggacgacattttcgatgacgccgcccgggaagccttcgccgcgatcccgaaccagtaccagcgggcgctgtggctccatgtccatgagcccgcactcttcgaggaagcgctgaacgcccggcaggccgacgtgtttcggcaaagcgcctcttgttactcgggcttcatggcgcccgccaaccttgctgtactcgacgatgcagctgccaagacggcgttccaccaaaccgtcgcccaacagctcgggtgttccgatgacgccgtcgcgatccagatcttcaagcgcctgcggcccgatacgcagaccggcgaagacgtggacctctaccagatcagcatccaccacaaccgcccgccggaaatcatcgactgcgtgcaggccagcgaactggtgccacaagaggtgatccgggcggtgtcatcgcacatcacctatgagccgaccaatggacacctggaggtgctgtcgaaggatacggatgggcgcgaagcgctggcccgaatcgtggccgactccctgctgcaatcgccgatcaccggcgagaagatcccgctcaagcagtacgactaccagagcctggcggcaccacgaaacttcgacattgccagtgagctggtgacgtccgtcaaggtcgtcgagctcggctattccgctgcaaacggtcgctcgctgctcgtgaaaatctggaccaaggatgccgacgacatctacaccgctgctcggtcgttgatcagccccaccttcgacttccgcgatcaccacctgaactacgccaagctgtccatcaagctgaaaaaggtcggcaaggaccgcgcgcggacgatcaccgtgatcctgcgtgacgacaacaagtgcaacatcaagacgaagcgggaaaaggaccgggcgctgtgcgatcggctgctcgccaaatggaatctggtgaaggagattggccatgtcgtcgaagcccctgccgacgcagtcgctgcttga

SEQ ID NO: 502290 - DNA, 321 bp, Stenotrophomonas maltophilia
gtgccatcgcccctgggggacaagatccgcgcattgcggaagcagaagaagctcagcctggagcagttggccgagctgacggactccagcaagagctacatctgggagctggagaacaaggacgatccgaaaccatcggccgacaagatcggcaagatcgccgccgtcctcgatgtcaccacggagttcctgttgaccgagtcggccgccacgccggacgagcaagtgctcgatgaggccttcttccgcaagtacaaaaccatgtcggagccggacaagaagaagatccgcaagatcctcgatgcctgggaagatgaatga

SEQ ID NO: 502291 - DNA, 912 bp, Stenotrophomonas maltophilia
atgacggatgcgaagaagcccatggccgaggccaatcgcatctcgtccatgctcaacacggttctcggtgcggatcgctttccggtcaaggttgatgagctggcgctggagtattcccgccagtgcttctcagactcgccgatcgacaaggtccagggcgaagatctagacggtttcgatggtctgctgaaagccaataagtcgcggtcgaagtggctggtcctctacaacagtgccaccccgtcggagggtcgcaaacgcttcacgattgcgcatgagttcggccactacatccttcaccgtcaccagcaggacattttcgagtgcggcgacggcgacatcgaaacgggagacaacaacgagcgcgacatcgaggcagaggcggacttgtttgcttcaaccctgctgatgccgctggacgacttccggcgccaagtcgacggccagccgatcagcttcgatctgctgggccactgcgcagaccgctatggtgtatcgctcacggccgccgccttgcgctggaccgagattgcacccaaacgagcggtgctcgtggccagtcgcgacgatcacatgctctgggccaagtcgaacaaggcagcgctcaggtccggcgcctacttcgcgacgcgcaagaacaccatagagctgccgcacgatgcgcttgcgcacagctacaacgcctttggcatggccgacagccagacagggcgtgcccagtcctggtttgcccgtgaacccgccagcatgccggtcacggagatgacgcgcgtcgcgggtcagtacgactacacgctgacactgctattgctgcctgaggccgagtggcagggagcgcggcacgatgatgaggaaccggaggaagacacttacgaccgcttcatccgcaatggccagtacccggttcgatag

SEQ ID NO: 502292 - DNA, 1215 bp, Stenotrophomonas maltophilia
atgagcgcccacaagtggcaattcgcttcccgctttcgccgtcattcctttggctggcggtccgacacgccggtgcagcggatcaaggaagccatcacggagatcaagcaagtcgcccgcaaggagcccgtgctcgcggctgagggcgccattaccctgctggaaaagctctccccggcgctggaacaggtggacagttcatcgggcgcactgggttcggccgtcaacaaggccatcgataccctggtgcccatcatcgtcaaggctgacgttgagccgaagctgcggcaacgctggctcgaacgcttgtggcaagcgctgcaagacgacgagatgccctacatcgaactgctcggcgattattggggcgagttgtgtgtgacaccggaactggcgtcgcactgggccgatgagtttttgccggtcgttgagagcgtgtggagcccgaaggcttccggacatggattcttcaaaggcaccagcgcttgcctggcatcgatgtacgcggcgggtcgccaccaggagttgctggcactgctcgacaaggcgccgttcaagtggtggcacgatcggcgctggggtgtgaaagcgttgtcagcgatgggcaagaaggcggaggcgatccgctacgccgaggagtcgcgcggtctcaatgatcctggctggcagattgcccaagcctgcgaagagatcctgttgtcctccggtttgctcgacgaagcctaccgccgctatgccatcgaggcaaatcagggcacgacgaatctggcgacgtttcgcgccatcgccaagaagtatccccacaagcaaccggaagagatcctgcgcgacctggtagccagcgcgcctggcgccgagggcaagtggttcgccgccgcgaaggatgcgggcctatttgatgtggcgatcgaactggtcacgcgcagcccgaccgatccgcgcacgctgacacgcgctgcccgtgactatgccgagaagcagccagcattcgcgctcgcagccggcttggccgcgttgcgctggatctctcttggacacggctatgagatcaccggcactgatgtgctcgatgcttattcggcagtcacgcaggcggcggtgaacgctgttgtgccaacccagcaggtcaatgagcggatccgggacatgatcgccagcacccagcccggcaattcgttgatgacgaccatcctcgcccgtcatctggcgaattaa

SEQ ID NO: 502293 - DNA, 219 bp, Stenotrophomonas maltophilia
atgcatcaaatcaaccatctaccaccggagcggatgaccccagaacagcgtcgccacgagatcgcgtcgttgctggctaacggcctggcacgcatgcggatcagcgacgcggaacagtgcgcacatagcgccgaagcgagcgagtttgagcttggcttctctggcaaccagcgcgttcatacagaccccgtcaacaagacaactacggagtcgaaatga

SEQ ID NO: 502294 - DNA, 438 bp, Stenotrophomonas maltophilia
atgccgatggcagagatccgggcgctttggcagaagctggtcggtggcgacacgcccacccacaaccgccagttcctcgaacgccggattgcctaccggctgcaggagctggaattccgcaaggtcgacgccaacctgctggatcgcaaccagcgtcgcatcgaatctctggtcgaaaccggcaaggtgaaaaaacgcgaccgcgattaccgtccggccgcaggcacggtactggtccgcgaatacaaaggcgtggagtaccgcgtgatcgccaccgccgacggccagtatgacttccagggacgcatgtacccgagcctctcgatgatcgcccgcgaaatcaccggcatgcgctggtcggggccactgttctttgggctcaagccgccatccaatgccaagaccaagccgtccaacaagaagagaggtggacgatga

SEQ ID NO: 502295 - DNA, 1356 bp, Stenotrophomonas maltophilia
atgagcgaagtcttgaagcgccgcatgcgctgcgcggtctacacgcgcaaatccaccgacgaaggactcgaccaggaatacaactccatcgatgcccagcgcgacgccggtcatgcctacatcgccagccagcgcgccgagggctggattccagtagccgacgactacgacgatcccgccttctcgggcggcaacatggaacgtccggcgctgcgccgcatgatggcggacatcgaggccggcaaaatcgacgtggtcgtcatctacaagatcgatcgccttacgcgcagcctggcggacttctccaagatggtcgaggtgttcgagcgctacggcgtgtcgttcgtgtcggtcacccagcagttcaacacgacgacctcgatgggtcggttgatgctgaacatcctgctgtccttcgcccagttcgagcgcgaggtcaccggcgaacgcatccgcgacaagatcgcagccagcaagcgcaagggcatgtggatgggcggcgtgccaccgctcggctacgacgtcgagaaccgccgactggtgcccaacgaacgtgaggccaaactgatcaggcacatctttcagcgtttcgtcgaactcggctccagtactgcgctggtcaaggagctgaaactggatggcgtaacgtcgaaggcgtggaccacgcaagacggcaagacgcgcgatggtagaccgatcgacaagggccatatctacaagctcctcagcaaccgaacctaccttggtgagttgcggcacaaggatcagtggtaccaggccgaacatccacccatcatcagccgcgaactgtgggacagcgtccacgcgatcttggccaccaatggccgggtgcgcggcaacgcaacgcgggcaaccgtggcgtatctgctcaagggcatcgtattcggcaacgatggtcgagcactgtcgccgtggcacacgaccaagaagaatggccgtcggtaccggtactacgtgcctcagcgtgacgccaaggagcacgcgggcgcctcaggcctgccgcgcttgccggccgccgaactcgagtcggcggtactcgaccaactgcgcgcgatcctgcgtgccccgaatctactcggcgacatgctgccgcaggcgatcaagctcgatccaaccttggacgaggcgaagatcaccgtggccatgacccggctcgacgcgatttgggatcaacttttcccggccgagcagacccggatcgtgaaactgctggtcgagaaagtcatcgtgtcacccaacgacctcgaagtgcggctgcgcgccaacggcatcgaacgcctggtgctggagctgcgccccgagccggtcgagcaacaagtggaagcactggcatga

SEQ ID NO: 502296 - DNA, 438 bp, Stenotrophomonas maltophilia
atgagcgacatccgcatccagaagaccggcgagcccgacatcctgcagaccagcgacggcaggctgaccttgtccgtgccgatccagatcaaacgccgcagcggccgcaagctggtcaccttgccaaacggcgaaaccgcgccggttagaccgtgggacgtagcaccaacctcaatccaactggcgctggccaggggccaccgctggctggcgatgctggagtcaggagaggcgaagtccttgaaggagatcggcacgcgggaagggatcgacaacagctacgtgagccggatggtcaacctgaccacgctggcccccgacatcgtggcggccatcctggacgacgcattgccgaaccacatcacgctgttcgatctggcggttgatccgccagcgctgtgggatgagcagcgggagcgagtcggccttccgcgttga

SEQ ID NO: 502297 - DNA, 918 bp, Stenotrophomonas maltophilia
atgaatgaacgaaacgtggcggcatcagtacgtgcccgtctgctcaaccgcgcccgcgagaccaagcaggatttcaacttggtcctcacgcgctatgcgattgagcggccgctgtaccggatcagcatctcgaagcacgcggatcagtttctgctcaagggtgccttgctgtttgacctgtggttcgacattccacatcgcccaaccagggatgctgattttctgggattcggctcggcagagctgccgcacatcgaagccgtcttcagggatatctgcgcgatcgaaacgcacgacggcgtggcgtttcaacccgacaccttgcacgccgccgagattcgcaaggaggcgaactacgctggtgtgcgcgtgacgttgctcggtgtgatcgatggcgcgcgctgccagatccagatcgatatcggcttcggcgacgccgtgacgcctggcccggaggatgtcgaataccccgtcatgctggcggagttcgcagcacccaagctgcgggtctatccgcgctacaccgtggtggccgagaaattcgaggcgctgtcgtcccttggcatcgccaacagtcgcatgaaggattatttcgatctgtggatattggcgcagcacaccgacttcgatggcgacacccttcgccaagcgattcaggcgaccttcggtcgacgtaaaaccgctctgactggggaggtcccattcggcctcaccgatgcgtttgcgcaagatgcgcagaaacaggcgcagtggcaggccttcctgaaaaagaaccgcctggaagcgctggcgctgaatgacgtcattgctgcactggtcgcgttcatgcttcccgtcatcaaggcggccaatgccagcgcggtgttttcagcccgctggcaggcaggtggtccgtggtcgcctgcagacgcgggttga

SEQ ID NO: 502298 - DNA, 600 bp, Stenotrophomonas maltophilia
atggaaacttcgcatcagaccattctggatctcgccgcccagcgcggcctgatacgccggcgcgatctcgatgcgctgggtctgcccagtgtcgctctcacgcggctggttcggcagggcctgctcacccgcgtgggtcgcggtctgtatgcccgccccgatcgcagcgtatccgagcatggcacgctggccgaggtggcacgcaaacacccgcaagccatcgtctgcctgctgtcggcactgcgcgtgcacgacctcaccacgcagtcgccattcgaggtctggctcgccattcccaacaaggctcgttcgcccaagatggattacccgccgctgcgcatcgtgcgcttttctggccccgcgctgaccgatgggattgaagaacaccagatcgatggcgtgaccgtgcgcgtgaccaacattgctcgcaccgtggccgactgcttcaagttccgcaacaagatcggcctcgatgtggcgatggaagcgctgcaggaagcctggcgtgccaagcgcgtgagcatggacgaactctggcgctatgccacgctgtgccgcgtggccaatgtgatgcgcccctacatggaaagcctgtcatga

SEQ ID NO: 502299 - DNA, 1191 bp, Stenotrophomonas maltophilia
atgattaggtcattgaaattcaagaacttccagagcttcctagaggaaaccgaggttctctttgaattgccgaagggtgccccttccagaggctacgagcgccgcgccaccgatggcacccgcctaacgaccgtgctggcagcattcggcgctaacgcgtccggcaagacagcattcctcaagccagcggccttcctactctggttcatgaagggttcgtttggccttgacgttgacgaggacattcctcttccaccacgcatactgaatccgaatgaaccgtcggagttcgaaatagtgttcgactccgagggtgaaacctggaagtacgaacttaagctgacagaaaagcgcgtgctgtgggaggccctgtacaagaaggcgacgcggttcagctacctcttcaagcgggaatggaacgagcaaaacgacgcctatgatgtgcagctcaagtcattcgatctcccgctgcacgtagcaaggaaggcaaggcggaatgcatcgttggtctccacagcccgacagcatgacagcgattctaccgagttcattgatggctacatgggtcaatggaatgtcgacattgatggtcggccgcactacttgagcaacttaaaatacgccaaccaggcgttcctaaagcttgatggagtgcgcgaccaagctatcagtctgttgaggtcctgggatcttggccttgatagcttcgaggttagggaggaggactctgtggacgcagccggcaagaaaaaaacgaaactgcgcgcctacttccagcatacgagggagaacggagagcacttcacgctgccctacgaggtggagtccaatggtacccagtccgcctacgtacttctcgcgatgctgttacccgtcctgcacactggcggctttgctgtcatcgacgaaatggaaagtgatctccatccgcatttgctggagtctttgctttcactattcgacgcggaacagaccaatcctgctggagctcagttgttctttaccagtcacacaacgaaggtcctggactacatcagcaaggcgcagacctacttcgtagaaaagcgcgactgcgtcagcaccgcgttccgcggtgaccaggtgcagggcttgagaagcgacgataaccttcgggcgaagtatgagtcgggcgcgattggagcccttccggaggttcggagcgatgtctag

SEQ ID NO: 502300 - DNA, 774 bp, Stenotrophomonas maltophilia
atgggtgagcagcgcaatgacctcagtcctggctccatcgaaaaggaagcgatcctacggacgctcccctgttcctgctcggagatcgaacttggagaaatcgcaaggttctgccccagaaaacgatcgaacatccgcggccgttgccatgcaataggcagagaacttctcgatgtactccttgagatttctaacctgttccatcgagcccgcaaacacttttatctctgcgggcacatgattggagcgagtgagcgtcttcacctgcgaaagcaacaacttgcagtttgcgctcaatgtgcggctgtatccaatcaagattgcgagatcatttccaatattttccggcaagtagtgcagcctatcctccgacttttcggcaccaggcaaaagcgattgctcccccagccggaatgtacgctccaagaaggcaagatcaccctcaccctttgggtcacctcgctccaaagcccggatgcagtgctgatgcaggatgtacagctgcgccggcaattcagagacctcgtgaaccagtactcgagcgacgattcgagcgtttccgtccctcgcccccacgatttccatgtgctgctgcttcgcgattcttgtcgcctcggcagcaatcgacgtggccttacgagacgtccgataggcgagtactgcaacgactgttgtggccagtaccgcaaagacaccaacccaaaccgatgcccatgccgcgaccatggacagcaaagccataaggacaccggcccagtcggccacattacctaa

SEQ ID NO: 502301 - DNA, 495 bp, Stenotrophomonas maltophilia
atgattgagaccgtctggggaatgacagacttggaactgcgcctgtttacagccatgggtcagttggctttggctgctgcggtcggctatgtagcgctccgacagtggcttaccgcacggcagcaggctgctactgctaagaagaagctgaaagccgacttatttgacaagcgcatgggagcactggcggaagtcgaggatgccgtcattgagatgctcagcgacaaggtgacccatgagcgagcccttaggatccaacgcggggcgcgaaagttcagatacctcttctcagaaccggcatatcaggaagccaacgccataggtcaagttactgctcagctcgcgatcatcgcgccccagcttctggaaggcacgatggatggagatcttcgccaatcattggtcattcggttccgccaactcaatgacgctttaggcaaggacctgctgaagctgcatgaaacctgcgctgcggagctgactctgcaggagtga

SEQ ID NO: 502302 - DNA, 432 bp, Stenotrophomonas maltophilia
atgacaggacaagggtttaccgtggcagggcatatggttgcagccgaagaggcgttgcgtctcgccgcagccatggcgaatatggaccttaactcacgtggtgcggtagtccgtggctgcgccgcttgggaatatgccttgcgactgagcgtcaatggtgcgaccacagtcgagcaaagggtcaaagtgtggcaggccaagagcgacggaaaagggtatcgcttcgctcgcagcgtgctggtcgatgccccggggatgaccgaccgtgacactggcgatggtcaggctgatctggttattgatgcccttgtggaatccgtgcgaaagacattggacccaatccagagcgcgctggatggaggagttccttacaaccctgcctggcttcaggacaacccctcctatcacctctcgcccagcgccgatggctaa

SEQ ID NO: 502303 - DNA, 285 bp, Stenotrophomonas maltophilia
atgcagaaccagcaggccggcacaaccccactggcggagccgcagaccccgatcgaagccgccgtgaatgacctgacgcgggttcagcaggatctgcacatcgctgcagagcagctggcgaggcgtcttgcgccagtgctggtggcgagcaaaccggacgcggcacagccgacgggccggcaactcggtgcctcgccgttgctcgaagaactcttccagcggcgggacgcagcggcggccaccctggacatcatcaacgagctgcacgctcagctgcacctgtga

SEQ ID NO: 502304 - DNA, 204 bp, Stenotrophomonas maltophilia
atggcagcgcgccgtccgcttgtcctcgatgagagcaaccgcaccagggagctgccccccggtgacatcttggtcggtgttccgctgcaagtggcggtcgggctccgggctggcggggtgttcaacatcgcgctgacctcgacgtacgcgatgacgatcggcctgcgggcgggcggcgtgttcaacgtgcaggcgaccacgtga

SEQ ID NO: 502305 - DNA, 1065 bp, Stenotrophomonas maltophilia
atggctacccgcactccattgatcctcaaccagagcaccgctcgcgtcgaagagctggccgctgccgatacgattcccggcacgatgatcgaagctttcgccggtaagaacgccatcatcaatggtggcttcggtatctggcagcgcggcaacacccgcacgctcaacgcgccgctggccacctacgtggctgaccggtggcagggcgtatgcggtggcccggccggcgcttccatggtcatgtcccagcagtcattcctgacatcgctcgacggcgcgctgaaatacgcccagtttcaggtgcagaatgcggtggccggtaccgatgccttcgcgtgccagctggtggagggcgtgcagacctacgccggtaaggtcaccacggtcaccctgtacgggtgggccaatgccaacaacactcttgtcggggtgcggattctgcaacgcttcggtaccggcggctccgccgacgtggaaacccagatcggcaccgtcacgctcaacaccacaccgggctatgtgacgatcacgttcgacgttccgaccatcgccggcaagatcctcggcacggccaacgcctgcgtgtatctgatcctcgatttctgcaaatccagcggctacggcaaccaactcgtggcaaagagcccgaccatcgccatgagcatggtcaagtgggagctgggcactgcatcgacgatctaccgacaccctgaccccgatgcagagctcaggctgtgccagaagttctacgaaaagagctaccagaccggcgacgtgccgggcacggtgaccaacctcggccgcaaggccgttggcttccagagcttgtctaacaccacgcacttggtcagctgcgaattcaaggtgcgcaagcgctctacgcctgcggtaaccctgtacccgtccagtgccggcgctgccggcggcgtgacggtcgatgatggatcgcgcgtgtccgcgtccctgcagaacgtgagtgaaaacgcgttcgaagcgctgtggaaccctggatctggtcgctggggtggtttcttccactgggtagcagactcggagatcttctga

SEQ ID NO: 502306 - DNA, 474 bp, Stenotrophomonas maltophilia
atgtaccggcttacttccaatctcgacatggttgtcagcaccgagaccggtaccgccatcccgcgcggccactggatgtgggtgcagtacgagcagtggtgcgccgccggcaacgctccggacccggtcccgccgccctacgaacccaacacgccggcccaccaccgcgcgatccgcgatgccgcatgggcgtggatgactggcgtggtcaacgagcgccaatacgacaacatcgagagttgcgtgggctactacaacagcggcgtggagcggtatcggttggaggcccgggcaatggtggcctggcgcgacgcagtgaacgagaagctggttgccctggtgcttgatccaccgccaggcgtagtgacatgggagcaggttcgacctttgctgcctcaaccgacccagttcaactggccgtccagcttggagctcccgctcggagtgggtgacggccccgcagtccaactttga

SEQ ID NO: 502307 - DNA, 711 bp, Stenotrophomonas maltophilia
atgaagcttattaataaccacctcagcgcctgcgcctgcgcatttgccattgccattatttcatcgagttgctcaccaactgacagaagcactgattcatcgcaacaggcttcgaatacaccccaacaaagcgagagctcggaacataccctaaaagagtccggccgctctaccgctgtcgacgcaccacctaccgaaggcacccctaatctcgaataccgttgctccggcgccgcatgtgaacttgaggcattgagtgcaaaaaaccccgaagaggccgaatggctgcgcaaaaatggctatccatcagaggaacaactcaagcagttcaaggcagcgtccgatgcgcagttgaaacgccaagcagacgctgggagcttaccagccatggttgtgtatggagaaaggatgaccgccgcaggagataccaaaaccgggatagcttacatccatggttcaatcaatcgcgggagtgtctatggctactatggaatgtccgaggtttaccagaaaacccctggacttaagaacatagttgattcagccgcataccttcgagttgcttatctccttggagattcaaaagcgtccgtagaaatgcagcgccgcttccccgacctcacaccggtggagcaagtcgctatcgatcaacgagcaatgacgctttatcgctcctttgcttctggtgcgcagccagatccacgcccttga

SEQ ID NO: 502308 - DNA, 378 bp, Stenotrophomonas maltophilia
atgatggctgagggaacctacacgatgaatgaaatcaacgagatggtgtttacgtacttctcgctagcctgcaagtatcagacggaagcttccaatgcgtatcgaataggactaggccttaccgtccccgaaagaaactgccttgacgcgatgggcaagcttcaagccgaagccgcacagacgatgtcctttaccgggttctttttaaattggctaaacaaagagggaatcagcatatctgacttcttccctcagacagttgtaaatttacttagcccggcaaattcaacaactgtgaaatacaacctgatcaccaaggatgcgacctgctcgcgctggtggcagcaaatcgaacagaatcaatgcaaggcaccttaa

SEQ ID NO: 502309 - DNA, 615 bp, Stenotrophomonas maltophilia
gtgtccctgtaccgctgcgtgcgccatcacctggacgaattcgtgcgcatgttccgctggtcattggtgtcgcggcagatgttcgaatgggcacagatggagcggccggagaccttgaccgacattcagcgcgcagcgcgcttctactacctgcagaagctcgccttcggcggcaaagtgcaggggcagtcgttcggtgtggtgactgccggcggtccacggttgaaccttctgcgcatcgaggaggagctgagcgccgtgcatctccgcctggcgaacacggtgatcgagtgcctgccatggcaggagtgcgtgcggcgctacgatcgcccggggacactgttctacctggaccctccgtactgggagacggagggttatggcgttgagttcccgtttgctgagtacgaggcgatggccgagctgatgcgcacctcggccggccgcttcgtggtctcgatcaacgaccatcctgagatccgcgaggtcttcgctggcttcgacctggtgccgctgcagctcgactacaccatcggcggcgggcaggggagagggaagaagttcggagagttgatcatcaagagctgggacgacagccaggccaccctgctgtag

SEQ ID NO: 502310 - DNA, 429 bp, Stenotrophomonas maltophilia
atgcccaacagggccgttgttttcgtcagtgaggccgcaccgcacctcaatgcggagcatttggcctcgatcatggcggatgctgctcgtttcaacagaaacgcgggtgtcagcggcgtcacgctgtacgacggtaggcgatttctggcgtacatggaggggccgccggatggtctcgatgttgcgttctctagagctgcaggcgcctcaagccatgccgagttgatcgaactggccagggggagggttgggcagcgcaggcttccatattggccgatgcgttgcattcccctgtcggcgccggagctggtgctgctggtgcgggccgactggacttccttcctgcagcggggaggcgatcaagctgggccggccaccgcgatggagatgctcgttgcactggtcgaaccattcgccgaagttgcgtaa

SEQ ID NO: 502311 - DNA, 504 bp, Stenotrophomonas maltophilia
atgcttccctcccacggctaccaaggcttccgcaccgccccgatccccactggctgggtccagctgggcgatacctgggtgctgtggtggagtggtcgacagatcgccaacatcagatgcggcaaggatggcgctgtgcgcgtgcgtctggatgcccggaagatgtggcagatcaaggaagttccggccgccagcatcgcccagggcaagcgctacgccgagcgatggtgcgcggccaggctctacccagagttgcgcctgcgcgcggctgtggcccggctactggacaccacgccagccgaaccgctcgaaccgcttcccggcctgccgccaacccgcgagcagcaggatcaagcccggcgcctggccgaggcgacggccaccgccacggcgagggtcagggaagcgttggagccggccaggccgccggcaaccaagccccgaccaagggacgcccgcaaggcttgggtgagggcagggctccgcgatctacgtggttggtga

SEQ ID NO: 502312 - DNA, 297 bp, Stenotrophomonas maltophilia
atggctgatttcaatcgactgcgcctggcgctgctgttgccgttcgcactggtggcgctgaccgcgtgtgaggctgggagtgaggctgccggacatgatgccgctgcgcagagtgctcccgcggctcaggctggtcaggcgacgccgatgcagacgaccgcgccgatggagggggcggagccgtccggggcggtgcagatgcgccggaccggtgacggtggtgttgagatccgcaagatggacgcggcggacgggcagggcgctggcgcggcgccggccgaaccccaccagccgtga

SEQ ID NO: 502313 - DNA, 1518 bp, Stenotrophomonas maltophilia
atggccttggtttcgatgttccccgtacgttcccgcacacatcagcgctggacgctgctcgcggtttgcctggccgcgctggcgttgccgttgtccttctcggccggggcggtcgtggtgcccgcgctggccctttctgcggcggcgtcgccgaccgcgctggcgtgggtgaccaacgccttcatgctcaccttcggcagcctgctgctcgctgccggtggcctggccgaccgctatggccgacggcggttgttcctgctgggcacagcaggtttcaccatcgccacggccgttgtctgccttgcgccgacgctgctgtggctggatctggcgcgcgggttgcagggtgttgccgctgcagcggcattggcatccggtacggcggcgctggcgcatgcctgtcaggggccggtgcgtgcccgcgtgttcgccctgctcggcaccacgttcggagcggggttggcgctggggccgctgctcgccggtctgctgctgcaggcattgggatggcgcagcgtgttcgcggcgggcggtgtactgacgttggcggcattcgcgctgggcgcgcgcgtgttgcccgaaagccagggcgagcgcgggcggctggatgtcggcggaatgctgggcttcagcctgatgctggcggcgttgaccctggtcctgctgtggctgggggaattcggcctgcatgccgtgcgcgtgcagctggcgctgctggcggcgctgctgctgggcgcggtgttcgtctgcaccgaacggctgcagcgctcaccgttgctggacctctcgttgttctcgcaaccggcgttcctgggtgtccagctgctgccggtcgcaacctgcttcggctacgtggtgctgctggtggtgctgcccctgcagctgctgggcgtgcacggacagagcgcgaccctggtggggctgcagatgctggccctgtccgcgccgatgctggtgctgccgatgctggccgcacgctgggccgagcgcgttggaagtgcgcggctgtgtgcgctgggcctgctggtctgtgcctctggcctgtacctgttgtcgcgccacgcatcgcatccgtcgccctcgcagtgggtgccattgctgatgctgatcggtgcgggcacggccttgccgtggggcttgatggatgggctgtcggtgagcgtggtgccggtgcagcgcgcgggcatggctgccggcatcttcggaacggtgcgggtggccggtgagggcatcgcattggccgcagtcactgccgtgcttgcgctgctgatcggccaccagctgcagggagcatcaccggcatcgttggcgcgtgccggtgcctatctggcgacgggggcgcatgcacaggcgcaggcactgcttccggcgatgagcggcgcacagctgcagcaggccagtgccgaagcgctggcgatactgctgcgtgccctggcgctgctgaccgccgcatgcgctgtgctgttgcacctgctgctgcgacggccagcgttgactgtgatcagaaccggtagctga

SEQ ID NO: 502314 - DNA, 1386 bp, Stenotrophomonas maltophilia
atgtcttcgacgcgcaaccctgaccattggcgttcctccagcagccgcctgctgggcctgtactgcatcctgttcgtggcatggtcgagcctgctgctgggcgtgatgtactggcgcatctcggattacctgagtgacctgaccgagtcgggtctgcagcagcgcgttcatctgttcttgagcttcgacggtccggccctggaccacgcgctgcgtgacagccagcgcttcgatctgcaccaggcctttacctacggattgttcagcagcgacggcacgccgatagcgggaccgctgaccgccatccccgagggactaccgctggatggcagctcgcatccggtggaccgctggacattggtcaatggcccgaatgagaacggtggcagcgcgctcggcgtggtcacccgggatggccgtacgttggtgttcgtgcgccagaacggcaagctcatggcggtcaacggcatcattctcgatgcactgctttggggcgtgtcgctcaccatcattcctggcctggtgggctggcatctgctgcgccggcgcccgttgcaacgcatccagcagatcgaatcagccaccaaccgcatcgttggcggcgacctcggccagcgcctgccggtctccagccgccgcgacgagatcgaccggctgtcgagcatcgtcaatgccatgctggagcgcatcgaacagctgatgactgaggtcaaaggcgtgtgcgacagcattgcccacgatctgcgtacgcccctgacccgcctgcgtgcccacctgtatcggatacgcgcgggcctggacgaacagaacccgcatgccgatccactggacaaggcgcttgccgagaccgacatgctgatggcgcgcttcaccgcgctgcttcgggtatccgagctggagagccaccagcgacgttcggccttcgacaccgtcgacatcaccgaactgctgcaggaactgcaccagttctatctgccgctggccgaggaaaagcagcagttgctggagctgcaggtgggcccgaaggtgggcccgctgcgtggcgaccgcgagctgctgttcgaagcattggccaacctgctgtccaacgccctgcagttcacgccggcacagggccgcatcctgctgcgcgcggtggatgaccatggcgtccccaggatcgatgtgatcgacaatgggccgggcattccgccacaggaccgcacgctgatctaccagcgcttcttccgcggcagcagcagcgccggacagggaccgggattcggcctgggtctgtcgatcgtggccgctatcgtcggcctgcatggcttccgtgtccgcgccagcagcgctcccggtggcggcgcctggatgagcatccgcggcgcgccggatgacccgccctga

SEQ ID NO: 502315 - DNA, 684 bp, Stenotrophomonas maltophilia
atgccgcgcgtactcaccatcgaggacgatcctgtcaccgcagcggaaatcgccaccgaactgcgcagccatggcttcgacgtggacgttgccagcgacggcagcgacggcctggcactggcacgtgcaggcgattacgctgtgatcaccctggaccgcatgctgcccggcatcgacgggctggccctggtcaccaccctgcgccgtgaaggcatcaccacaccggtgttgatgatcagtgcgttgtctgacgtggatgagcgcgtacgcgggctgcgcgctggcggcgatgactacctgaccaagcccttcgcctccgatgagatggccgcacgcgtggaagtgctgatccgccgccggggtcaggccaccgccattgacagcgtactgcgcgccggcgacctggaattggacctgatgacccgttcggcacgacgcggtggccaggatatccccctgctgcccaccgagttcaagctgctcgaattcctggtccgcaacgccggccaggtggttacccgcagcatgctgttccaggaagtctggggctatcacttcgatccgggcaccaacctgatcgacgtgcatatcgcccgcgtgcgcaaacgcatcgaacaacccggccggccgcagccgatcatgaccgtacgtggaaccggctatgtcttcgacgcgcaaccctga

SEQ ID NO: 502316 - DNA, 1179 bp, Stenotrophomonas maltophilia
atgatcctaccgaacccctgccttccttgccgtgcctggtggttgccgcgagccgcgggcctgccgctgctggcgcttgccctggtcgggctgctcagcgcctgcggcagggaggctcccaaaccggctgccatggcaccggaggtaaccgtactgaccctgcgcagccagtcgctggcactacagcaggaactgcctgggcgaagtgttgcctcgcaggaatcggatgtgcgtccgcaggtggatggcgtgctggtgaagcgtctgttcgagcagggccagtgggtgaaggtcgggcaaccgctgttccagatcgagccggcgctgtatcaggcggcgctgaacgaggcgcaggccaacctgaagacggccgaggcctctgcggtgaccgcgcgcctgcgggcgcagcgcatgcaggtgctgggcaaggaccagctggtcgcgcgccaggacgtggacgatgcgatcgccggcaatcagcaagccgccgccgctgcgaaggctgcacaggcggcacgtgatacagccagcacacggctgggatttgccacggtgacctcgccgattgccgggcgcattggtcgcgcgctgttcacgccgggggcgctggtcacctccggccaggccgaaccgctggcacgggtccagcagatggacccgatgaacgtggacatcacccagtccagcaatgagtatctggcactgcgccgcgccatcgccgaaggtggcgtgcagtccgacagtgcgccggtgcgcctgcgcctgtccgatggtaccgactacccgttaccggggacgctggaattcgccgacgtcgacgtccagcaggagaccggcagcatcaccctgcgggcgcgtttccccaacccggacgggcagctgctgccgggcatgtacgtgcgcgcattggtggggcagggaatccgccagcaggcgctgctggtgccacaggccgcggtcgatcgcagccccaagggcgaggcgcaggtgtggctggtggacaaggaaggaaaggcgcggttgcgcctgttccgcaccgcgcgtgcggtgggtgatcagtggttggtgctcgatggcctggctgccggtgagcaggtggtggtagccggcgcgcagggcctggccgatggcatgacggtacgggtgaagcctgtaccggcaccggccgggaaggactga

SEQ ID NO: 502317 - DNA, 3102 bp, Stenotrophomonas maltophilia
atgctgccgcgcttcttcatccatcgcccggtattcgcctgggtcctggcgatctgcatcatggccttcggcaccatcgcggtgacccagctgccggtggagcagtatccggacatcgcaccaccacaggtcaacatcaccgcgaattacaccggtgcctcggcgcagacggtggaagacagcgtcacccaggtgatcgaacagcagatcaaaggcatcgatcacctgttgtatttctcgtcgaccagttcgtcatcggggcaggcgcgcatcacggtcaccttcgaccagagcgccaaccccgatatcgcccaggtgcaggtgcagaacagcgtcaaccaggccatcaaccggctgccgcaggaagtgcagcagcagggcgtgacggtcgcaaaatcccagggcgattcgctgatggtggtctcgctgtacgacaccagccggcgcatggaacgcgtggacgtcgccgacttcctggtcagcaatgtgcaggatccaatcagccgtattcccggtgtcggcgagatcaacctgtttggctcggcctacgcgatgcggatctggctggacccgcacaagctgcgtgcctacgacctgatgccgtcggacgtgcgcactgcgatccaggcgcagaatacgcaggtgacagccggcgagctgggcgcaatgccgtccagcccgacgcagagcctcaacgccacggtgaccgcgcagtcacgcctgcagacccccgaacagttccgcgcgatcatcctgcgcaccctgcccaatggcgcggcggtgttgctgggcgacgtcgcgcggatcgagatcggtgcagagaactaccagaccagcagctatctcaacggctatcctgcggccggcttctcggtaaccctggcctccggtgccaacgccttggccaccgccgacgcggtgcgcgcggagatcgaacggctgcggccgatcttcccgccggggctggaggtggcctacccccgtgatggcacaccgttcgtgcgggtctcgatcgaaggagtcatccggacgctgatcgaggccatcgtgctggtggtggtggtgatgttcctgttcctgcagaacctgcgtgccacgttgattccggcgatcacggtgccggtggtgctgttgggcaccttcggtgtgctcgcggtcgccggattcaccatcaatacgttgacgctgttcgcaatggtgttggcgattggtctgctggtcgacgatgcgattgtggtggtggagaacgtcgagcgcgtcatccacgacgagcatctgccgccacgcgaggccaccgaaaaatcgatgggcgaaatcactggcgcgctgatcggcatcaccgtggtgctgggcgcggtgttcctgccgatggccctgttcggtggttccaccggcatcatctaccgacagttttcgatcaccatcgcctcgtccatggcgctgtcggcactggttgcattgaccctgacgccggcattgtgcgcaaccctcctcaagccgtcctccgcgaagaagccgcaaggtcgtttcttccaggcattcaaccggggtgttgatcgcagccagttggcctatcagaagagcctcggtggcgtcgtcgcccggccgcggcgttggatggccttctacctgctgctggtggtcgccatggttgcgctgtacgcgcgcatgccgaccggcttcctgccggtggaagatcagggccaggtaaatttcacgttttccacgccggaggggacgccgatggcgcgtaccgaagcgctgggcgagcagatcagccgctacttcatggagcacgagaagcagaacctggatgcggtgttcgtagtggtcggccgcaacaatgccggcaccggccagaacgccgggcagggtttcctcgcactgaaaccttgggatgtgcgcacgggcgacaacactgctgcggcgatcatcacgcgtgccaatgcctatttccgcagcctgcccgatgccaaggtcaatgtactggcaccgccggcggtgcgtggactgggtcagtccagtggctttgaactgtggttgcaggacaccagcgcggccgggcgcgtggccctgcaagcggcgcaggagcaggtggtgcgtgcggccggcatggacgatgggctcacctcggtgcgcttgaacggcctgggcgacaaggccgagctgcgcctggacatcgaccacgcgcaggccagcgcactgggccttgcacaggccgacatcaattccacgctgtcggcggcctggggtggcagttacatcaacgatttcctcgatcgtggccgggtcaagcgggtctacatgcagggcgaccagccctatcgcagcgtgcccgacgacatcggccagtggtatgtgcgtggtggcaacggccagatggcgtcgttcgccagtttcgccagcagccactggattcgcgggccacagctgcaacagcgattcaatggcctgccggcgatgcagatccagggcagcgccgccgaagggcgcagctcgggcgacgcgatgcagcgcatgcagacgctggttgccgatcaacccgggttcgacctgcagtggagcggcctgtcctaccaggaacagctggccagcaaccagacgctgtggctgtacatcgcctctattgctttcatcttcctgtgcctggcggcgctctatgaaagctggacggtgccggtagcggtggtgctggtgatccccctgggcgtgattggtacggtgctggcgaccaccgcggccgggttcgtcaacgacatctacttccaggtcggtctgttgacgaccatcggcctgtcggccaagaacgcgatcctgatcgtggagtttgccgaggcacgctatcgcgccggcagttcagcggtggaagcagccctgcagggcgcacgcctgcgcctgcgcccgatcgtgatgacgtcgttggccttcgtggctggtgtgatcccgttggcgttggccaccggtgcgggcgcagtcagccgacgtgaaatcggcgtgagcgtgatcggcggcatggtctctggcaccgtgctggcggtggtgctggtgccactgttcttcgtgctggtacgtggcctgggtcggtcacggccgcaggactga

SEQ ID NO: 502318 - DNA, 1422 bp, Stenotrophomonas maltophilia
atgctgctgtcttcgccgcccgttgacaagcgcggcccgcatctaccccctatgacgccaacgctttcacccgccaataccggcctgccaccggatacttcgatcctgtccgcgcgctaccgcgccaccaccctcggcatggtcgcgctggtcgcactgcatgccttcgaggcattggccgtcgcagccgcgatgccgagcgtagccgaggcactcgacggcctgcgcctgtatgcgctcgctttcggcggcaccctggccaccagcgtgatcggcatgaccctggccggtcgctgggccgatcgccacggcccggcccggccactctggtacgggctggcctgcttcgtgctcggcctgctgctggccggcctggccacgcgcatgggcctgctggtggccgggcgcctgatgcagggcctgggcgcgggcgcgatctcggtctcgctgtacgtgatggtcggccgcagctacccggagcacctgcaaccgaaggtgttcgcggcattctcagcaggctgggtgctgccgtcgctggtcggcccggcgctgagcgggctgatcgtgcagcatctgggctggcgctgggtcttcctggcggtaccgctgctggcgattcccgcggcactgctgctgcgcccggcactggcccgcatccaggccaccggtggcgcgggcaacgacgctgggcgcggcaacgtggtgcgctgggccagtggcgcgtcgctggcggcgttgctgctctacgtcggaggacagcagcagggcctggccgccctgctctgcatcggcgtagcgatgctggcgctgctgttctgcgtgcatcggttgctgccggccggaacgttgaccctgcgccgcgggctgcccagcgtgatcgcgctgcgtggcattgcggcggcagcgttcttcgcctgcgaggcctatctgcccctgctgctgcagcgcgagcgcgggctctctccgagttgggccggtgcggtgctcagcctgggcgccctgggctggttcgctggctcatggctgcagggtcaccagcagcgcggctggtcacgccaacagctgctgcgcgctggcacggcgatgatgaccgtgggcattgccgcaacactggcggtactgttcagcgcggtgccgctgccggtgtcgctggtcggctgggcgatgacgggcttcggcatgggcatgatctacgccagcctgtcagtgctgaccctgtcgctgtcggcgccgcatgagcagggcgccaacacctctgcgctgcagctgagcgaggccctgtcggtggccaccgcgctggcggcctccggtgcactgttcgccctgttcgtggacagcgcgccacacaccggttacctgctgtgcctggccatcaccctcggcctggcggtgatggccgcagtgatcgcgcggcgggtgtag

SEQ ID NO: 502319 - DNA, 678 bp, Stenotrophomonas maltophilia
atgcgtgtgactacgagcgtgatactggccatcgccgtgctgctgcaggccggttgtgcccgtacccccgaaccggcagccgcggccgagggctgcgacgatccgcaggcgcatgcctggtatctgctgccaccgcctgcacagcggcgtagcaggggctcgcttccgttcctcgatttcaccgggtttgcgaaggcatcctacagagacgcgttgcgggatctcgatggcttgccggagccgtcgttccgctgtggcagcgtgccggtccaggcgtatcgcttcgtctggcataccccattcttccgtggcgtggtagtacgcgcgcagcgcaatgcagcgggccacgcgtggatcgtcgggcgcagtgcgcgcgatttcgagattcctggatcgttgcccggaagcccatccaccgtcatcaagggtggcacgtgcgctccaccgcgcgcgctgagtgcgcaggaatggaacgccatcgccgccgcgtttgcgctgttgcagggcgaagattcgagcgctgggcttgacggctcatcgtggatgttcgagtccgtggtggacggcgagcagcgttggttcgcacgatgggcgccgcgggatccggcgttccgcaacaccggcaggatgatggtggaactggcgggttgcactgacaccctgcagggcatggagtga

SEQ ID NO: 502320 - DNA, 915 bp, Stenotrophomonas maltophilia
atgaacgggatcgggattgatgtcagcaagcgccaactggatgttggcacgacggacggagagatcctgcaggtcagcaatagcgcttcgggttttgctgaattggatctctggttgaggaaacatccggcgcgccagatcgtgctggaggctaccggtggctacgaacagtcagtactgaacttcctgcacaacgccggtcatccggtggtccgtgccaacgcgctgcgggcccgcaggctggcccaggggttgggtcagctggccaagaccgaccggttggatgcctatgcattggcgcagatggcggccctggtcaaactacccgcctaccaaccgctggagccttggcagcagaaaatgcgggaattcgtacgggcacgtcgacagacgatggaagccctgaccatcgcgcgacagcagcaggagatggtgaccgatcgcgagttgcgccgactactgcaagccaacatcagtcgcctgcaggggatagttgggcgcctgggaaagcagattgccgagcaggttgcccagcagcctcaactggctgtcctgaagtcgatgaagggcgttggcccgggcttgcaggcggtactggccagctatctgccagagcttggcaggatcagcggcaagcgcatcgccagcttggtcggggtggccccgatgtcccacgacagcggaaccatgcgtggcaaacgaagcatccatggcggcagggccgagatccgtcaggtgctttacatggccagtatgtcggccatgcggcatgaacctcgactgcgcgatttctaccagtcgctgcgagcccgaggcaaggaaggaaaagtagccatcgtggcggcaatgcggaagatgctggtgattctcaacgcccgggtgcgcgacgcccaaggcggatcgatccccgcctga

SEQ ID NO: 502321 - DNA, 774 bp, Stenotrophomonas maltophilia
atgtttgggagtgggatcgatgtcagtggtgagaatctggatgtggccgtccatgaacaggccttccgtcagttcaagaacaacaagcggggctggtccagcctgatcaaatggttgcagcagtggccagccaagcaggttgtgctggaggccagcggcggctacgaacagaaggcgctggatgcattgcacgaagccggcctgccgatggtgcgggacaaccccggccgcggccgcagctttgcctcggccatcggaaagcttgccaagaccgaccgcatggatgccatggttctggcacacatggccgacgctctcaagctgacccgttacgtgccacctgccgattggcagcgccgtctgggggagctctgccagcggcggcgccacctggtccagatgcgggtgagcgagcatcagcgcatgcgcgcgttcagcgaaccctgcctgatttccatgctgaatcagcacctgtgcgagatccagaaaagcatcaggcaactcgacgccaccatcgcagcactcctggccgaacagcagggatggcgtgactttgccaagctcaaaggcgccggcccagtactgatggcgaccttggcctgtgagctaccggagctgggcaagctgagcgggaaagccatctcggccttggtaggggttgccccccatgaaccgcgaaagcggaacctggaaagggcgacgatgcatcaccggaggccgcgccgttgtacgcgaagcactctacatggcggcgctgaccgccaaacgctatga

SEQ ID NO: 502322 - DNA, 171 bp, Stenotrophomonas maltophilia
atggcggcgctgaccgccaaacgctatgagcccaggctcaaggaattctttgaatccctcgtcaaccagggcaagccgggcaaggtggctttggtcgcggtaatgcgcaagatgctggtgatcctcaacgcccgcaaacgggatgcggaggcccagatggcctccgcctga

SEQ ID NO: 502323 - DNA, 426 bp, Stenotrophomonas maltophilia
atgtccatcgaaaaggttctgtacaccgcccaggccacctccaccggcggccgcgaaggccgttccgtctcctccgacaacgtgctggacatccagctgtcgaccccgcgcgagctgggcggcgccggtggcccgggcaccaacccggaacagctgttcgccgctggctactcggcctgcttcctgggtgcgctgaagttcgtggccggccaggccaaggtcgcgctgccggccgacaccaccgtcaccggcaaggtcggcatcggccagatcccgaccggcttcggcatcgaggccgagctgaccatcaacgtgccgggcgtgccgcgcgagcaggtggaagaactggtgcagaaggcgcacatcgtgtgcccgtactccaacgccacccgcggcaacatcgacgtgacgctgatcgtggcctga

SEQ ID NO: 502324 - DNA, 1863 bp, Stenotrophomonas maltophilia
atgcgtgatctggcttcgacgtaccgacgggcgcataacacgatgcgcaacctagacggactgcagccacaagaggcgttcgaggaactactgaaattcttgttcttaaagcagatgtcggaggaggacgggatcgcgccgactactggatccgctattcgcaagcgatttgcctttcatttgagcaggcacagctcttggtcgactagcctttggagagatcgcgactttcatctctctgatcagtgcttggagcagttgaatgcactgttctccggcataaatttcacccagattgactatgacattagaagtgcggcacttcgagagtttctgacgcccgaggttcgtaagggactgggaatattcctgacgccggatgaagttgtcagagaagtggtgtcttttgttgacccgccctcatcagcaaagtgtcttgaccctgcttgcggaagcggcacttttctgattgaagtgataaagaagtggcgaaaagagaacgcaccaaagatcagtgtatggggggcagacaaaaatccgagaatgctgcttatcggcgagttgaatttgggtcatttccccggtctcacgttcaatcgcgcgctcatggactcgcttgttgagccagggaaaaagcactccaagccgtggtgtcgatatggctactttgattttattctgacgaatcctcctttcggggtgaccgttgaagcgtccggcgccgcctacagcggttatgacactgcttttacggcaaatggcgagcctcgagctcgtcaatccagtgagtggcttttcgtcgagcaatcacttcgatggctaaagccaggaggaaccttggcggtcgttcttccaagaagcgttttgacaaatccgtcgtctgcctatgagcgatctttgcttgcgcaattgggctacctgaaggctgtaattcagttgccgccagagacatttcttgtgacaggagctcagacaaatacggttgttgccttcattgaaaaatacgcatccgataaggatcgcgagaagaaggtcggagtggttcaggctacgctttccaatgtggggtacgactcaacgggtcgacctcggcagggaagtcagctcgatggtctggccaagcacatgcgcgaccctaaagggtcgccgtgtgactatgtatcggtgctcgcaccgcaaaaggcagatagaacatttgaagccctgagtgctaagagtgcatccaagcgccgctcgaacttgggagtgccgttaggtgatttggcgtccgaaataagaaccggaaggacgccgcctcgtgctgcatattcagaaaatgggggattgttcctcatcaaagtcggaaatctgacgggctctggaatcaactggatagcgcgtgatcggaacttcatcgatacgtctacgatgacaagtcgtaagcttggtggtattcagctcgtgaagaatggtgacatcgtgctgacttcgtcggcgcactctcccgtctacatagctaagaaggtagacatcattaccaaagttccggaatgggtgggtgggagagcatcctttgtgggtgaagtcatgcttgtgcgtcccaagcaggagcgcatagcgcccatgcttctgctcgcatacttgcgccagccaactgttgcgtctcagattcaggagatggttcgtggtcagactgcgcatcttcatgctgacgacctggcagccttaatggttccaacgtcggtactggacgcgtccgatgattggcgcgaggttcaagagctcctcgttgaagaggtggctctgaatgatcgcttgaacgaaattgctcgcttgcagcaatctattgctaacaagttgagtgatggcctcagagcaggttag

SEQ ID NO: 502325 - DNA, 849 bp, Stenotrophomonas maltophilia
atgggctacatcggacagcacctcgtcagcgtcgtaactggctatcctggcggacgctcaggagctcgcggaaaagacctcgtgctgccgaacgatgagttcgccgagatcaaaacatgctatcgagtcgatcagcttggcaagtgcaatgattgtggctcgggggtatcggccctcgaacttgaatgccctagttgcgcctcagcaaacatcaagcgcaacgatgattccaaatggctgataggaatccaacacgacgctgagtttgcggaagtactgaagcctaagcactattaccttgtactttttgactttactgatctccgcaggccggacacgatccgagcgtccatatggcgagtagattccttgtcgccgggatttgcttattgcctcatcgattactacaaaaacattaagtccgcctcaaagagtggcgcccccttcaacctgtggccattccagctcaagtttgagctaatgcgccctcttctcatctatcagtcatttattctccccgacaacacaatacagactcgggttttccctggccaccaaccggcagaacattaccccctctctccgctaacgaccttctcccgctctcagaatttgactgctgacaaggtacgtgagttcgccgcccggctggaggtggagctaccaaccaatgcaagtaaggcggtcttgctgaagacagctcaagatgccataaccgcaaggaagctcgactccgacgtagtagtggatgcgcttgcgcgcaccctctatgcgacggagattgccccgcatttagctggactgccagcttcgatgcgccagcagatggcgggagctaacctgctctga

SEQ ID NO: 502326 - DNA, 300 bp, Stenotrophomonas maltophilia
gtgactacccccgaacccaagaagctcaaccccgaagagctggccgaactgcacgcgcttcccgacgaggcgatggtcaagcctgaggaggccgccgcgctcctgcgactgaagcgcgccacgttggcgtggtaccgctgccacggcggtggcccgaagtacgtccgcgtcgggccgaagctgatccgctaccgcatgggcgacctgcgcgactactcgaagggccagccgatgagcgagggcgtccgcaaggtcgccgccgcgatgctggccgcccgcaccgccagcgcggagggctga

SEQ ID NO: 502327 - DNA, 2040 bp, Stenotrophomonas maltophilia
atggccgcacaagagaacgcccacggcgtgctagaccgtgggcgcaaggttacaaccgaccgggagacggagcctgccagagctcacgggatcaatgatgccgcggggcacgccgccgcaacgccatcatttgaggccgcgtccgagtaccgccgcgcccggctcgacctgatccccctacgtcgtcgcgacaaggtgcccgccgacaagcgctggcaggaacgcaactacgacaggggcgaggtgctggggcgcgcgaggcgcgacggcctgaacctgggcgtgcgcctgcccgccgacgtggtcgtggtggacgtggacccgcgcaactttcccgaggggcgcgacagcctggcggagctggccgcagccttcgacctgccgctcgcgtcggcgccgcacgtcctcaccggcaacctgtcccaccccggccaccacttctactttcacaagcctgcgggcgtcatgctgttggagagcgtggacggcttcgagggtgtggagctgaagtcgctcggccgtcaggtggttgcggcgggttctgtgcatccgtctggtggcctgtatcgctgggcgcccgactcgccgccgctgggcgatatgccggacctgcccgcaaggctggtcgagaaggcgcgcaggccggatcgccccaagaagcaggcgaccggcgccggtgagctgacgcctgaacaactggccgagaccctggagcaactcgacccgtgcgacttcggccgcggcagcgaccacaagcgctgggagaacctgatgatggcctgtcacttcgccaccgacggcgaaggacgacaggagttcatcgactggtgcatgggcgacggtcactaccgcggcgaagagtggaaagtcggtcgccgctgggactcgctgcacgctgacagggatgaggccgtcaccacggcgaccctgcaaatgttcctgcaggaggtgggtggcggcatcgcgccgcccgacgcggccgacgacttcgacgtgtgggacgaggtcgaacccgcagaggagcgcagccgctggaacttcctttcgctggacgacgtggagtcgctgccgccgccgaagtggctggtgcctggcgtgctgactgagggcagcctcgccgccatctacggcgcgccagagtcgggcaagtcgttcctcgcggtggacgtgtcgatggccatcgcgggcggcatcgactggcacgggcggcaggtcgagcgcggaggcgtgctttacatcgccgcggagggcgcgcccggcctgggcaagcgcttccgcgcctggaaggcggacaggtgcgcccagggtcgcgggttcgacctgcacctcatgcgcgacgacctgaacctcgcggccgagaaggacggcggcgtgcgcgcgttcgtccaggccgtgaccgacgagttgggaccgctgcgcctgatcgtcatcgacaccctgaaccagacggccgcaggcgccgacgagaactcggcgaaggacatgggccgctacatcgcgagcatgaagctgctgcgcaacgccacgggcgcggcggtggtcgtggtgcaccactcgggcaaggacctgagcaagggcatgcgcggcagcaccgcgctgctgggcgcgatggacacgactgtcgaggtggagcgcgccagcgacgggcgctcgatcagggtgacggtgaagaagcagaaggacgcggagcgcgagcccccgatgcgcttcaacatggagaaagtcggcgattccctggtgctgcgtcccaccgtgatggtcgatgcgcagggtgagttcggcggcgcgatggaccccatcctggagctggcacggcaggaggcgaacgagcgcggcggcagcatcccgctgaaggagctggccgcgatcgtctgcgagcgagacggcgtcgccgacaagacggcgaggcgcaagatcgaggccgccatccccgatgggcgcggcaacgccagggcgtcgatcgacggcttcatggtgtggctggagccgatggacgcgcgcaacccgaggctcggaatcctggtcaggacggaggggtga

SEQ ID NO: 502328 - DNA, 246 bp, Stenotrophomonas maltophilia
atgagtgagaagctgactgtcgccgaagcgctctaccgcgcccagcagatcgacgtgatgctgggcaccatccacgacacggcgcccgaggcggtcgcggcgatgggcgggcgcgacgccctggcccggcgcagcgagatgacgtgcctcggcccggtgccgcgcctggacgcggacgagtgggagcgcatgtcgctggagtacgaggcgcggcgcgagcatggcagcgtcaaccgggggcactaa

SEQ ID NO: 502329 - DNA, 444 bp, Stenotrophomonas maltophilia
atggcagcgtcaaccgggggcactaacgggcacgcggtcgccgtcgaggtggacggggtgcgatacccctccgtcaggtcggcggcccaggcgctcggcgtgggctacagcatggtcacggcccgcgcgcacgaccccaggcacccgaactaccgctggctcggcgcgacgcccggccggcgcgagatgacgcccgaggacaggcgcatcgccaggcccgtcaccgagcccgagcggtggccgaacgacggcggcgcgcgacgcgcccccgtgatggatccgaactacgacccgcccagggtcgtgcgccgggtcggctggctccgctgcatgtgctgcgggcggtctcacttctccgaggacgtggcccgcgcccgcatgtgcctggactgcggcggcgcgggcgggctgccgaccgggccgcgccccgattgggacgcctga

SEQ ID NO: 502330 - DNA, 222 bp, Stenotrophomonas maltophilia
atgaacgtcgatccccgcgtccgggtgcgacgtcgcgtcgaggaccgcatgacccagtatgccgggaagagcgtccgcgtcagcggtgaggcaaacgacctgatcggcaccatcagggaccacatggtcttccggcaggacgaggtggcgaggctggagttgcagttcctgctggaggagtgcctgagtgagctggacgagctcggaaaggcgcacgcctga

SEQ ID NO: 502331 - DNA, 513 bp, Stenotrophomonas maltophilia
atgagtaacaagcagaacatcgaaacgagtacccacgccgtcgaaggcatctacgagttcgctcgctaccagttgtttgcggtcgcgatcgatcttgcaccctcggaaaccggcggctccacagagcgcctcgtctcggcctggaagctgatgccgacgagtatcctcaatgaccgggaccatgacgacgacgagggctgggtactcctcgaggcggtgaagaaggacctcgacgaggcggccgccctgcgtgggttcggcgcggacgtactcgactgccacgcggagtacgactggtaccgttactacatcgatttggcggacgtctacggcgcagaggactggccgaccgccgcgctgactgactacctgcgcggattcgagggcatgcacgaactccacgcgcgcacgacggcggcccttgtgtgggagaaggcgaagcacctctacaacgcgcgaaagccgaaggatgcccaggtacccgtcgtgacggtcgaggaagaggcagcatga

SEQ ID NO: 502332 - DNA, 915 bp, Stenotrophomonas maltophilia
atgacgagcaagttcctgagagaacacgctgacgcgctctccaagtttgccaaggagtcggcagaccgtgctcaatcatctcccgaagacttctttctacggatagcggccaagaatcaggaagacgcagcgcgtgctgtgacgcaccaactgatgcttgaagctgccgaagaagcgggagaacttgttgatctaagacttttggggccgaaggcaaatggcagcatttccctcgattggttcattcgtgcaatggacccattgtcgaaggcgtggaaactcgccgcacatcgactccgctatggcagtgacgctgcgagaggtgcgggagccgatgttgtcagtgctctaaatctaaagctggccggaattggtcacgggtcaactcgcatattcgttactggcaatggcatgcccgatctgacgggcgaaagcctgctgcaggcgacgcttacccagatctttctcttgcttaacgcgagtcaagacgagttctatgatgctgtggacgcagtgggtggcaggtcagcgcaccagctcggtgagttcatgaaagagctggatcaaggaggcttcgctgcgcagttttcgtggcagtcccctcgtggtcggcagttctgggaaggacgccccgatgagatcgtccgcattcgcatgttgctagataccattcgcgaaccagatcggtatcaggagaccattactggaagggttgcaggcatcaccgatacgggaagattggagctgcgaactgatgatggaaaggtcgtagtccgctttccactgaagctcacggagcaggtgcaacgtttgaccatcacctcgttggccacaatccaggttcagaccgctcgctactgggattcagttcaaaaaaaagacatctacaagcgacagctcatggaagttcagtag

SEQ ID NO: 502333 - DNA, 216 bp, Stenotrophomonas maltophilia
atgctgagcaaacatgtggataaccgcgtgcggcccttggcgggcaaggctgtcaagatggttggtcaaaaattgatcacgctttttgcagggtcgagtcatgcgcgactgcgcttggcaaaaagcgtgtcgaccaggggcgacacctaccagagcggggcgataaagccagtgcccaccaaggtgggcacccaccgggcggggtggcagtgctag

SEQ ID NO: 502334 - DNA, 840 bp, Stenotrophomonas maltophilia
atggcaaacgacgccgacacgcctgtgggtcagggcccttccggggttctggcccaggcccagggtcggatccccgcaggcgctccgatcctcgatttcagcggccgccgcgtgctcatcgccggcggcagcaagggcatcggccgtgaaatggcgctggcgtttgccggcgccggcgcacgagtctcggtctgcgcacgtggccgggttgggctggatgccctgtgcgccgatgcccaggcacagggggcgccagtgcacgcgttttccgctgacctggccgaccccggccagatccaggcctggctgcaggccgccgccgatgccctcggcggtatcgatgtgctggtcaacaatgccaccggctacggcatggccgacgacgaggatggctgggccgcgagcctgcagatcgacctgatggcagccgtgcgcgcctcgcggctggcgctgccctggctgcgcgcatccggcgacgcctgcatcctcaacctctcttcgattgccgcgcagcagccccgtcccggtggcgcaccctatgctgctgccaaggccgccctttcgcactacaccacctcgcaggcactggcgctggccaaggaccggatccgggtcaatgccatcgcacccggctcgatcgcgttcgatgacggcctgtgggatcgccgccgcgtcgaagaccccgacctgtaccacggcacgctggcgaagattccgttcggccgcttcggccacccgcgcgagatcgccgatgccgccctgttcctgtgctcgccgctggcgcgctgggtcaccggcagcgtgctcaacgtggatggcggccaggtgttgatgggctga

SEQ ID NO: 502335 - DNA, 321 bp, Stenotrophomonas maltophilia
gtgagttacgagtacagactggtgttcgatcacacctcagcagcgaagcgcgtcatggacgtactggctgaggacgccagctgcgtagggcgtcaggggccggatctctggttgaaggatccagcgctgcataacggcgcggactacgatgtggggctgacgtacgaaggtgactgttcgctgtggttgcagatccagaccggctccctgtatctgcatgcacgcctgcaggacgcgctggacggcgcgtcggtggtctgccttgaagacggcgatatcagtgacgccgtaacgctgcgcgccgcatttcgcatccggtga

SEQ ID NO: 502336 - DNA, 528 bp, Stenotrophomonas maltophilia
gtgcatccgattgaaagcgaacgtctgcggctgcgccggatcgatccggagcgtgatgccgcgcagatgctggcgttgttgaacgatccgggcttcgtgcgcttcatcggcgatcgtggcgtgcgtacgcagcaggaggcgcgcgattacgcggcggcaagggtgctgccggcctatgcgctgcatggctatggcatgtatgccatcgagcggctggccgatggtgcctggctgggcaatgccgggctggtgcggcgcgatggcctgccggggccggatatcggctatgcggtgctgtccgaattcgccgggcaaggctatgccggtgaggcggcgcgggcggtgtttgcctatgcgcgtggcgagctgggcctgcgcgatctgtatggcatcaccgacctggacaacgtggtgtccggaaagatcctgctgggcctcggcatgcaggagcgcggggtggtccagctgccgggcgtggacagcccgagccggctgtatgccacgccgggcgcggccgacgtcgggtag

SEQ ID NO: 502337 - DNA, 153 bp, Stenotrophomonas maltophilia
atgcacgagacccgcaagggcaacccgtggtacttcgacatgaaggtccatatcggtgtagatgagttttcaggcctggtgcatcacgtgaagtgtactgcggccgatgtcggtgacatgacggtcacccatgagctgctgcatggcaaataa

SEQ ID NO: 502338 - DNA, 4017 bp, Stenotrophomonas maltophilia
gtgaacactgaaaaactgcgcatggccgcggcggttctgctggggctgatgatcatcttcttgtgccaggtggcacacgctgacgcttggattgaactcactgggccagcccaaatctcctacacggcaccagcaacctatcagttgcagctcaaaagtggcgtcacaagcactggccccaaagcggagtatctggaagacatacagctcacgcgcaatggccaagtgatctcccgacttccgaacgggacatatactgagaacggcctgtcggcgggcacgtatcagtatgtctacaaggcatttggcgtgcgcaacttcaacggcaatgagtcttacagacagctgatctcacccacgatcacggtcacggtggcggcaccgccaaccccttttgacggcgcggagtacgtttccgcaagctggcctaattcggccgatagaggaaccccgttcagcggtactgtcaccttccggaacacgggcaacacaacgtggcgagcaggggaaggctatcgactgggtcaggcagagcgctacgtttccggcgccacgaaactcggaattgccgaggttgctgtaccccacgacgtggctccgggtggcacagcaacgtttgcgttcagcggagtagcggccagtgaaaacggaccgacaacgctccaatggcaaatgaaccggaatggtgctcgcttcggtagcaccagcagcgagcagatctttgagacgaccggaaggctcaatcgcggcgtcatgtatgagcaagaggtcccgaccagcatggagaccgggcggacctatcgagtcaagctgaagttcaccaacacgggcaacacgacgtggtcggcgtcggcgggctatgcattgggatcctggaatcccaatgacaatgtccgctggggtagggcgcgggtcccaatgccgaatgacgtcagtccacagctgcctgcgttctttgaattcgacgtggtagctccttcattgccaggtgtctacagcttccaatggcggttgctggaagagggcaaagaatggtttggtcgcgaaagcgacaatgtccaggtcacggtcagcgggccgccgtccaaggtaatcggcaacatcgatggtgtcaccagcgacggtcagattcgaggctgggcgtgctcgacgggcattgattcgtcgattgacattcatgcctacaccggtggagccgccggcagtggtgggacgatcttcctgaccggcaaggccgacttggcgagtgagccggccgtggctgcgtcctgcaaggcgggaggcaatcatcgcttctcgcttcagatgagcaacgagcagcgccgccagcgggctgggcaaccgatctatgtccatggaatttctcccgttggacaacccaacaacacccttgatggctccggcgcctttgtggtccctgcagcccccactggcacggtgtccgcgactccggccatgtgccaaattgcatcgggcgctcaaacctgcaacgtcacgttggcctggtctgcaacggactcacgtgcggagctctggcgtgatggcggggtgttagtgggcagtggtgccagcggctctcttgctgcacccatcggtgctggaacgagccggtttactctcactgtagacggcgatgtgatcgctagtgcgcttgccaccgcaaagaggactcccatagcgcctgtcgacccagaaaatccggcgccgacggttgctcggagatacgtctacgacgagaacctccggctgtgcaaggtcatcgaacctgagactgggtcgagcgtatttggttacgatgcggcggggaatctctcctggagtgcaactgggttggatttgcccagcgtgacagaatgcaatcgcgacgcacctcagattgcttctcgccgtgtttcgcgtgactacgacgccagcaatcgtctgcaggctgttgtatatcccgatggtcttggggatcaacagcttgagtacaccccgacaggccaattgaagatcgaaaaggtcttcaatcaggatcggattgcggttgtcaccactcgtacctacaactcactcggggcgatgacaagtcagagccgtgtggtgggtagcgctagcgcccggtccctggcatttggctacgaccccttggggcagcatatccgtacggactatcccgatggttactccgtgcggcaatctttgaacgccttgggccagcccattcggttgcaagacggtgctggtgccgtgctcgcgagcaacatctcctactcgcccagtggcgaagccatcgcgctgacctatggcaatggcatcgtccgtagcgtgaccgagaatgcacgtcagctggccagtcgcgtcgttgacggcggtgtggccgacctaaactacagctatgacgaggcgggaaacattacccagatccgtgatgctgtgcgaggggatgccgggacgatcagcttgggctacgaccgtctcgaccgactgattcaagccagtgctccagcctatggtggcagtgggcaatatacgttcggctatgacacgctggacaacatcgtctcgatgcggttgccgggaaagcgggagcgtacgttccactacgacgaccgcaatcgcctggagttgctgcgggaccccggtggcaatggcgtctctggcttctcctatgacgcggcaggcaatctggcgatccgtaacggccagacgttcacctacgacgtgggtggcaagctccgtgccgcagggaatgtgcagaagtacttctatgacggggcaggactgcgcgcatccgcatcgggcagttcagccagttcaggcagcacaccacacgtcccggggctggaggatccgatcacagttccgctggacggaaggccgatgcaacttcctgtggaacgaggggcgtccgagcttttcgtagatgcgtcagacattccagatcgcacctggcagtacttggtgggcggggagctgatcgagtccacccaaggcggggagacctctgactacatctatctgggcaagcgactgctggcgattcgcaccagctcttcagcaggtgcaatgctcacttaccttcatcacgacgcgctcaacaccttggcggccaccagtggcgccaatggtgcggttctaacccgtcacttctggtcgccgtatggagaggcagacgcagcccctgctgcaacgattcccggttactcaggtcaccttgcagacgtagatacgggactcgtctacatggggcggcgctactacgacccgcagctggcgaggttcatttctcccgatccgttggcggccagcacctccggaggaccgaatttcaatcgctatcggtacgccagcaacaacccattcagtttctctgaccccaccggggcgtgcgatcagctgaccggatcccgtgtgtgcaatggcactggctttgccggagacagactgagcaccacgcaatacacggccggaggcatccccaagtacgaccccagcgcccccgcacctgcggagacggtcaaggcgacaggcctggatgcctttgcggaatacttcgcggaacgaaatttcttcactgggcagggaagcctgaccgatttcgacgcggtctcggaagcgatcgttgttccgttgatgaactctccgtccgggacaaccgtcgcggggggtgtcaagcttgccactgtcattgtagtggcgcgcgaagctaatgcggcgaagggctttgggaatctttcacgggcagctgattttggtgttgcaccgcacaatgttctacgcaaggctgttgcgggaacggggctccagagtcatcatctgcttgagaagaggtttgccgaagtggtggggcagaagaaatctcagatgctctccgtcgcagttacggaagctgagcatcagccgtttacgaatgcgtggcggagagctttcccatatggaactaactacaggcagttgagtgctgatcaggttatgaacaaggcccgcgaaatttatgcgaattatccagctttccttaaagaattaggcctttaa

SEQ ID NO: 502339 - DNA, 2637 bp, Stenotrophomonas maltophilia
atgatttctgccaaggacaggcgggagggaaaatccccccgtagtaattatcttaattcgcgactttgctcgatcatcacgggcgcagcgcttacgttcggggctgggttccacgcttcggcgcaagatgggctcttcaattaccaagaatatgagaagcgaataaagagcgcgcagtcgctcgccgctatctctaccgatgaggtgtttggcgatcggaccgcaggcttcgacggtagtacggagttcttcattgaggacgtgtccattcccggtaattttgaccttcctgtgagcgtcgctcgacgcttttcggtggaggcgactaaccgaggatttcgcgatagcgagaccaagggtctgacactgttcgatgattgggaaatcgtcgtgccttatatgtcgggcgtgtggaccaaaggcgctggatggatcacgggtgaccaaggggctcagaccacgcagcgttgttcggtcaacaccccgcccttgctgctggagacctggggctacaccgacatcggctttggcatcgatgtgaagtggaatggcggaaacggcgaggaacttctgattgccgatgacccatcctatgcctctgcgccaggccttgaggtacccaagtggatgacagcgtccagagcgcgattcacttgtctgtctgcaacgcgcaacggatacccaggcgaggcgttcgtggggcatacgcccgatggcaagaagtacttctttgactggggagcggaaaagccctacgccacagccaaggccgggagtcgcatgatggcgcgtaagcgcgtctaccttctggcatcgcgtgttgaggatcgttatgggaactgggtgtcttatagttacgacgggtaccggctcaccaggattgagtccagcgatggacgccggattgacctgagctacgatggcgacggccgggtgaccacagtcacggccaatgggcgagtttggcggtatgcctatgtgggcgatacggagggaaatgacggcggcttgtcccaagtgacactcccggatggctctgcttggacctacagtcatcgcgggcggcttcaatcaagccttcctttgcgtggcggtgacgatgggggcgggtgcgagatccgcgcgggcaatgcccctccacccacgcagatgacggtaacctctccgtcaggtgctcaaggcatcttcgactttgaaatggagctgtttatccgctctgatccttgcaacggactccttccgtcgcattacgatgcatggtccttgaagaagcgcagcatcatggggcccggactgccttcgatggtgagtacgcgaggctacaacctgcagttgccgggaggtgggcgctggtccagcctgaccaagccggatggcacgcagattcgcgaacgctatggcgcagatccgggcttgaacgaacgaaagctcctccaaaagcagattctggatgcggccggccaggtgcaacgtgatgagctaagcatctacacctttggttccgagacaggtccgtttgccgtccgggtaggacggtcaattggacttcagtcaggccagttcttggcgggcacgctgagtgcgctgagcgagagccaattcagtcaggatggcgatacctatcgcgtggtctacagcgacttcaatcgcaatgcccgtccggcacgcgtgacttacactggcccctccggatccaaggccgagatacgagagtatcttgatgcgcccaacccttgggtcttggatcaggtgctgagtgtcaaggaggctgcgtcgggaaagatcaccacacagtatgcctatgacggtatggccaagccgaatgccgtctatcgggccggggctttgctgcagagtgttacttatgcggcggatggcacgatcagtgcagtgcgcgatggaaaggggaacgaaacgcagatccaggactggtatcgcggcgtgccgcgattggtcatcaatcccgatggcaccaccaatcgcatgtcggcagatggaaacgggtggatcacttccaccacggatgcgctgcagaggaccacgtcctatcagcacgattcgatgggtcgcgtgaaggaggtccagccacccgtcgatgagaaccagtggaccaagacaaccatctcgttccagcaggtcgcggccgatgagtacggcctttcgccggggcactggcgagtcgataacgcccaaggggcacggcgccaggaaacttatctcgatgcgctttggcagccgctcctggtgcgcgaatacgatgcaaacgacatcgcggggacccaacggtgggtcaggaacagctacgacagcgagggtcgcccgatcttcacttcctacccttcaaaggatagcaatgtggcgaccggcacctggactgagtacgacgcacttgggaggaaaacttcctcggcccaggacagcgagcaaggcctgctgatcacgaccattgcctacagcagcaatgctacgactaccgtcgttgatccgctcggtcatcagacgattacccggtttgatgcctttgaaggaccggactatgaaaagcctgcgcagatcattcgtgccaacggaagcaaagtcagcataaagcggaatgcatttggcctcactaccgaagtggcccagtccgcaaactga

SEQ ID NO: 502340 - DNA, 441 bp, Stenotrophomonas maltophilia
ttgagctcattaactgacgcgtcatgccaggtcgcccccgatggcacccgaccccacacccactactgtgccacccgccacacggacgaggcggcacacattccctatatcggaatcgggctccacgtactggcagccatctacttcgcggtgcacgccatccgctcgggccagagcctctactggctcatcctgctcttctcgttcccgctgctcggcagcgtcgtctacttcctggcgatctacttccctgaggcccgcaactcgcgcggcgcgcggcaggcaatccgctccgccaagcagctcatggacccgggccaggacctgcgcaacgctcacgccgagctggcgcgcacgcccaccgtgcaaaaccgtgttcgcctgggcatgacactgctggatgccggccaggcagacgaagctaggaccctgctcgagtag

SEQ ID NO: 502341 - DNA, 357 bp, Stenotrophomonas maltophilia
atgacccagccccactcccctgccccgcacccaatccacgacgtgcccgcgaacgggccggcgctggatccgagcaccctcattgccctgctgcacagcatcggctccggcgctgcttccgatggccaaccctggccggaacggcatcagatgcccggccgtcgattggccctggccgataccgactgttcgttggcgggcctgcgcgtggtgctggagatcctgctggccgcgcagcgcgcccgcgagaacggcgaactggagcagtacgtcggcccgcgggtcatggaaggtctgatcatggccgggctgggactcaccgcgcacgccagcacgcgcctgcagccggagggctga

SEQ ID NO: 502342 - DNA, 693 bp, Stenotrophomonas maltophilia
gtgtggcaccattgggtggcgatggcgctgtgcctcgcccgagtgattgcggccccgcgccagtggtcgttaccgtccataccctcgcctctcgcgttccagagcctctctggcgtgcgctattcgcagctgcgtcgccaagcggtccagttcgcgaaggcacggccgaggcagggcttccaactcgtcgaacgacatgcagacggcgctttccggattcactgcagagacgttccagtgctgtggctggataggcgctcgcagcatttgctgctggtttcactggatgcgaaacagcgagcgcccgacgttctgcagttacgagcgctgctgcaacgacagatgcattcattggactacctggaacaggtgcttgctggcgtgccggagcctgttttgatggatcgggtgcagtggatacttgccggtgggtgcccgatggggcgcgatgtggcacgcaatagtcgagcgtggctcgactctaaaggaagaatgctgcgctcaacgaggagtgttcagaccccgatcaatcgaacagcgcctcgatcgccgccaaccccgccgtcgcccgctccttcttgcgcgccgcatcggccaccggatccgcaccatcgcgctggatctcctcggccggaatttcctcgaagaaccggctgggcttcagccgtacatgctcaccgaacttgcgggtga

SEQ ID NO: 502343 - DNA, 1977 bp, Stenotrophomonas maltophilia
atgcacggtctgaatcccccccaagctgccgcggtcctgcacatcgaaggcccgttgctggtgctcgccggcgccggcagcggcaaaacgcgcgtgatcgtggagaagatcgcccacctgatcagctgtggccgctacccggcgcgccgcatcgccgcgatcaccttcaccaacaagtcggccaaggaaatgcgcgagcgcgtggccaagcgcctgcgcgagcaggacgccgacgaggtgaccatctgcaccttccatgcgctgggcctgaagttcctgcagatcgagcacgctgccgtgggcctgaagcgtggtttctcgatcttcgatgccgatgatgccgccgcgcagatcaaggacctgatgcacggggccaagcccgatgacatcgaggacatgaagaacctggtgtcgcgcgcgaagaatgctggcctgtcgcccgagcaggcgatggccgccgcgcgcagcaaccgcgagaaggaagcggccagcgtctacgagcgttaccagctgcggctgaccgcgttcaacgcggtcgacttcgacgacctgatccgtctgccggtgcagatcctggaagagaacccggagatcgcgctggcctggcgcgagcgcatcggctacctgctggtggacgaatgccaggacaccaacgacgcgcagtaccgcctgctcaagcagctggccggtgagaagggcaatttcacctgcgtgggcgacgatgaccagtcgatctacgcctggcgcggggccaacccggaaaacctgcagcagatggggcgcgattaccccgccctggagatcatcaagctggagcagaactaccgctgctccaaccgcgtgctgcgcgcggccaatgcgctgatcgccaacaacccgcacgagcacctgaagaaactgtggagcgaccaggccgacggcgagcgcatccgcgtgtgggaatgccgcaacagcgagcatgaagcggaaaaggtcgcggccgagatcgccttcgtggcgcagtcgcgcaaggtgccgtggagtgatttctgcatcctgttccgcggcaacttccagtcgcggccgctggaaaaagcgatgcagctgctgcgcatcccctaccacctgaccggcggcacgatgttcctggagcgccaggaagtgaaggacacgctggcctggctgcgcctgctggtgaacccggatgacgacaccgcgttcatgcgcgcggtgcagtcgcccaagcgcgacgtgggggccggtacgctggccaggctggccgagctggcgcaggaaaaggacatgccgatggcgcatgtggccgagaccatcggcgccctgcagcagttgccgccgcgcgcggccaacagcctggcgcgcttcaccgacatcctgcgcgacctgcgggcgcagatgcgccaggtgacgtccggcgacatgatccgcaaggtggccaaggaatcgggcctgctcagcgaactgcgccagcaggccaaggaagaggccagctaccagcgccgcgccaacaacatcgaggaactggcgcagtggttcgagggcggcccgcgcggtgccaccgccgccgacctggccggccagctggcgctgttgtcgcgcagcgacaaggacgagggcggcaaccaggtgcgcatgatgaccctgcacgcctccaagggcctggagttcccctatgtgttcatcgtcggctgcgaagatggcgtgctgccgcaccaggtcagcctggatgagggcaacctgcaggaagaacgccgcctgctgtacgtcggcatcacccgcgccaagatccagttgtggatgagttacagcaagctcacccgcaagttcggtgagcatgtacggctgaagcccagccggttcttcgaggaaattccggccgaggagatccagcgcgatggtgcggatccggtggccgatgcggcgcgcaagaaggagcgggcgacggcggggttggcggcgatcgaggcgctgttcgattga

SEQ ID NO: 502344 - DNA, 1287 bp, Stenotrophomonas maltophilia
atgaagtcactcaccgacaccaagatccgaagcagcaagcccaaggctagtggtgcattcaagctgaccgacggtgaaggtctgtatctctacatctcacgcagcgggggcaggagttggcgttacgactaccggcttcttggcaagcgtcgaacgcacacttatggaacctatccggaactgtctctggcggatgcccgccagcttcacggactcgcgagagcactcattgccaaaggaaaagaccccggcgaggagcggcgagccgacgccacgcgtagagttgccgagagcaggaacacttttgaagccgtcgccagggacttcgtcgacaagaagctcaaccgtggtgccgttgagcaaagatggaccgctcgctatggtgcaaaggtgtcacgcatgcttgagcgagacgtctttcctttcgtgggttctaagaggatcacagaggttggagttgcggagctcagcccggtcctagagagagtcgcggagcggaccaccttcaagatgccccaccagtcgaaagcgaggcagagggagaggggggcggcgataacagctatccatatccgtcaaatctgcaaagctattttcgcccacgccgctggtcgcggtctcgcgcgtttcgactttgacccgacatgggggcttaagagcgtcgtcccaaagccacccgtgcggcatggacgccacttggaactctacgagctttcggagctctggacaaaattggaagcggcggtcgcaactgagtcagttaaagtcgcaacggagttactcgctctaacattcgttcgcactgctgaactaaggcatgcagagaagcgtgagtttgtccttgatggcccagagccttactggagcatccctcctgagaagatgaaaaagcggaggagccacctagttcctcttacgccccgtagcgttgaattggtgcgccgtctcttttgcttgtccggcaactcgccctacctgctccctaaccgcagaggtgacggagtgatcaatgcgaataccattaaccagcttctctataggatgggctacgctggacggctatcagcgcatgggttcagaggcaccgcttcgacggcccttaatgaaagtggatttccaccacacgtaattgagatgcagctggctcactacagcaagcaagacaagactgctgcatcgtacaaccacgcccagtactggagagaacgcgtggaaatgatgagggcatgggaaaaaatggtttacgccaacgtagagaacgttctgccatttagccgtgtggcgtaa

SEQ ID NO: 502345 - DNA, 990 bp, Stenotrophomonas maltophilia
atggctagaaacgccacagaacctggtcgcaggaaggctcgcggtccgggtcgcagctttgactgcggcaagaacttggttgtagaaaaaaaggctgggcggtttaagctcgagtatcggtcgaaggtcactgagagcgcacagatatccgagctttgtggttgtcctgagtacgcctcaaggtaccgaagcatgcagcgaagcatagactccagttcgctaactgaccttcagcgcgcgtaccgaggagagtacagctcttataccaacggcaagtacaacaagcgaggaatatacttcgatagagagcaccttggtgacttccgagacttccttctacacatggggccgcgcccgactaacgaatcgtccgtagaccggatagataacggaaggggctacgaaccgggcaatatccgctgggcaggaaagaaggagcagactgagaaccggcgagcgaccaagtggatttcatgggacggcgtacgctatagcagggctcgcttcgccgcgatgttgggcatccgccccgataggcttcgacaacagctagcaagaggctggagtgtggtcagaatagtcgagcaaaccagccatatcagggatccctggaggggctggcaattcgatatggacgatagagatgagctggagaggctgtatcgcgcgagaggaagctacggcaagccacggatagacttcctaattgagcacttgcaaggaaggctgagcaaggagtctcgctcagcgcaacgtcgctcgttgctttcacttattgaaatatattcaaagaagcgccgtgagttggtgtcgctgtcctctgggctggagatggagaagaccgaccaactgctttcctttttcgacactcagcttaagagcgctgaaatctcgcgcacgggcatatctgacgagcctactattgacgtagaggcggagcaggtgcaattgattgcaaagaagaagatcaagtatgtgtacgaggactag

SEQ ID NO: 502346 - DNA, 1062 bp, Stenotrophomonas maltophilia
atgctttttggctatcccgagccccgtcccgacgacaactggattcacgaatgcatcctgtcggccgtgaaaaacgtgcatgatttagttggggctgacgggcagctgcctgcttggcctttcatacttccggaagcctaccaagatcggctgaaaagccgggactcgttagaaagctgccttactgcatattcttcggcgcttcgcgagctgggagctgcagagcgtggatcaattcttgacgcaatgtacgcgcagaacagaattgccgagcttctggctggaactgctgaatgccagcagctatgtgatcttcctgagaagatacgcaagccggtactcgacctattcgagtgcgggtttcgcctgcttacggctctgggcaccagacagcgacaatatgaggcggtctgcctgcatattccagttcgagtttgcccattctgcggatgcgagcatctggaagcgccagggttgccacaagaggacttcgatcacttccttccgaggaagaaatatccctttgctgccgctaacttgaggaatctcgccccgatggggaaacgttgcaattcctcgtacaagcttgccaaggatcctctacggggaggagatggggtgaggcgaagatcatttgatccgttcattgaaaactccgtctcgatctcatttgctcgcagttctgtcaacgaaaatgccgtcggaccgctcgtatctgaatggaaagttgattgttatccattcgatcagccggaggcgacatgggacgacctctttcaggtccgaacaaggtgggaacagaattgcgatgagaataccgtcaagcgctggctgcaagagttcagctccttctgcaaaaggagtcgcgctaatccgaagagtgatgcggatttgcttgacgtggcgcacaactatcagcagtacctgagtgactgcggtttcgcggatcaggcttttctcaaatcggctgcattcgaaatgctggtcggaaagtgcaaagcaggaagcaagagacttctccccgttttttgggatctggcgggtgcaaagctgcaaagctaa

SEQ ID NO: 502347 - DNA, 1620 bp, Stenotrophomonas maltophilia
atgaagcttctgcgtgtccgggtcatcgcagcgcagtcgtgtggaggtcttctcgacggtctcgacgtgagattgcgagatatgccaccaacggctgacaggtttgagcctctctgtctgataggccccaatggtgctgggaaatcccagttcattcaggtggtcgcagaggcattccagtccatcttccacgcctgcctgccgaaggaagagcgcggagagtgtaatccggacttgcaatttgagatcgagtatctagtagtcacacgcggggagagcgtacacgttcgcgcatcccgcgtggcggaggggcggcgacgtcctccggtgagaatcgcgcgcctgtcagatggcgattgggtggagtgcgacctggccgatccaattaccgaagaactactacctgcgaaaatcattggctacacctccggtgccaatgagacgctaagcctggcatttctagtttcgcgtgctggatacgcggacgaggtggcaaagcgcgcgctgaatgcacaacaggagggggctcccgctcctgacagccgcttgatgctcatcgactacggcacgcaccttgaagtgctggtagcaaatctactcttgggaacgcgggaacagcatcaagcgctgcttgaggatatacgcgtagacgatctcaactcctttaggtgcgtaattcagctagcgcattctgcagtgcgtgccgcgccttcaaaaaaaggcgttgcgcgtaagggcatccagctcaccaaggagctcgaatcgtatatccaatacttacaagcttgcgccaccgcgtatcatcacgatgagaagtcggatacctatacgttcgatttcttggtgactgacgcgacgcgtgaatcgtttgcgtatttttggaatagttcgctagaactatatgcagctattcacaaaatagcgatgctcaatgacctagcaattccgagagttacgcgttctcgttttaggaaggataccctccagcggaagttcgcgtccaggcttcctgagcctcaggatgaggaaaaggtattccggttcgaacgagtggagttcagggctaccggtggaaaaggaattgttgactatgtgtcactttccgatggtgagcatcaaatggcgcaattgatcggaactatgagcatggtttcgtttccaaatgttcttttcctattcgatgaacccgagtcgcacttcaatccccagtggcgcgtcaagctactttcgcgtgtactctctctaaagacggccaatggggctcgttcagatgcctctctagcctcccttcaagatggtttgctgacgactcactccccatttgtggcatcggacatgcacaaggaaagggtgttgatctttcgaaaacacgcgggcgcacagaaaatagaggttcggaatccagatattgagaccttcgggacaacgttcgacgcaattcttgccgagtgctttggcatcgagccgccaatctccgatttgtcaatggccaggatcgatgagttgaacagttccgaggatcctgcggagattcaaaggggaatggctgagttgggagattccatagagaagataatgctcgcggatcgcctgcgccaacttaaacggagggtggattga

SEQ ID NO: 502348 - DNA, 1575 bp, Stenotrophomonas maltophilia
atgaaagacttgcctcaaggttgggtagaggtggaaatcggttcggtagcgagcatcgtggccggtggcacacccaactcgaaagagctgaagaacttcgcaagtccaggctgcggcgtcccctggataactccagcagatcttagtggctataaatatcagacagtaatgaatggtgctcgcgatctgtcccagcaagggtacgacagttgctcggcaaccctcgttcctgagggggccgtcctattctccagccgggcccccatcggatatgtggctattgcgaagcaacctgtgtgtaccagtcaagggttcaagaattttgttctgcccaaaggtttcgagtcacgcttcctctactatcaactaaaacagctgaaggcgcaggccgaagccctagcaaccggcactacttttaaagagctatctacctctgcggtgtcctcgctcaaggtgcgaatcgcacccactgctgagcaaagccgaattgcagataaactggatgccttattcggcaggatagacgcttgccgcgagcgtctagacggcatacctcgagttctcagcaacatccggaagaagattcttgatgccgcaatgtctggagacctcactgatgactggcgagacgcgagaccgcatctagagaagtgggagaatcgggagctcgcttctgcctgtgtgagcggccgagtcataacttacggtgtgatcaaacttggcgaggaagttgcggaaggcgtgccctgtctgaggaccagtaacgtccgctggttgcagattgacacgtctgggctgaaacgcattgatcccggtatctctgaaaattacgcaagaactgtcctggaaggtggcgaagtcctggttaacgttcgcggcacgcttggaggtgtagctgtttcagatgaatcaatgaagggatggaacgtttcgagagagatcgctgtggttccgtgtgatcgagaactgtttgtacccgctttcctagctttttggatcgccgcgccgagaactcagcagaagttgtccggtatggaaaagggcgttgcctataccggaattaatcttgaggacctacgtacccttcctgtgcaaaggccggatttggcagagcaatctgaaatagtcaaacgcctcgagtcgttgtttggcttggtggatgcaatcgaggccaaatggagcgtcgcgcgggagcgcgtggagcgtctgactcccgcattgttagaaatggcattctcaggtgagttggtgaatcaggatccgagtgacccgcccgctaagtccctgttgccagagtttgcagcagcaaaaatcaagtggcaatcccaagttaagcgtaaagctagagagagaggaacagtcatgaaggcgtcgtctgacaaatcgcttgttgatatcgtggaggcgatggaacagagcgaatttacgttcgacgagctgcgactgcaggtaggcaaggactatgagtctattaagaaagaactgtttgctgcgcttacggctagccagccccgtatcgaacaatactttgacgctcaagcgaagacgatgaagcttaggagaatcaaggtatga

SEQ ID NO: 502349 - DNA, 1497 bp, Stenotrophomonas maltophilia
atgccctgcgcagcccctcgccccgctaaacttccccgcatgaccacgcaagacatcgtctccaagctctggaacctctgcaatgccctcaaggacgacggcgtcacctatcatcagtacgtcactgagcttacctacctcctgtttttgaagatggcagatgagactgggaagcaaggagaccttcctgaaggttaccgctggccggatttagctcatcagggaaaaaactgcctgacgttctacaagaagttgcttaagcacctggagcggcacggctctccacttgtgcaggagatttttgcatccgcgaccacgtcggtaaagaaagactccacgctctcggcaattattcgcgagattgaaaggttggactggtacagcgcgcggcgtgagggtctgggtgatctatacgaaggcttgttggagaaaaatgcgagcgagaaaaagagcggcgctgggcagtacttcacaccgagagtcctgattgacagcatggtcgccgtgatgcggccaacactaggtgacgtaatccaagatcccgcagccggaacgggcggatttctcatagccgcacatcattacctggcgagcgctcatgacctcggcttgctcacagccgcacagaagcgaaaactgcgtcgcaatacgttcttcggcatggagcatgtacaggacacacagcgcttggcgctgatgaatctgatgcttcatggcattgatagctcgccgcacgcaggaggcatccattacggtgacaccttgggcttggatgggcaagctctagctgagactggcgctacgctgatattagccaacccacccttcggcactaaaaagggtggaggcttgccctcgcgaacggatctaccataccccacgagcaacaaacagttctgtttccttcagcatatctaccttgctcttaggccgggtggccgtgccgctgtggttcttcctgacaatgtactttttgaaaataatgtcggagtcgaaatcaggcgcgaccttatggaaaaatgcaacctgcatacaattcttcgacttcctcccggaatattctatgcgccgggtgtcaagacgaatgtgctcttctttacgcggggcgtgtccgataaaaggaacaccaaggaagtttgggtatacgacctccgaaccgatatgacaatgttcggaaagcgaaatgccttggcacgcgaacacttctcagaatttgaaattgcatacggtgacgatccgaccggctcacctagcagcatgaagaaacgaagggaaggagatcgttggcgtcggttcacccgaaaggtgatagctgagcggggcgacaatctcgactttgcctggccacggcaaaaaaaatctagctcttcgtctgaagagggtagcgccgcagcgcttaccaggcatgccgttcgtgaactcgaaggcgctctcgatgatctggccatgatccttgctgagctaggaagtgggcttcaacaagaggttgaccgatga

SEQ ID NO: 502350 - DNA, 591 bp, Stenotrophomonas maltophilia
atgaacgccggcaagaccaccaccctgctgcagagcgcacacaactaccgcgagcgcggcatgcgggtggcgatcctgacgccgcgcctggacgaccgggccggcgccggcgtagtcgcttcgcggatcggcctgcgcgccgagggcatggccttcgaccgtgacaccgacctgcagcgctgggtagagcaggaccttgcggaaaacgggccgatgggctgcgtgctggtggacgaggcgcagttcctgacccgtgcccaggtctggcagctcagcgaagtggtcgaccagctgcgcatcccggtgctgtgctacgggctgcgcaccgacttccgcggcgaactgttcgagggcagccagtacctgctggcctgggccgacgagatgcaggaaatcaagaccatctgccacagcggcaagaaggcgaccatgaccgtgcgcgtggacgagcatggccacgccgtgcaggacggcccgcaggtggagatcggtggcaacgaccgctacgtgtcggtcagccgtgcggagttcaagaagatcacgcgcggtgaagggcggatcgacccggcgcaggcgcccctgccgctgtaa

SEQ ID NO: 502351 - DNA, 426 bp, Stenotrophomonas maltophilia
atgcatcgcctccagctcccgcgctggagctggctcgcacttccgccggcggtcgcactcgccggcgggggcgcatggttgctgtaccggatcgaccccagcggcgtcgacagcccgttccccgcctgcgccttccgtgccgtcaccggcttctactgcgtcggctgcggcggcacccgctgcgcgcatgcactgctgcatggcgacctgtccacggcttggtcgatgaacccgctgctcgtgatgctggtggccctgctgccgctggccatgacctggtgggtgggctatcgcccacggtggctgcagccgctgatgcagctgctgggcacacccacgttctggctgatcctgctacccgcgttctggatcgcgcgcaatcttccctggccgcccttcacatcgctggcgccgttggcgggatag

SEQ ID NO: 502352 - DNA, 369 bp, Stenotrophomonas maltophilia
atgagcactccgcagccgcccatcgcgccgcagacgccggcagccccgattcccacctacatgacgccgtcgatcatcctgacggtcgcttcgtttatcgtctgctgcctgtcatgcgtcagcatcgtgggcatcggcaccggcatcgtggccattgtcttcggcagcaagaccagcaaggcgctggcagcaggtgacattaccgctgcacaagctgcttcgcgcaacgcgaagatctggatgtgggtgaccgccggcctgctcgccctggggttcctggtctggatcatctcgctggcaacgattggtgtcggcggctacatggaacagatgcagcagttccagcgccagctggaaagcagccgctga

SEQ ID NO: 502353 - DNA, 954 bp, Stenotrophomonas maltophilia
atggccattacgccgcggctttccgccgacatcgctccgctggacctggagcagttcatggccttggcgcgcaaacaggtggatgtgaacgaaccagaaagcgcgcttcagcttgctgatgcattggcaggtctggcgctgcacccgcatctgatgcgtgacgcgatcaagaaccaggtgcaagccttcctccaaggcaatcgacgagtcagttataccccgcagtcaatcatcctcggcggtaccgattgcttctacgtgcgcgccaacatatggaccccgccgcgccttaccggtgcgatccgcgagcaggaagaacggattttttcctacaacctggcacacgatcacaacttcgcatttctcaccgctggctgtttcggctccggttatcgaaccgagatctacgactacgaccccagccaggtagtgggctacgtcggcgagcgcgtggagctcactcgacttgaggaaaccaccttgcccaagggcaaggtgatgttctaccgagagcgacgtgacattcacatacagcatgccccccaggaactatcgatctcattgaacctgatgctgctttcaccccgcagccagcacaccgaacaatactttttcgataccgtgaagggcgtgatatccggtattcccgaggccgcgtatgtctatcgccgcgcatccctggcggccctgctaggcgccattggcgatgagcacgcactgccgacgctgcacgggttgctggatgagcattcgaaccgacgggtaagggtctccgcgctccaggcgatccaccaacttcagcagcgagccaaccagcactgcgacgttgctgagcgcttcgtagacgacggcgacccattgatggcgatgacagcacgaagcctgcatgacggtgtcgctcttgctgccggcttggacctggccagcgccgcggacctttacaagcgcgactga

SEQ ID NO: 502354 - DNA, 783 bp, Stenotrophomonas maltophilia
atggactgtaggatggattttgcccgggggattgagcagcatctgctgtctcctggtgcctctctggccggatgcatcggcaggttgcacagggaagagctgatcaaatggacgcgcgactgcatcctcgaagaactctccggcaacggccagcccagccaagaggccttcgccgttacgctggcgcagggccccgcgtggcagttaaaggtggtccagcaatcggtcaacactcgctttctctacacccagccattcgaactggttgtcatgccgctcaatggagccctgacggttgagacgtgggagatcgccccctatccgcttctggccgagggaagccgcatccagcattgcggcagtgccgtgcttgaagcggggtcagcgctactttgcggtgcatctggcacggtccacgatctgcgcattcagcagcccactctggtggccaagctgatcggtgccgtgcgcgaacccctgcaatggatgattgaccgcgagcagggcgaggtcgtccaagcgatctcatccagcccggtccactccgagcttgagatcatggctcgcactcttggcgctttgcgtgatgggggcgccgagaccctggccagccttgccagccatgaaagccacttcgtccgctggtcggcaatgcaggccatgggccgtgtcgacgtccagcaagcgttgcagctgctcgatcacgcccgcaatgatgcgaatgcgcagatccggcaaagcgccagcaaggttctggcccgccatgcagaggcgcgttcctga

SEQ ID NO: 502355 - DNA, 486 bp, Stenotrophomonas maltophilia
atggcggcaagctacctgttggatgagagtgtcaatggcggaatctggacggcggtccagaacgacggttcgacccagtcgcagcgcaatggtctggtgttcggcaactacgcctatcgcgtgagggcatgcaacatttctggctgcagtgacttctccaacacggtggtcgtcgcttccaatccgcccccgggtacgccgcagttcattcattccatcaagtcgcaatggaaggaggggcgcgctaccaagatttcctgcgaggtgaagtggaccagcatgccgggtgcaaccaactacgagatgatggcctatggaggaaggctggagtattccggtccggagagttcgatcaaggcccaaggcgcggtctactgcgcggaagtgcagattgtacgcgcctgcaatgccagcggttgttcagcctggtccagcccctatccgcagagcgttgtggattacggcgacctgaccaacccttggtga

SEQ ID NO: 502356 - DNA, 711 bp, Stenotrophomonas maltophilia
atgaagatcaaggaaattctggttggtttcactgttctgtcgggactgctgctgggggcggtgagtgcctcggcgcaggagatcgtccattatgtgcataccgacgcgctggggtccccggttgccctttccgatgccaacggcgcgattatcgagcgcacggtgtatgagccctatggtgcggttgttggtggcgcgaagggcgatcggcctgggtttaccgggcatgtgtcggactcagcgacgggtctgacttacatgcagcagcggtactatgatcctgaggtgggggcttttctttcagtcgatccaattgagtcttcaaatggtgggcccgtattcttcaatagatatcgatacgggaatcagaatcccttcaagtttgctgatctagatgggcgcgcagcaacatgcaccgggacgaacattcagagcgtgtgcaatggcggaggggttgctgggatgcagacctcggcgagatctgctgcatcattgctgagcatccgcgccaagactccgggtagtcaggctgcgctgattaggagcgcaggtggggatcccgcagttctggatttggcacgttcaactcacgaggatttcgtaactggcctcattggattcgtggcaggtggcgggttctctgtaacgagggggggctctgcacagcttttccgaaatcttgacccgcagattcaattgttcctgctgtga

SEQ ID NO: 502357 - DNA, 507 bp, Stenotrophomonas maltophilia
atgcacgccattatcaagaaggccgcgctcaccgccgcgctggccaccgcttcgctgtctgcgtctgccgccgaaacccacatcaccgtctgggccgacgtcgacccgaccctggccctgctgcaggctgacggcagcgtgctgccggattccgtgccgctcacccacaatcccattcgtggcctggtgccgtgggaacgcatggtgcgcatctattccaacgacgaaagcgccgacgtcgaggtgcgtctgctgagcacgccgtcgctggtccaccaggacggcaccggtgccgccgtgccgatgaccgtcagcctcaaccgtcgcgcactgaccacggccgcacaggacttcctggcgggcgatctgttcgacggtgcgatgccgggtgcatcggtggcgatgccgctgaccatcgcccagaccacgccggcaccgatcaccgccaagggccgctataccggtctggtcagcatcgccatggtgcagaaggccggcactccgtaa
